United States Patent Application Publication US 2008/0114160 A1 - sequence listing, part 10

SEQ ID NO: 4986 - DNA, 21252 bp, Oryza sativa
taaaacaaattgacacgataaatcaatatatgttataccatttcataaatatataaattaaaatttggcatctataagttgagagagggggttgtcttaaaaaacgaagagagtggactatggcatcgatgatgtctggcgatgcgtgatggcaatgaacagcggcgcgagctcctttgacgtaaagtccgagggacgtgggtccctgatgataggcgaggcccactttcataggcccacacgtcaatagccatgtccctctgactttacgtgaagcctcgtccgtgaacagcgggatggacggagtggcatataatggaagaactcgcattctcgatgataaattccccaaggcatataaattaggagaaaacagacgatatgccactctctaagatgggttcggataaaatgccactcaatataatgcaccagataaaatgccactcaatacattgtttaccggatgaaatgccactttggagacttttatgcccaaaatgtccgtgtagcacaggatgactcgccaggcggcggtggcggtggcggcgacggaccgcggggacgacagggggaggaggacagggtggcgaggacgacagggcggaggaagaggccacgctgatggagccttagacggacctgtcgacggctgtcgtccccgtcgccgcccgaccactgttgcttgcgacgccgtcctcctcccgcataaactttttctcctcctcccccacgtcgcctcctcgtcctcccccggtggcgagtgcgcgtgggtgccactgccgccgccgtcctccttccccacatcagcgccctcgccctatggagccggcgctgtcctcccctcgatggcccctccccgatggagccggcgctgtccttcccccttcagcggggccctcctcctccccttcttgctgcccacccccgcgcgctcgctgcccaccggcgacgagcacggccgccgtcgtttctctctccctttctctctctccacggtgagggcattttggtctcaaaactgctcaaagtggtaaagtatactgagtggcattttatcctttgcaatctaatgggtgacattttttcctttgcaatattgtggagtgacattttatattaggcagtaaatttcgaaaggattgtaaatttggatggtacataattaattttttcgttttgatggcaaaatcaatagaatgaaatttacgcatgtatcaattcgcggcaggcagtcataattggagggagaaattaactgggaagaatatatcaataattgattctacatatccacataatcactaattaactgggaatttaaagccatgcaaaatttgtgcatatataactcacccgcaagggagttcagaaaaccatccaattcaacaaatcatcttacataggttgatcgaagatcaaatccaccagtatacgtaggaaactgaaaatgtcctccattaatggcgtcagtatcctcttcctcctcgccgtcctccttccggcgtctcagctcgccgccggcatcgactcggccctgtacggtgcatgcaagaccgtcgccggcaacagcggggtggtcagcgtcacgttctgcatctacgcactcagctccgacaaccggagccacgacgccgccggcttcaaggactacgccgtcgtcaccgtcgacctcatcacggccaacgcgacgagcaccaagtccaagatagacggcatcctccagaacggcggcggcggcggcgccggcgacgccaagaggcggtgcctccagtcgtgccaggcggcgtacgccggcgtgctgcgagctcagcctggcatcgtcgccgacgtgcagggcggccggttgccggaggcgatttcagcgctggagaagtcggccagcggtgcaggaatgcgagaatggtttcggcaagagcaacgtgacgtcaccggtcaccgcggatgacgacgactccttcggccttgccaagcctgccgctgagtttcttcgttgggaattgaaatcctgaaagagagatcgattatctaatctgttttttctcaacataattagctatttatttccctctatggccatatctccttctcaaataaacaaagataaagggaggttgaaatggatttgcaatttagagaaaattagcatgcacgcaagtggagtatcttaaacatgttttttttattttacatgctgctaatggtatttatgtattccctaatttatcttctctaatgtttccacaattagaagacatatggatcctacaggcctactcctagtatgcctagaataggagacatagtaggcctatgcctagaataggagacatagtaatttacttttgactactgtctcggttccttttcgcgctcgatttttcagcatatccggatctatcgtgcttgacactgtatttctgattttttttaccgtgattgattagtaagtttaattaaactttttaacagaaggtttaattttaaattgaaaattttgagtaaattttaattcaaatttaaaaacttttaactcatgaaaactgtaaagtcaaattttaagaaacttcacgaattttgaaaactttcaagtcaaatattgaaagctattaactcgaatttttaaaaaattttaactcaaatttgaaaaattttaactcgagtttgaaaactttcaactcgaatattaaaaactttcaactcaaattttgaaaactttcaactcaaattttgaaaactttcaaaccaaatttaaaactttcaattaaaaattttcaactcaaattttaaaaactttcagctacaaatttaaaattttaactaaattatttatgtatttctttaacataatggtataagcactgtcatcagagatgagcactacagtgagaaagtttattaacgaataggagcaaactcaaggtcattgatatgctttagaagagagtcgaggtgctccaaagtgaaacaacagcaagattatatagtccaaaatgaagacattggtttaagggtggtccaaagcgaaacatcctaataaaaggtggtctaaagtgaaattactcaacaacaaattaaactctaaatagtttacgtatattcatagttaaatttgtttgtttttgttacaacttatggaagccaaattataacttgtagtttgtggagtgatatattacatgttaaaccatattgtcaaattttttttgaaacatttttataaccatttagttgacatgcaataaacgagtggatgtctacacgggtgattacaatccctctctgttctgccaggcttgctgattctgtcagcaaaattaaaaaagaggtggttcatactaaaatcaaatttgttgtacatactaaagttcaaataaagccctcactataaaaaaaaaagaagttgcataaatattaagacattacatcattcccagtcccaatataccaccctgcaacttgtgttctaaaacatagccagatcaaatgaggtcaatgagaatggaaggagtaagaactgcatctcttgcccagcattgggtaactcccttgtaactggcacaacctgcaacaatctagtatgttagacaaactcgcgatgcctgataatttcttgtgttccactgaaattaattcactgcatacaactcctttagaaagatgatgaaataattccagacacgaccaaataaacaggttccgtaaaagcttacgaagaaaactaaaaggaagaacagagaagatagatctacaaagggtatatgcttatgtaccacacaccactactttgagtactacaaataggagacatacagctcccacagttttacttcaaaaataagggcatatgtcctaacagactataatgttgtaatggaaaagctgtcctctgctaaatttcagtgcataattatgaaacaaatagtgatcaaataacgactatcttaccttgtttggttcactaaatgaattctcatccagtaagttgctggatgtgagaacagtcacagttgattttgccgcatttacaccagcttgaagtccacttgaagatattgtaaggttcacagcacttggcccaaagtttactatctgcagatagaatcagtatgttctaatatatatgagcatattactccagcagtagaacaaataagacagatgttacgcaagtaaccggtgcttcaatcaattttatattgttgaaactacattattctaaacactaaggcgcttgtcgatcaatgatttcaagcaatggtatacaagtttggagaaactggaatggttggtttacctttaccctcagaaagatatcctcattgtcctgccaggtgattgcagatgctgccagtaaatcaaagtagctggagctgatagtgactggatgaatcacagaaccacttgattcacggaaatatgtttgcatccaataactaggagttccatactgttgccaggagttgaagacaattgcatctgggttccagctggtttttagatttacacattaattgtcaaagagagaacagatgctagaatcctaaacaaagtaaagtactaaaccatgaatactaacgtgcgatcattttcattcacgaagagtggtgcatagcttgccatctgaatgacatcgctgcaaagaagcaagcaaagtccaattcagtgtaaatatttgtttttttaataaagcttcctcttccccgcaaaaagaaatatttacaaattagaaatttatacatactagttttcctataatttctgaaatagttattttccttctgtggtgaagtagaagaatgagataataattgtagagacaaattaaccatttgtctaggaatcccttcaaagatcttttatgttcatgcataatctggagacaacattatatgcatgattttatatttcctctgtgtaaacgagagggattggcgaaataagatgaataattattgtattaagcttcaagggctgtttatatagcatgcatggcttggaggttaagaaactatcttcgagataagaaaagcctcttagggataagtcagtatcgggatgacaaatactaaacttccaaatacagagatatgccaaattgccaatatactctaatgctctaaacccaagataaaggagagagtatcctgagaggaactaaagggatcacctgtttttctctaaaccagtgaggaaagcagcttctgccaacgatgcaaggaggcttccattgccagcatcaccccctttgtcattattaacagcatactcgcttacaaatacctggagtgaaacaatagcataatcaatggttattttgactgtctgagaaaacagtaagacataattttaaaacagggagaatgatacaaccaaattagcttcggttagtattttacatggaagtcatacagatcagcaggatgatcaagtggcctagacgagccatcacagttcgaaattatttgaatgtcaggataagcctctcgtatagcattgtagaacttggggtaattttctgttcagcataattatatggttatatgatatcacaggaaaattaggatattggtgatagcagtagagcattgaagtgtactgaaacaacattaattataattgatagtcaatttagctttgttcacatgcaactagtaaagtgtgtctgtttcaaaacataacaacaggctagacaattaacctattttcatttgtttttcctagaatacttccattatagtactcagagtcaaaagagttgcaggtaaatgaaatagcgcttttgttgcagatcaatagagaacagaataatgaattttggtaattatcacagcattgacatgaaggaccataaacatactattttgttttagtcaaaatttaccttggtatgtcggcttgaatatttcacaatcttcattcccgagtgcaacatacttcagtgggaatggttcagggtgtcccatcgcggctctaacagagccccatgttgattctttactccctcttgcaaactcaagactgtctattgcatcctgtagcaagaaaatcaaagtatttcgaaataataaacatgggatgacaataaatgcaatgccttatgtaatattcacaagttataactgttttctgttacatcatgagaagccaatcttcatctcaaccatacttcaaaaaattgtagggtatcgaaaacatacctttacaaaaggtgtaagcatagttccattaactacatcactgtgactcatccctaaatcacaagataaaaactccgagcagttcattggtatgcgaggagaaaagattaaaaaaaaagtaaaacaagacaaagtagatgcagaatatttaccaatgttgagcacccgactggagcagcacccaagtcttcagcaagatttatgaagacatgaacagttcgaagtaaacaaatgatcagatatgatgagaccaagagagaactcatttgacattaatcaatccatacctggagaaagtcataatacccaaggccatcatcggtccagtagtgccaaacatctccatagtgcccaggtctctcttcccatggaccaatagtttccttccacctgaacgcattttttaaccaattgccttcaacaaagcaaccccctgccaaatgtaatgccagcgattaaattacagggcaaccaaaattgattaccagttggaaaacaatcataataccaggaaaccgtagaaaccgtggttttaagtccaaaagcatgtacatgagttcctggcgaaaaccatggccctgcatacatggaagaaaaatgcctatcaacaactcctgtgaactaatagtaagcatggctagattaaggaacaataagttgatctcacatctctacaggactaccgattacagataagttaattttttttttttgtcagatagaaatgagaacaactgaccatttttatgatgacttttttcgaatattcttgaaaaatgtcaaatagcatacatgatttgaagagggtgcccattgaacctggcatgcttatactagtgactaaatctttggggtcagtacatgaatattattctccattcttcataagatgatagcagattccggatcaagctatgatgacaatagcaataagaagataaaaggcaatgcaccttgtatgtttctgaaggcatgagtgacacctgatcaagccatatcactccccttctcctagttgtcagttcaagtcttgaagttctgcatgtcccatgagctagtaactgcagctctatctttgtccaatttaacaaatcagtttctctgaaaaatttgatgtacaatcctatgagttagctagcgaacaagagagagagagagagagagagagagagagcgagaaattgagaaagctttttcttaatctcagtgctaaggaaaaaaaatatataccgaacaaaatttgatgccagattttgcgatccatttgagcatgtgagtgaagccgtcaactccaccgattctaatgatctgatatgcatgactagattatatgtcttcctttcttctacattctgaaaattgaaatgatcataatcacattaaaatatcagaaggtaaaagtgaaaatggtttgacgaaaagctataacactgattacactttccaagcaagtgatgcacggcaataagatagaaaaccagcattatgcgatcaatgcaaattgaaagcaaacaaaaaataggttagcttagttatctgttagcttcagtattttgataagaataataactttgctataattaccttcggtggcagcaccgtatactttaaactatcatcagaaaaaagattctttcgattacaagatctattttgcatattcatatgggaatgagctgctatatgctgagagagaacttataccatgccccagaatcctggattgtatattccaacaccaccagctggacaatcgtcacagacaacctctatccttacagcaaccggattttgactgaaacaggatgagcgatcagttgtgacgtgcacagaggattcatctccaatgatggaccatgggtcaatgtttgatgtgttggctccagcttcaaaacctaaagcaagaaattagacaaaagttcagttaaagttaaacttcaaatattattatttatttatttatttattgagggggaaaatgttttcttattcaacattgctatacatgaggtgattgatttctccccaaatattcttggcagtaagatcacaattcacaaatccaaccatccatgttgcttcttcaacctccagccttctcgcacacagacacacaccacccccaaccaaaacgaggtcgccggtgaatctcgagcatccctgcgccgatgagcctcctcctcctcctcctccttttggctttcctccccggcgcgacagagggcgaatggattagggtattgtgttggggtggggccgtggagtggatctggcggggtagggggtttgtggagggaggagcagttcatcggggctgcgtattcagggaggggaggccttgggcggtagggcgaggcggtggggtggcgccgccggtgcggtgggtgaggaggcggcggatccggccgcgagagacgccggagatggtgcaggtgcaggtgcaggtgcggggagggaggaggcaggagggaatcgttcacaagagatgaaaagaaagaagagaggagagagagagagagagagagagagagagcgtagccatgagctggaggttgaagacgatctatcaaccgttggatgggcatccaacggctgacagcactccactgctatctcctcctctaatttaagactgaattgtactttgtgcgtaaacgtttcactttgcatcaccctatacacaattttttttactttggactagataattttatctttattacataatggacaccctaactctctttgttagccatgtctatcatttccttcggcaaagatatagcatgcatataagtatgaaagttcatcagcatgtcgttaacgatttgctcaaaatcattgaagtgctgaagatgtggttttgagtaatccattatacaacaaagataaagttatttaaaatgaaaaaattgaacataggatgatccaaaaaccaaaatgaaattttaaaaataaaacatgatccaaataaaattaactctttaatttaatgctcaacttcacaagagaagagctctagaaaaacaaaaaggagaagagagacaaatcgtgtctatgagctggaggttgaagacgatcaatcagcctggatgggcatccaacggctgataccactccactgctcttctttataatttaatggtcaacttcagctcggaagccaaataaaataggagtagtataatgtggtgtacgtgtacctctgttactgacgagttcagcccaaaggccaccacttccagcgtggttaatctcctgcacaaataataataatacagatttcgataaggaaaaaagcaaagcatccgcaggagaataaatggaaaaagaagaaagaaatgaaaagaaacgagacgtagctagctagctagtcacctcgaagaacagaccgaacagagtgtccggcattcttcgagcgacagagtaatcgacatggagagacgccgtctccaacgtctcggcttcgcatctgctgccgccgccgacgaagaaaagaacgaggaagacgacgacgacgacaatggcttgccgggacagcatgctcctcgtcgccggcggccacactctcatcattctctctgcgaccacaatgatcaatggattgggtacgttgttacttgcgagagggaggcttgattattcgaggttgctccatatctactgctggaaattgctctagttagatagagtaagtcacttgctaaaattgccaacaagttagttcattcacatatatgggttccagtaaaaatgtacagccagagcccatattttcttcatttttcctcttctttatctgctcatcttgattcattccacagaaattcctctgccaagggaggcttgagttagtgtgacatgaactacactacttgagttacacgaaacgatccaaaatgattatttgaggttgcacgatctactgctggtaaatgctttagttagagagagtcagtcacttgctaaaattgccaacaagttactagttcacttcacaagttcacatgggttccagccaaaatgtacagccagcccatgcatattttcttcctttttcctcttctttatcttctcatcttgattcattcgacagaaacatatcgaggaagacgaatgagcacaagcatttctattgctaaccccgtgcacgttgcagctgcacatctctgccaccagcaccactttgtttggaccggcccagatcaagaacgaatgaggagcaagtgcatatgctcctgcatcgaagctgtggcttgagatggccaaaaccaccaattataccacacattgacttgtgcattacatccagagataaaagtagaaaacagttgcttaccttatccggggttactgaaacagttctcatcaatgcaaaagacacaaagtttccctctccaatcttttctcccatcatgattttatcaaccaccagttgaatttgttctctactcagcttcccacaatgtaaatgactagtcagtatacctatatggggaacatgccatatttacagtgaaacataaccacaaagaatcaacagccatcctaatatggattggactccatttggatctgctcaatcctaaattcaaattctcagtccataatctgagccttaattttctcaagtttaaatgccaacttcagttcaagttcaaatccttaatcaaattctgatattctctacaaatctgttatccttggaccaaattattttctctttcccaggccaaagagctcatatttgttatccttggaacaaagcaacacggtggcaatgcgccatctagtctcatccgatataaatatggagaaagcaaaaaaaaaagaaaagaaaagaaaagaaacgaaaagaaggaagtaagccaggagtgaattttattcatcattccctgtgtattacactatacagtagtgcttcaagatacatgcacatatatggacagcattctggtattcgcatatcacatctcgtgtatttcttgtgtttctgtcgctaaccttgtgttgctgcttcacatctctgccacgagtttggactgggcaagcgcaagatcgaatgaggagaaagagtgaggagcaagcgtgacttgcatctgctctgctgcattggaaagctggcttttgacaggaacaacctgcattggttgtcatgagcaaagctttggcttcagatgaccaaaaccacaaactctactagacattgatatgtgcattacatccagtaagaagtcagaaatgtttgcttaccttattcgggttactaaaagagttctcatccatcacattactggatgtgagaacagtggcagttgatcccagtgcattaacacgggcctgaagcccagttgcagagatcgtgaggctcactggatcagacccaaagtttataatctgcacaggagatttcaagatcaattcatgaggtacgcaatctcctacagatgtagagtaggtttagaacaaaatttcttacctttactcttaagaagctattttcagaatcctgccaagtaattgcagatgctgccagagaaccagagtagctggaagtgattgtaactggatgaaacatagcaccgctagattcaccgaaaagagtctgcatccagtaactaggagttccatattgttgccaggagttaaatacaatggcgtctgggttccacctgattgtttgattgaagcattattacagtacttgttaaataaacaaaaacacaaataaagaaaccatggagtcatcaaaactaacgtttgatcattgttgttcacgaagagtggtgcataacttgccatctgaacaacatcactgcaaagaaccaacaagaagttacaatgaatatcttgttgcatttgttagtagatcttaataaagccctacccagaggaaagctcaaatgtgatctgtcacaagacccagaaagaaaagattgtttcaaggaaagatcacctattcttctccagtccagtaaggaaagctgcctctgccaatgaagcaagtagacttcctctacctgcatcacttctccaaacagcatattcactgacaaaagcctgcaaccaaaacatatatgaagaaagatagaagtgaataagcaagagatgcaatgaggttccaagattatccaaaacatgtaaacatcatcacacatgacatagatgaactgtggacattactgaattattgttgagaaatagatgaccaaggtcatcctacaaatatacgagagatgtcatgaaatcctggattattaatgtaaaatattagatgaagatgggagatttcacagtgctattctacaagcatatccacaaatgaaaaaaggtccacgacaatggaagtccgggcatacaacgtaccttgggcccattacgagatgatctatcaaatgtattcttcattgaaaacaaagtcttagaatcagtatagacctagaaaaaaggaattgtttcaatttaataaatgggaaaagccttgacatttgtgacaaagaatgagaagtgctggagaacacaactcaagaggatgagtagtttacatggaaatcatataaatcagcaggatggtcaagtggacttgatgaagcatcacaatttgaaatcatttgaatgtctggataggcctcccttatagcattataaaacttgaggtaattacctgtataatggataagagaatatcatgcatgtacctaaaatgagaattcaacagttgttctccacacaattcaagtcaaacatgtgccttatcattggagattatgatcaaatataaatgatttacatcccaaattttctaaaaatgaaaataatcacattttagtatgtttgctaccaggaattgtttttatgtgttactaatcctagtttatttgcaacaacaaaaaaatagaacatatattactacaagtaccattggcttggcgaagtacagcagaggaaaaggagaacatagggcataaaaaaagtaatattatatgcagattaaaatagtgaaaacaaatgtctccctgtaaggttttgctatggagatttatgtgactaaattaatgaaccacttctaaggaaacaggtacaactgcataaagaagttgcggcctttatttacagagtgagttgagtgactaccttcataaaaaaaattacaggattagcatggtccatgtacatatcttttattcgatcatacaccttaatttattccagacaaggctcttcaatttatgcagttatatggtgaagtgataaaataagaaagtaattgaggaatgcaccgcggtaaaattttttcccacaatcttcatttccaattgcgacgtatttgacagggaatggttcggggtgccccattgcagctctaacagaaccccatgttgaatctgcattcccccttgcaaattctagactgtccaatacgtcctgtagagagacaacaagagatgttcccaaacaaaaaactggtgttacgacaagtaacatagcttcaattcaagaaaagatatttagtattttcttggtaggtacattgttatctgtaagtataccagaatgcaaattcaggttaaacatcatcactccttgtgaacattgtgaattaatttttttgaaaagaactttgagaactaatagagtaaaagaacaagcccaaaaccatctccttttttacacaaataatcagctctatttcaatagtgagaaaataaggcaagagttttagcatcattcaatgagacacatcatatgcagttacattcttaggatctttaatatttagatatgcaaagataaaagatggaacactactatgatggcagtaaagatagtatcagttttctcacatgccatatccatggaagtgcagccatagctaggacgttacaggtgaattctaaagtggaaactatttaacaaatcaaggtgcatctgacctgacagaaaataaaatagagagttcagaacatacttttacaaaaggagcaatcgcagcagtatcaacttcatcattatggctgattcctgatatttaaagagtttagtgtcgattcaggaggtcagctgtggtgatcaagatataaaaaatatggcaattattaccattgttgaacacccagattggggcagcacccagatcctcagaaagctttgatgtggagttcaaagttttcattagaaaaatatagaactcaaaggcaatatatgattaggacgtgataagaaaatgaaaggcaggaataatgtcaagtaaactagtacctggagaaattcataatatccaaggccatcatcagtccagtaatgccaaacatccccaaagtgtccaggcctctcttcccatggaccaatagattccctccacctgaatgcgttccttaaccattccccctccacaaagcaacctcctacaattgtttgaatgtaaatcaagtcaattatcccagacatgtctggcatatatgtacatatcaagaacttgattttcaatgggaaaatatagctcataccagggaatctcaagaatcgtggttttaagtccaacatcatagatataagttctgtgcgaaaaccatgtccctgtatgtgtaaaagaaatgttggaagcacttgaaaaagcccatgaagacttaaagtgttatcatacactatacatagatagcataaaaagcccatggcatcgttttccttttccagtaatgaagtttgacaacaaaatataatgtaccttgtaagtgtctgcaggcatgagcgatacttgatcaaaccatacaactcccttcttgttagttgttatttgaagccttgaggttctatttgttccttgagcaaccaacttctgctccagttttgtccaattcgatgcaccagaaaccctgcaacaatataatcctttcaaaactaatgggaatgggcaaacatccttgttctcctgtcccagtattgagagaaaaggcactaacggtatggtagttgaagccaaattttgcgacccatcagaacttgttaaggaaactgtcaactccacagtttctggtgatttaacatacatcactaaattgtagatctttccatcttctatgttctgcgggttgatatgacaattacgggtgatcagagtattggaaaagaagcattgcaaaagttaggaaagcaaatgtttactaacacaagtgcacaaaagagctatcactacatgaaaaatcgaaacagaacatgtggaggtccatgatttacttgttaattttatgagaaaaggaaagaaaatggcagcaatactgtgaggaaaacaaactaaagaacaacgatatataagcccataccatgccccagaaccctgggttataaatgccaacaccaccagctgggcaattatcacagagaacctccatccttagagcaacagtattccgactaaaacatgacgttcgatcagtcgccacaaatatggaagagtcatcaccaattatggaccatggatcaatgtttgatggggtatgagggcctccagcttcaaaacctgtgcataaaactcataagttggttatactaaaccctaaatgtcaatataacttcaaaaaaagggcatattattttccatcgagtttatgctcttaatcaaagttttgtgtgtcaagtttacagtactaaaaagataactatgtttaaagtttatggggaaaacataatttagttaatcagatagtatggagaattttcgattaaagacaaaataacaaaaggatttttttttcgtaagccatgtttgtgttccagcagactgcagaagaatttattcatgtccattcagaagcaaattatgttttatctggaagatcgatcaaaataagtgcatatattacaacaaaaataactgaagtacctctgttactaacaagttcagcccatattccaccagcccctgcatggttgatttcctacaatattagccaagatcattatcatcaggacatggtggaacatgtataatctacctggattattctgggcatgctaatgcacttgagcatcctaacaaaaaagtgccagaggaaaggatatagtgatacagtgcaattgtgaaaaacagaattactgtatatgtctcacggcttacctcaaaaaatattccaaatagtgtgtcagggatctgtcgagcaagttgcggtgaggcatcaaccttgaggaccgcagtctgggtcgcatgtaagtgtaactctgaagctatacacttgcagccgagggagaacagaagcaagaagaagaaaatggtactcatgaaggattctctggaagccatacttggagctgtaaacactagtgcaggccgtgtgtctgttgaacaaataaagccagaagatgatacagtatgagaagtcaactaaggaagataggcatcggacaagtagatgctattactagatggcatgaaaacagcgataccattagaagaaacgaaaggcaaacatagacaagacagtgatatgtccaaaaccatgcttacaagataaccaaatcatttgctttgtttagaaaatcacaaaagcgttgacgccagacaatttggcaaggattaggaaagctgaggtttcaaatgatctcatcatcagggtaaacaaacacaaaaaccaatcaattgccttctactcggtcatttcatcgaactggtcgtttgcataaccaaagaaacaaaattggaaacaaaagaagtcaagcaggggggagcagtaaacgatttcaccaaaatcgctcaccataaggccaccatccaagacctcagacctcaacaaggaaggaaggaagagaagctgggcgccggcgaggcgttggggggcggacagacacagaccgaggctttggtgttaagtagaggagaggaggagagagagacagtggctttgaagggaagtgtacctcgacctcgtggggaggcacgcaacgcaagcagaggaggtcgcgcggccgcctgatggtgatcggatgccggaggcgcgcggcggcacggacgggggagttgcttgccgcggcggggttcggcgcggcggttgggtgcggcccgcggggcccactgacatacacgtgggattgattatccgtagctacagtatttaatcatcgaatggaatggatcatctgtctatggctctgagacatctctgtgcccccacactgcctggctctatctaggcttagggtgtgtttagtcgcgaaaagaaaatttttaggtgtcacgtttgacgtttgactaaatatcgaaactcgaaaagggttttcagacacgaatgaaagaactaatttcataactcacctagaaaccacgagacgagtttattaagcctaattaatccgtcattagtacatatgggttaatgactcaaaaatttgtctcgcgatttccatacaaacagtacaattagttttttaatttatatttaatgctcctttccaaagattcgatgtgatatttttgaaagaaaaaattgggaactaaacgaggccctaatctatagcatgattggtgtctaaaataaaacaaaaatatctcaacagagtagagcctggattcaaatgcgatatttgtcgtggtccttatcgagctggctgtattcaaccataattggccaaagattaaaaaaaatttgaaactttttaacaaaatttatctgactttcatcggtttttggcaataacgttaacgacgagagttatcaatggaaacgctagggagggatttcagctatcgatcacattttgaaatcataaacagagcacaccaatacaaaagaggatcggttcttcatggttccttgctatcgcaagggatgaggcagttgtgcctccgtcaaagtttgtattagtacttcctcgcaaaaaaaaaaactgtattagtactaccaaagtataaaaaaagaaaaaaaaatcctctaatcaattgatcatttcaacaagactataaaattacaagtagctctctcctaggatttggtcagcagtgtggcagtgaagattgtcatgttcattctacatagttctaggtactaggtaatagcgcatgttctggcatacagaaagaaataaaaaaaaagagtacaatactgttatatttagacattttattaagtttattttacccctcaactattgcacttgcataaaatacccatttaactctaatatgaagtacaaacattgctgttattaatagggtagttcggtaatttaccataccttcatgttttgtctataaagaaaatgctagaatgacgaggagtagtgtgttttgttttacaattccgcggggccgtacctaataatctgagtcccctatacgaatcacaaattggtatttagaaaatgccaagaaacaaaagaataaattagtggtggtattttacctaagtcagaagaattttttttaaagaaataaattttagaaaaagaattgtggtgtgatgtagtgattttttgttatgtggaaaaaatagaatttgtaatgcccgaaacatactccctccgttcatattcaaacccagaattgggtttttttgagacgaagggagtatgttcgtatcattatcaccctctttaaggtggccataattagtagtactacttaccaaagctgaagaaacaaactcattctagttaaatctattatattattaaaagaatagaaaaaggagcttccacgttcgttctcatggcctagaaattctcacattaatcgaagaaaaagaaaaggcagagtccatatagaaatacaatttaaaaatagctgaaattcggaattaaaaataaggaatattagaagtagagaatagagtccatatagaaatacaattaggaaataactgaaattccgaattaaaaataaggaatattagaagtagagtatagaatccatatggaaatacaattagggaataaacataataaaattaaaagtagagtttagagtccgtataaaaatacaatttacaaataactaaaattcgaaattaagaaaaacatgggaagaagagtttaaagtcaatatagaaatacaatttagaagtaactgaaatttgaaattaaaaattaaagaatattgaaagatgagtttagagtccacatagaaatacaattagaaataataaaaaatcagaaataaaaataaataatattagaagaagagcatagagtttatatagaaatacaatttacagaaaattcggaattaaaaaaaaagaaatattaaaagatgagtctagggtccatatatgaatatatataatttacaaataactaaaatttgatattaaaaataattaataactaacacgtatataaaatacaatatgaatattacacattagtagttttgtaaagttattgcaaaatttaaaattatgttgttattttaatatatttgaataatataatgagaaaacatatatgttattatataagagaaaatataatgatgctagccgcgcaatctgcgcgggccaccatgctagttaataaaaagtaagagtacatttttttcaaaaaagaaaaaaagcgagtgaaagatctttaaacatattaaaatgcattggcataaattaagatatgaaaaaaaaatttaggacctctaattagtcatccacttcgtaggtagtccctcatcgacaacgttgcaattctgatcattcatggctagaatgaaattgattaaagaaaagtggtgattagttaagaacctagtaagatgtagccatgcaggacagcaagtgaaacaaatttcccagattatttgccgtcaaattgaggaactatattgaccgggcatgcatgaaaatactcgctcatgcgtgatgattgatggaatattatggcgttgctttgcttgggttgggtctaaacgtgaaggaacatcgatcgatcatacaagcgcgatagcgatgtgactcatttaccactgatctgacctgattctgatcgagagaaatcactgaaatgcatgcgcatgcgtgcactgcaacacaaacatattgattcatccatggatcgatcgacagatatatctagcttgagtttgaatgttgcatatataataatactagcagctcatttatgatttctcgatatatatatatatatatctgatgcgctcttgcgtgtccgtttgcactcgagatattgaagaagaagaagttgcattgcttgcaagatatatatgcgacagtaatcgtcacatctgtcctggagaatataatgcacaagtgttcattgcagttccactactcttctatcgatctttaatttcctgtattactattaatctgcccgttctaacgctatggtggtatttaataacgtaattaaacaactaaaaatatatacaatgtatgctttagtgattaagactataatgcacaagatagttttaagatcacacaaaagaaaagaaagagaattagattgtttaaacatcaatctgatatatatacataaataggtcaaaagtagacatgttcaatacaatacataaataccttcgaccagcagtgaaacacattgtctgctaaatcttcaggatgcgtttgcacagtatcatagatatagcagaaagaaaaatgctacgcatacgatttttgtacgatcaaacgtaacggcgcggacggcaggggaacctaacgcgagcgcacggcgcacggcgcacgcacacgcggcaggagcgcttatgggcccgaaagcccaattaacctctttgcagcatctgacttgagattatatctatacttgagattatattagaataatctaccaggtagtattcaatctaactaaatttactgtctaatctaaagggaaaagaagatattttgggccttctttctcacgactaaaagagcggaatgtttgaaacaagttctgcttcatcaccatgtgacatcaattaatgtgctgagcagcactatactttggcttttaagtttgtctctaggaagtctctatgtatctaaacatatgcaaaccttgtttgacattggttcatactacctccatcattttttaatagatgacgccg

SEQ ID NO: 4987 - DNA, 13044 bp, Oryza sativa
actattcgtcttattcaaaaaatttatgtaattataatttattttgttatgagttgttttatcactcatagtactttaaatgtgatttatatcttatacatttgcataaaatttttaaataagacgaatggtcaaacatgtgagaaaaagtcaacggcgtcatctattaaaaaatggagggagtatataattagaaagaagattgctttggttggctatgcaagcatgccaacgagagagcagaccagcacgtcagagcttgggctttggatatgggctcaacagggaagcgatccgtttcatcgctaaaaaaccgttagaggtcaggagagaaacgtttcatcgtacaaacatcgtacaaaaacaatcgtacgtatagcagtgctgatagcagaaagcatattcacaaatcttgaagcacaaaggaggtaaacaaatattatttggctctgtgacaataatctaacatctacaacactataaaaagtgatgtctaaacggcacaagtaggttggtgcagtagcgcgtaagttgcaacttaaaccttgaagtattaaaccttgatgttcaccctttggctctagaaactattcctctacattgttatcagccactgaggagtattatctcaacattgtagtattacctaccaacagagattgttttttttattttacattgacaacaagatccttgataccttgttctttgaagaggttatatgcctccgtccaatctgaaatagtaaaacaacgaacaaatcgtaagtgcaaaatatataaaaggtatcagaaaatgcctatcagaagtttcaagagaaacatgcttgacccttttgtatttcacaccataatcttatatagggcctgtttggtacagctccaactcctaaatttagctccaggagttgggtttggagtggagttgtggagctgcctaaacccagctccacaactctagtttattttgtgagagagctccacctagctccactcctagttttggtggagctgaaactgtttggctgagctccagctccaggaggggtagagttagagctggagctgtgccaaacaggtccataggctcctaaaacacaattcagatatcaagttaatcgaacaaaatggagtatacatgcgcaaaaatcattcgacattaaatttaattgtcaaaggtgacataatctttaccctgcaatattcatccatcatctcatataactccaagcattcagatttgtaaggtgcatttataaatttcgtgaaggaacctatcaaagttcatccatcagcttgttacagttcttataagtgatagttttgtgttgaacatgtgacggttttccgattgcaaaaaaacagagagaacttgcaaaaagcaagttgaattttcattaaaaaacgagttcagtggttgggagtatagaagaaaacaaagcttaaaatgtaaatgtaattgcagggaatgaaattgtggtgtaagcattgaaactgcaagcaatgcactgattaacttgactattacatgtaagtctgttctagctcaatcactaactgcatcccctttactgaccaaaactatagtcaaccttgagcaggatgagcacatccacaaacccatggaagatgtgctccaacacagaagaccataagcaagagctatgtaatttgccttcaattcagtgagtcccagtttcagtgagcaaaatccatcagataagcaagacaacatgaaaaggctacagaaaacaagaaaacttctgaaccactcacctcttgtcaacatgattagttttgttcctaaccagcacaattatagaaatcactgcccctctcagttctgaattcctctatccattttgaagtgtttaggaaatattgcctggctacagcatgtaaactaaatttaaggaaaagggcctcaggacaagaaggagcatttataatgcaaactatcaaaaatcacaattttgtgttcatgtgccatcaaatttgcttggcaacaatctctgccggtctggttcatccttgctagtttatatggcaccttagatactataacatgtgctaaagagtgaatcacaataagagcataccttcagtaccactccggaccaacaacctcttctcgggtgccaacaaggtcctcaacgccggttgctcagcatgtctgaatgcagaggaggaactgagaagctattcgatttactcattgctatcagctatcaacttgcatgtgtatctccatgccaccgcaatctattatacagtaaaaagttcagtgcatcgctaaataaaaataaaaatacttcaatctacatgtttaatttttatctaagggttatttttcaaagctactaacagtaattaataagttgttatctgcagttctaggaaatgattggtatgttaatgggcgaaatcgagtaaagttaaatggatttgcaaattgatctaaaataagattattaaaacagattattccatgataataactgtactgccagtaaagataattaaaacaacagcagtagcaggaagttccacgcccaatctaatttcaaaatgactgtaagaattcaagcatgaagataaataatggctgtcaaaatctgatatgatggcagtgatgtatataagtaaatttgatatgtcggcagtgatttgatataaaagtcgttcccctttcaattgactatacaacaaatctactccatcagaaattagaaatgttgttagcatattcagaaaaaaaaaagagtagagtttgatttagttgcagagcctctccagtctccaccaattttggtatccgacctgaaggccctgaaggtgctagttacagtcacagcacctttattttccttctggtatatctgcaagccttcgaaatgagtcaggacacaaataagctaatattagcattcgggagggatagaaagaagtaaaatccacaacaattttcagacgagtaatttcacatagaaactcataatttgaataaaaataatacgtcacatgtaaacaattcgattgtgaaatgtctaaaatttgcttctttcctccttggaaggcagaaccaggagttcaatccctaagacgatagaccaagagataaggaatatttacgtgaacacgcaataggtttgtgcgacagatcgcgcaaggcagcacgacggggcgggagggcgaccctccggtcgagggcaaatgggcaggcacaggggtagggggctgtgcagtgaagtctttactgtgtatcgggcgtggcggcttaaatgacacgacgacgacgacgaatggaacaaataaacatatagggcaaagcttgagctattaacctattattatattttttgaaaaactcacctaatcctgtcaacgatgtcggccctgaggccccaaagttgctatccattggaaccctgaaatgcacaagtccaaatttattagagttcaatccagtacaaaccataaggcagaatctcagtgctgctgatggtagtttttttctcatcggttgatgtaaacgttcagaatcatagtcattcaacattcacaaatcaaagaaacttaatattcttacttatgagcatgacatgacaaaccacatagtcattcaacaatcacaaatcaaagaaacttaatattcttacttatgagcatgacatgacaaaccacgtagtcataaaaaatgggatattactacttgattgcaaaaattattacttaaggtatttgtgatgaaagaagggattcacaaagcttgaaacatgaactgatgataaacgaacacttgagctcattgcctacacctaacatttggtttaatacacggtaaaaaaattaaaccacgttgacaaatcagaattggaacaatatagggatgtttctagaacaagacgattcagatggcttgatcaaaaaagaaaatcaaaccatctcaagctgtatatacatggaaatcaaggagtagaaaccaggagttggccaggtgcgcaggcatggtctacgtcatcacatagatgattcagaaaataaatattatcagcagatttcctagagccaggttaatcataacagctggctcaaaatcacaccacggattgagctacttactggacatttcatcgaacatgtggcggccatatcgtcgggcgtcatggtggggcacgaggggatacataccttcagatgacgcggggcgtcggcggtcgagggtggcgcggggcgtcggtgttcgaggaggcggcgcaggtcgagggcggcgcggggtcgagggcggcaaggagggggcgcggggcgtaaaggaggcggcagcggtcgagggcggctaggaggcggcggcggtcgagggcgcgccgggcggcgtggaggcggcggcggtcgagggcggcgtggaggcggcggcggtcgagggcggcgaggagggggcgcggggcggcgatggagggcgcgcggaggaaggggtgacggcggcgaggaggcggcgcgttcgagggacgcgtgggacgcgggtcgtggggcgtcgacgctttttacgcttttttggttccggatcgcatgtaactttttttttatttttttgtcgctccaaacgtgtcgatgtacgtttttaagttggattgtatatctgctttgattgtatattttctaagtagtagagattccccaaaaatctttaatctcttcactttgcttaggttggctccggttgacagtgacacggggaaaggcaatcggacgcggttgagggccgctttcgcaaacggtattgggccagaatgtaaaaaaagcccatagcccatttttgtcgatctgatttctaaacgaagcccatagcccattaacgaaaagagcccacggcctcttctcttctttcttcctcctctgcaagccgccgacgaggcaaatgagagaggagggaagaaaatcgtaaaggagagagagaagaagaagaagaagaagagcggaagaggaggggaggagccatggatgcttcagcgctcagcaacccgcggctgcaggccatgctagaggtaataataaacccataatgtattagggagatttagagatgagcggcacactcgagtacccgacctatggaaccctaacatggagattaattagcagcccccttcttttgatcccttcctgctcttcagcccatctttttgttggtacgctcgctattaattatgtgtcctttctagatctactcggagattcgtgaaaaaggctgagctttgggcgaaagtttgctgatttgggccaagtttttgcccttactgttccttccaacctttagcttattatgtatacattttatttattttgttcagttgttttagcaatattcttcagtctgcaggaaggttgtgccctaatttaacacatgtgctggaatttacagtttaggtggaaatcgatactcgaatcctagttgcatattaatttgcatattactcgatacccaagtacccagtaaccctgactgcaaactaaactaatttggataagtctagttttagccttttaggcaccatcagaatggtcctggtggagatgcgctcgtagcgcagtggcaggggtcactggcacgcaccccgtcggcccgggttcgacccttgtcgagcacgctcaccaggggaaatatttacctcttccttcttaaaatcattgacaccaagttcttccttggtgtctaacttttcttttttagaatggtcctggtggttcatgaagtctttcctaaaaatccccataacttgaaaagtttttaacgcttcaacggaggagatattctgttattcctaattgcttttgtggtgctctatatttaaggactatggctgttcactcattactaatagaagttacaattctctctcatgatatccaacaaattatttattgtcatgcagtagtttcttaaattgcagtagtcccaaatcccgagtgtgtagccgctaatgcatatagcacggtgaggtgttttattaaatttgatttgctaccagctttgttatgtaagaaaatgatagtgcagtgtattctggcatgttgcaaggagccaaggatgttttcccggtgacgtactgatatgtgggaaaagaagtactagaatagaaagatcatcagtctgcaaattaaacgacttgaggaaaaaaaaggaattgcctattttacatctagtatgctgctaggacctttgtcctgggtttctgatatgttcattaatggcagaagttgcttgcttccctttatgcacaagaaattattttgtgtactctgttctttggacaatggataattaagccatgtgttctttgtcaagatccactattcaattgcagaaccgtggtgattgttactcacagaaatgttactgacaattttgttttcttcccctcttcaggaggagaagaggaaggcaatggcaaacgagttcgtggcgaagctgactgatgtttgctgggacaaatgcatcactgggagcattggaagcagcttcagcaacagcgaagcctcgtgtctgtccaactgcgcgaaacgctttttcgaactgaagatgctcatcgtgcaacgagttagcagccctaggtgaaaattcgcataggtcttttctgcgtcgagaatgtagaatctataatagttgatgctagaaactagagaggcatcacttgctttttgctgcattttatcagttttggtgtttttcctgctatacgttctcagtgaaacgattgcaagttttgctcttgcaaggagattaaaagcgctactgtactttgactacttttgacctgaaaagaatcagagacaagctcatagcctggagcagaaaatgtgttactggggtgtactgtcttgggagagaatgaggtgtgtgttgaagtgaaatgagttcaaccagctgatgcaataatgatcagaaattcaacacctccagtgttctgccatgaaagactcaagactgaactataccactgttcttttttactcagataaactacacatcaccgccgttctagttcgtgtttaagtagccacaattaattagttatcgtatattccagaggcacgtatctcgagattatccaacggtggatggtgtacgccagcgcttagtggcacactgacacgactgcatatccacatatacatatatacatttggcgatttcatctaggggtctccgatagtggaactgcctgtgccccttcaagctcccctagctactctcacgcattccccagcaaaggcgacatcctcaaggtacacactcctcatccagtgcttcttgatcagctttctctccattgttttttttccctctagaatcctaactaattttctgcaagtcctctagctagttcctgaccatctttttgtagcaaattcgtgtgatttgttagtgttcttatttgtgtgcactgtgtaaatgtctgcattgagtttaactatgggtttgttgaacaaatggatattgtatttgggttgcctgaatgaccacctcgaagttgcaatgcattttgctgccatctttttaatttggtgcctgcattttcggttaatttttaagggggagtaggtaggactttgaaatgttaatgcttttgtgggaccaattaactccaatcagaatatccatgattcatatgccatagaaacgtcacattgacacatttgtgtatctttagtgagccagcagtactcagccaacaggccaaagtatgcagactgttctgtttctgattgttcagaagttgcacttttctgattttgcagatctatttctttttattcgatttcttcggtctacgttgtattgcactgaacaatgcttttttttatattcatcttgcgcacttattcttagcatatcaaattctgagacatcattcatcatgctgaaatcatacaagtattatgttcagactatttaatgacttctgcttttgctactgccagaatttctccaagagttcaccatggagaactcggaagatgaagcagagagtgacaaactacccttagacttggagccattgcgctcattagcaccaaagtttcctactattttgggatatgatgtggaaactcaatcaactgatccactgttagtttatgccacaccatccataccttgctcctcatcagaacagcctcaagaagccccagcttcattttctctgcccttaccaaagtcacccgtccctataaaggctacacccatctcagcggcatttccaacaccgcaacatgaagatgaatcatcagatcaagattacaagcccttttgcaagaataaaaaaccagcgatgccgaagagagccaagaggccccagcaagctgagaaatccaatgatgctaacatcaagcgcagatcaataaggaggaacctggacaacgagttcaacttgtgctcatcctcatcagacaacccaaaggaatcggtggaaggaatcctgatgatgtttgattcacttcggcgccgtgtactgcaattggatgaaaaagaggatgcaagcaggcgggctgacctgaaagctggcactctcatgatgcagaacaacctcagaatcaacaatcataagatgatagggcatgtgcctggtgttgaagtcggtgacattttcttctttaggattgagatgtgcattgttggtttacatgcaccagccatgggtggcattgattacatctcttctaagaacaaagatgagactctggctgtctgcatcatttcatctggaggctatgagaatgacgatgatgacactgacattttggtgtacacaggacagggaggcaacagtcgtcacaaggagaagcacgatcagaagcttgagagaggtaaccttgctctcatgaacagcaagagcaagaagaatcagatcagggttgtgcgcagcgcacaagaccccttctgtaactcaggcaaaatatatatttatgatgggctttatcgtatcgaagacacttggacagacacggcaaagaacggatttaatgttttcaagtacaagctgagaagggacccaggacagcctgatggaatttcactttggaagatgactgagaagtggaaagcaaatcctgccacaagagaaaaggctatattgttggatttatcatcaaaggttgaacacctacctgtgtgccttgttaatgatgttgatgatgaaaaagggccaagtcacttcaattatgttgctggagtgaagtatttgagacctcttaggaagacaaaaccattacaatgttgcaaatgtcctagtgtctgcttgcctggtgaccctaattgttcgtgtgcgcaacagaatggtggtgatcttccttacagtgcaacgggattgctggcaaagcacactccgatggtttatgagtgctcctctaactgtcagtgttctcataattgtcgaaacaggatcacacagaagggtataaaactgaactttgaggttttctggactggagaccgtggctggggtctgcggtcgtgggatcctatccgtgctggcacattcatttgtgagtacgccggtgaagtcattgatgaaactaagatggacatagatgttgaggaagacaaatatacctttcgcgcttcatgtcccggcaataaggctttaagctggaatttgggagaagaattacttgaagaaaaaagtacggctgtgataaccaagaactttaagaaactaccaatcatcataagagcaaacaatgaagggaatgtggctcgttttctgaaccatagctgttctccaaatctcctttggcaagctgtacagtatgaccatggcgatgacagctacccacatatcatgttttttgcaatggaacatatccctcccatgactgaactgacttatgattatggtacaagaggtgctccccctggctttgagggaaaacccttcaaagcttgcaaactcaaatcatgcctctgtggctctaagcattgtcgaggtttgttctgataaaagatatggaggctggtgtactaaagcaggtaaaacttgtttaacaatcgttccaatttataatttttaaaacaaaatctgcttcttcatgggaaatgcattcttccaacctatttatgcaactgaataatctcttttaaaagtagctgattcatcactccattcatgtaagtcaagaactctcaaaacaactctgtggttacagtcgcctgcagcacctatgtggcgattttcatgctttggtacataaacatctattttcaacttaagcttagcatgccatatatttattcaagaatgtatataatattgacgaactgaacaattagatctgaaactatggcaactctatttctcttgtgactgcctaatgcttccatcctacatttgcaggatattaaactactctatgaatggtagcataaagtgataaaggggctctcggtatttgtggtggtgggttagtggaaatgtgtagcaaggactgatgctttgcgtggcatgagatgagaccctcacattttgtgctgtacattgcccatgtcgtaggcgtgtagccactaatgcaattactatatcttttgctagttgctgtggtagcactaaagctctgttaacttagtggatgagatcatatggatgtgaagctgtagcactaaaccctgttaactctgtgaatgagatcatctgcattactgcatatcgttgtgctgctacgatgctatataggtcgtataggaaatatttgacttcatgtgcatatggttttgcagcttatgctgctgcttgatgatatgaagatcttttttttttgaaaaaaaaatcatgtggatgtggttatgctgttggtgtggaggaaatatttgaaaaagaaaaaagttatgctgttaaagttgctcgatgatatggagggtttttttgaaaaaaaaaaggtcatgtgcatttggttatgctgttgttattgagaaatatttgaattttttaaaataaaagaaagatcatgtgcatgtgcatgtgtttatgttattgttatggagaaatattttttgcatgtaattatgctgttgttattgagaaatattcgaatttttgaaaaaaaaaatcatgtgcatgtggttatcaagtgtttatgttattgttatggaggaatttttttgcatgtaattatgctgttgttattaagaaaaatattcaaatcgttgaaaaaaatggaaaaaaacatgtttgtgtctgagcccaggttcgaactggggacctttagtgtgtgagactaacgtgataaccaactacaccacccagacttgttgtcttaactgcctgtgctcgcctatttaaccagttcacgtttatttgacaaaatctcaaaatcattccttttcatatgaactatctagaggaagaatagaccacgtatgccccgaaataattctttttcatatgaactatctaaccacatatgcacgaattgcgcaagttataacaaactacaactgtttgaattctgacaactgatattgaactacgacggccaagtttcggaatttcatttcagttctttgaccacttgccatgtaacacttgatccgccatcaataaaatgattgtaaaaaaaaaaaaaactgatattgaaccatgcgaactacaaccgaatgaattgtggccctgtttagattccaacttttttcttcaaacctccaacttttccgtcatatcgttctaatttcttcaaacttccaattttagcgtggaactaaacacagcctgtgatctcaagcaaatgtgtgagaccagtacagcacatccccttaccacagaattatgagagaaatctacagcacattacgctgtataatgtacaatacaacacaacgagtatttaccagaaatctccacaagaacacaccccgtctctgaagtgatggaaccgggtacggtccctcatgacaatctctctaccatacacccgagatacaagctttgcgctctcatggcaatcggcacacacccggaggttcttgatgatcctaatgggagctcctggattggaagcgatcagagcaaaggcaatggcgagcctctcgctgtggtaggacagtgcatccgccttgtcctcctcctcgacatcaaacaacgcagatgaggtgctcgaccggtgtccgcactcgcttaatctggtctcaatatcctcaaccatggcgtatatctcctttgaggcaggatgcgtcttgtcacccaccaagaactcatggagaactccattgatgtctacaaagcttgatccagggctcttgtcaatgcccatggacttcatctccttcctcgccttcttagcgtcgtcccatcggttcgttgttgcgtagaagttggaaatcaggacatggtttccactgtcatccggttcaagtcgcatcaattctgcgatcatcttcttgccgagttccagcttgccatgaatgccacaggcccggatcagagacctgtatatcgcagcatttggcacgatgggcattccgtggatcagcttctcggcatcgttaagtcgaccagcccggctcagcatgtcaaccatgcatccgtaatgctcaatacttggctcaatcccgaattcgatctccattctgtcaaagtagtccagaccttcatccaccaatccagcatgggcacaagcacacatcacggacagcacagtgacgccatccaccggcacgccctcaccgtgcattctgtcgaacagggagagggcagcacggccatggccatggactgccaagccatggagcatcgcattgtagcagcgtgtgtccctgtccgaagcggctgcaaagacctgctcggccaggtccagcctcccgcacccggcgtacatctccacaagcgcggtggccacaatgcagttgacggcgagccggcgtttcacggcataggtgtgcgcccacaccccatggctgacagcgccaagctcgccacacgcgccgatgacggcgacgagcgtgatctcgttgggtttgatggctaaggatagcatccgcacaaacatctcgaggata

SEQ ID NO: 4988 - DNA, 71749 bp, Oryza sativa
  unsure (1)..(71749): unsure at all n locations
aaatacatacgattgttgtgattaaaattttacattgtaaacaaataaataatactgctccagtattttcgagtaattgatgaacggattaacggtggcacgttgtcaagcttttaaattgtgcggcttttaaaactttctatataaaaattcttctgatattgttttaattttttatggtaatattgttttaaatttattttaactttataattaattcattcatccatatccttatataaatattaaaaaatcatgaatttgctgtttagtgtatatccaagtactgcttagtactagtatttgttactccctccatcccctaatataaggaattttgacattttacctacactgtttgaccgctcgtcttattaaaaaatttgtacaaatataaaaaacaaaaagttgtgcttaaagtactttggataataaagtaagtcacaaataaaataaataataattttaaaatttttaaataagacgaatagtcaaacagtgcaagtaaaatgttaaaatctctcgagaatggagatgttaaaatctctatattctcgagaatggagggagtagcttcacgagaaaagaacgtgaccaacctaaatagacggcacgtgaccaacctaccaaaggatataagtatggttagctgcaggcgtgctagactggtgttactgctagtgtggctcgacgagaagagttgaatgaccgagacgggagcttatttggcagacagtgaccgaccacgacgctctgctgtgttcgaaccacacggttcggaacactttgtccctataaaaaaaacagagtaacccttatcacaagtgatgattaaaatgactttaaaaagtaaattaatataattttttaaacaatgtctttattaaaaaaaattaaaatacacaccgttttgccaggtttaaaaaacctttgtataaaatacaatctctgtcacaagataaaccaccctcatccaatacaagttggtttatttttctgttataaaataaaccattctcgtttggtacgtgttggcttattttgtgaagaaaggaataaatgtttaatttcggcggacattgaccgaccacgacgcatgcatcacgcatgcagtggccgattgcaggccggacaaacgtccattatattttattgacgaattaagctgacggcggcgggccagctactattccggccgcctacgtccgccgtgcgtggcctcctgtgcttcacgatgcagcctgctggtggtgccctgtaggtacgggtacctagcatctctatgtggcctcttccgacgccccgcattcgcaaataagggcctgtttgttacagctacaactcctaaatataaatataactctaggagttgagtctggagtggatttatggagttgcctaaacctatctccacaactctaatatattttgtgagagagctccacccaactccactctcaattttagtggagctgaaactgtttggctgagctccagctccagaagagatggagttggagctggagctgtaccaaacaggccctaagccgtcgtaccgcgtacgcgtacgtataacctcgcgtctttacagtctacaactacaggcagcaaagctatatacagtacacgttcttgccctcattgccacatagtacaatgtacacaaaaccccagatcgaatctcacccttccttcttactccacttactattgctaattaattctcaacatgtatatggatgatcctgaatattctcaactggatatatacattgatctgatcaactagactagagtcactattaattaataatcatcgattaattaagtcctgttaattcccgattctgccctccgccataccaagttaccaacccacggcttctcctgtacttccattcgactccctttatatatatcatcagtagctccatacttgagcatccttgatgcttccctttcctccagcagcgccattgctactgaatctgaagcaccaccactccatctccattgctgcaaactacaagccgccactaattaattagcaaaatggagaagccgggtgatgatgagaagctgacggttcctctgttggagcctaagccggctacctacaagcatcaggaagatgatgatgcagaggaggatgaggttggatcggtgaggcggcgagtggtggaggagaacaagaagctgtgggtggtggcgggtccttccatctgcgcccgcttctcctccttcggcgtcaccgtcatcagccaggcgttcatcggacacatcggcgccaccgagctcgccgcctacgccctcgtctccaccgtcctcatgcgcttcagcaatggcatcctggtaagtcatgccgctgattccctttttacttattattacagagttatcattacacagttttgggtttaaattattattactacgttgtaacaattcaaattgatctttctttttacctgtttcgtgttttcggcaactagctgttttttatttctaaaagctgactttgatgacgttaagttttgacttaattgtgccgattcagagactaacagcgccgcgcgcgctggaagttttttgttgtgctttaatttgcccatcgattaattgagacaaacaatggatgttcagttgctgtctttataggttcaaaacagagtgttcgatcttgtccagcattgttgtactatagctaagaagctataggctcgattttttttttaaaaaaaatggatatagtacatactgcaggaagaaaattaatcatgtgagaccttgcctccttggattttcaaagtactagtaaaactttgaagtagactcttgacctagccatccttcccttgcacggctttctctccagacattaattagtacttcctccgtctctaaatacttgacgccgttgacttttttaaatatgtttgaccgtttatgttattttaaaaaatgagtaattattaattattttcctctcatttgattcattgttaaatatactactactactcaaatttcttaataatattcacaaaagtttttaaacaagacgaatggtcaaacatgtttaaaaaagtcaacggcattaaatatttagggacggaaggagtatatagcatctacctcatgtattctttttgccgggtcttttttcatgtgtattcttgttggatcttctgatatatattttttttcttcagtaattaaagtagtttgtactacctctgtctactagctgtgcaacaatagcaaaagtctttacctagattttttgaacggaatatacaaataaaacataaccagaccatactacaagtcactcctatgaaaacttctttttactaaatattaatttgcactataagtcatctattgatatgcatataaaaacagtatatactacaaattaaccgtatatgcacattgttgtaaattgcagcttggcatggcgagcgcattagaaacgttgtgtggacaatcatatggcgccaagcaatatcacatgttgggcatctatctacaacgctcatggctagttctcttctgttgtgcagtcatccttctcccggtctatatcttcacaactccactcctaatcgctcttggtcaagaccctgagatctctgctgtcgctggcaccatctctctatggtacatccccgtaatgttctcttacatatgggcattcacgctccaaatgtacctacaagcgcagagcaagaacatgattgtcacttaccttgccttcctcaatcttgggattcacctcttcttgtcatgactcctaacagtcaagttccaacttggtcttgctggggtcatgggatccatggtcatctccttttggatccctgtgtttggccagctcgcttttgtcttctttggtggttgccctctaacatggacagggttctcatcctctgcttttactgatcttggtgctattatgaagctttcgctatcgtctggagtgatgctttggtaagtaacatggttatgtttatatgtatatatgaaatttttgacaaaaaaaattgatgatagcaaatagaaagttaatattttagatgctaattgttaatcaagttcttttatacaaataattagaagctcattaatttattctcatttttcttttaccttttcagtttagaattgtggtacaacaccatattggtgctcctcactagttatatgaagaatgcagaggttgctcttgatgctctttctatatggtaatatattccactccaatctgttgcatattagtttagaaaacaacaaccagatcatattgtatcatgtatatcattgtattgttttgtgtgtctcctctagtaattgaaaaggttgcttattgaacattgttgttttcacttgcaaaatttgtagccttaatatcaacggttgggagatgatgatttctatcggatttttgtctgcaatagggtaacttcacgatctcagctgtcactcactacgtggttcatctaactgatgcaacatgaaccataaatttgacatatacttaatgcatgtacatttttagagtgcgggtggcaaatgaacttggagccgggagtgcaagaagggctaagtttgccattttcaatgtggtcaccacttctttcttgataggatttgtgttgtttgtgctcttccttttcttccgtggaagccttgcatacatatttactgaaagtaaggcggtagcagatgaagtcgctgatcttgctccccttctagctttctccattttgttgaatagtgttcaaccagtgctctcaggtatgttactccatttgaaggacaagtatatatcaaagtaattcaaaatttaacaatgaaattactaattttctaattatatataggtgtcgctatcggatcgggttggcaaagtatagttgcctatgttaatgttacatcgtactacttgattggtatccctcttggtgcaatactaggctatgtgctaggatttcaagtaaaggtaaggaatttttgtatgatagaatttcactagttaatctggatttaagttgtgtccctcacttatgttcattctttatgtagggtatttggatcggcatgcttcttggaacactagtccagactcttgtgcttctattcatcacacttaggaccgattggaaaaaacaggttgccttttttttacctctgctcatattttctttcttatcctcttttctgattaaatatcttttttcaaataatataagggtctctctagaaaattcatgggtcattagaagagcatatttttctcatttaatgatgtgcttgatgtttaattttttttcaggtagagattactcgagagagattaaacagatggtatatggatgagaacgggcgatcacagaattcaataggaaatgcatgatctaaaacttctgcacacttgtaaagaattttgatgatttatgaatcaacctgtcaaaatgggattgtgctcggatttaagattttcaaggtttgaactttcaaaaaattcatcaaggtcacgtatccaccaaagaacaattttaatcatatggcttgggatgatggcttttccgccgggaaaagttattgtatatataccccttatcctattatttcaccaagcccttgcacaatgtgagctttacatgaatttttgtattaattagaaagagcatttgtatgcttccatgtaagtcgattgtattcactatgctttattatctatcgtgactaaatttattgattgaactatcaaatatgagaaacagtcaaatttcaccaaaacaaaacagagagaaactggccattcgtgttcttttcaaattctagctactagaccatagcgatcacacttttcaaaccattaaacactttgtttttttttaaaacaaaatattatataaaagttttatagaaaactcaaaaatgatcattttcaatctcaaaaaagaccatgcgctaattgagtatcggctcctataagcaaatcggttaatccagcaaaaagctatatcaaacgggccattctggcatagtgttttgtaataatgtttcaattttagagcatctccaagagataaccgatcatgttacctaaagctatattactttggaaattatgtctaaaacacagcctccaacatatacccaatcatggccctaatattccgacacgcccaattctatcaatgctctggcgtgactgattgacctggcagctaatggaaccctcacgatacccttccttgccccgacagctggcgcgcactcgcgtccaccttgctgacgcgatggcccagtgatgcgcgatcgcccaaaacctagcgctcgcaggtcgtttgcaacgtgacaaaaacgaaacagatcgctagaaacaaataattgaaggagagcccacctaagatgacatgacaaatttctaacattttgcaaagggcactgctattgctagagaggcatgattttcgggcctattttttaggaaaaagtttgaattacgcttgaactattgtggcagtacgaattatccatctctatttaaaaattagatattcttcaccctcaactttttatacggacgaattatcccctgacagactccggaatgctagcggttttggtcctacntggcgcacatgtaccattctaatcaccattaaaatatatatatataaggtagagcccgcatgtggtgaccgagaaaagaagcagaactgacaagtgccctaccattttttattttttatgctgactggactgccacgtgtgtgccacgtaggaccaaaacttctgaagatgaagatgaagattaagttttttacgtaaaacgaggcggtattaacgtatgattgattgagttttaattattaaaaacttgaaaaatagattaatatgatattttagagtaactttcgtatagaaagttttcgcacgaaatgcaccgtttagcagtttgaaaaacgtgtcacaaaaatcttaatcttcatccaactttttgttggagaaaagaacacgtgcttgccctccttgccacacgatccaactgttaattcctgttaatttgatccctcgttgtccgagaatcctgatcaggagttacttacatagtacagctaatttccccctctgccatccctacctacccgccatctgcagaaccatataatttaagggcaatctctcacagcaggttgtgttagagagaagagtattagagaaggctgaaaatatgcgcaaaacaaaacaagtcgctaacacataattaattgagtattaattattttaaatttaaaaaataaattaatataatttttaaaataactttttttatgaatacatactagcagtttagaagacgtgtggatataaaacgtgagcatcatgctttcctttcgctgcagccttcccttcttcaattcagacagctactagatagcagaagatatgatttgatgcaattgaactatattccacgatgttgaattaaatcgtgagttagctggtacgtagtggtggtgtgctgccgatgggttgacgagaacaaggtaacagggcatgaattgatgaataggatggccattttttttattattaaccttttttgtgtttaaattttaaataaacatcctaaaacttatttttaaaatttaaaacttttaaccacgccatcccgcctggcataacgaaactaaactatcatgttcatcctcatttgacttgacaatagtatttcaccacatcagatcagccaatacaattaaaaggtctactccctccgtcccagaaagagacgaatcctggggggagagctttgtcccgaaaaaaaccgatttctggacagaaaacgagaaacttcccatctatctcatcctgtgtgggccataggtggaccgcgtatcctctcgttcacaccacgcaaaccttatcgcatcccagttttttttctgtcgcgtctctctctctctctctcgttcctcctggatcgattccatcgccccgtcgcctctctctctcgcgtttctctccatcgctccctcaccccctcccggatcgattccgtcgaagcggcggcgtccagatgagcgacccttcgaagcttccgactccctccctactgccgtcgtgctcctccccacacatctctccccgctccacgccgctccccctcacttccgcaactccctgcggagttccccatccaccaggatgcgggcgcttcgatacagcgggggagggttgcgagcggttagatccgatgccggaggcggctcctttcgaaggatttgcctcgatggcagagttcgaggcagcggcggaacagtttagggttttcattcaagagacgaaagccaaggcggaggaggcgtatcagcttgcggttttgatccaaaaggcggcggcgggagggggctcagatgtggcagcggccttggaggtttgcaagaaggcggcggaggcaacggcggcgggtggagccagttcagatgcggcagcgacatcggagatttgcaaggcggcagatgtgatggtcaaggaggtggcggcgcgcgcggatctgatacaggaggggtcggcggaggaggaggcttaccgacctcctgttctgattccggtggcaacagctagggactttggcggcagtatgcgtggattgactcaaaggtatcttcaccttgttttccctacaaccaatctgttccccttatgcaatgagagatgctttcaatgacgtgtgtagatcagatgcactgggtgcggttgcatcccaaaatttttttgattgtactgcatagaatatcctaggttaatgttattcggtgttttgtatctttataatcatccagctgttatatgtcggtcagtgttaccaatgttgaagtaatgcgggttagctgggttttacattttgttttgtgcaaaatttggcatggagtgagaagggggttatgatgacatgtttcaaataaaataaattagtgttaacaaaaatccaagcagttttaaacctaaccaaagcattcctttctgttttgttgcccataggtatattctgaaattagaaatttttattgagtataggaaacaattataaactgtaagaaatttgatactgaacatgcgaattttatttctcaaagttttttttgactgctttattgctcaatcaagaggctgatgaaaaatccaaaattgtggtgacactgtaatgcatgaatattaatacctctgtttttaaatataaaacattattgacgtgtaggacatgatgcttgattgatcatcttgtttaaaaaaactaagtatatatggttaattattttgttctgacttgtttcaatatcagtaaagaaacttactcctgaatgcagctcgtcgtactcgctttgttggctgcagctacctagccagcgtatgttgcttgcttgacttgttcattttaacactgaaacctatcgttgagaagcttcaacttgctccaatagtacaactgcacccacagatagttaggctgtcattcatagctaattaaattaactaggtaaccttgatgttgttctacgagaattaccgtggatgctatactttgatttctgcaaatctttttcgattgttatacttctattattcactggatttgatcctttaactaggccacgcatatataaactgatgtactctacttttggctttcattgcgttcagtagtccatttggtctatacttcaatttagacattgcttatttacatgggtcagcactatctttttaaaaaaatgtatcgaatatataatgtaatcgaagtacatttcagtttgattccatgatagattcatctttacatcccatcttgtattaactgtcactgtgttttatccgttacaggactatgttgggagatgatagcgaccacatggccatgttcgagaagaaggcaagcgtcacgcaaactgacatgaaggagaagaggggaaaagctaaagatgttagcatcgacgaggacaagtcaagcgatgatgatgttgatatggtcattgggggatatgcgcaagatccatacgatgatagcggcctagaagaactcctacaagaccaagacgcactggaaaaatcggtaaaaaaatttctagagtgttttcatagtaaaaaatttagatgaatgcttcaattatgtgttgattgtgtgcctgtttggacttatgaatggtggcctaacaaagtacctcgaagtaggtacccttttggtattgtatgaaattatgtgtaattatggtagtactttagattaggtggttattgatagcagcctaagaaggtatgttaaagtaggcacccttttggtattgtatgaaattatgtgtaattgtggtagtactttagattaggtggttattgatagcagcctaagaaggtatgttaaagtaggcacccttttggtattgtatgaaattatgtgtaattgtggtagtactttagattaggtggttattgatagcagcctaagaaggtatgttaaagtaggcacccttttggtattgtatgaaattatgtgtaattgtggtagtactttagattaggtggttatgaatagcaacctaacaaggtatgttaaagtaggcacccttttggtattgtatgaaagcatgtgtaattgtggtactggatgagattaggggattatgatgatgcatgtaatgttgattttacattgtgacatatatataaaactccctcgttcccttttgatcagcgcataagtaaaactaaaatgttccaatttgatcaacgcattagcctaggacggtggccatgactcttagatttgcatgctgatttaatttttgcatgcatgcaaggagacgctagccattcatttcgcatactaggcactagttttaataaaaaaacggggtctctctctctcttccgttttgcatgcaagtaactgaagtgctaattgtgccttttatgaggtgggctttaaatgataatgggagaaatttacttcaccttggtctcgctgcacgattgcaatacgtcgatcaaaagggaacggagggaggatgaaatttaggcaaaagctcaaaccatgataaaactttccacatgacatgatactcaaatgctgatactgcattgtcatatatacaatctgaaatgtagccaacaaaagctgaaaccatcataaaacttcatattacatattacaaaagctgaaaccatcatagaacttgccacattgcatgattagttgcatttacttgagtaatactgatattactttatcatatatacaacatcacatttaaccaaaagctgaaactacgatagaccttcccattttgcataatttactgcacttgattggctaatgctgatatgaccttttcatacagttcacgaccacaactaagggtattagggagaatgtccagacgctctagcctctctttacccatatgaggtattctgtatccatttccaccatcagcttccataacctctaacaagcaagattgtagtgttaggaacaccctatttagcttgttgtcatcataggcctgaaattcctgctcaacattatgtattagctcatccatattcctagatatccttctatatgttaatgattgtagcgatgcaaagaacccaagatctaatgcattcatatctggggaattaggaggctgatgcataaggcggatgtcaaaccctgtttgggatactgcataggcaaattgataatcatccactggcacatgagcaggagcattgtcttgctgaatccatatagtgctgtgtgcatcgtctcgaggccaacttgatataatagctggtagtactttagcaatcagaaacgaccttacggtgtctcgatcaaccttgattgtcttggtgactagagttccccttggcctgttttgacttgtcctttgtgctggttcctatgtatataacattaagtaagttagataagcaattaagtttcacatcacatcactaagtaaaaatgcatatattaagaggttataatacctttttggtgaaaggccacaagcctatcttgccgtcaaaagtgcagataccttcttcattgtatctaggcctagcaactgctgccaagaacatcactttatcaatagaattcttgttttgcacgggtctgtacggatcatcctcccaatggaccaggtaaaaagttcttgtctttttagtggtattgaaccatttttcatcgatgtgcacaatgttgcgcatatcaacaaacttcggttcatttggcaaagtatgccaatctaacatggaaatacaccattgcagccttgatcgtttgttctcttccttcaacaatggctttaatgtgtttgagtgacgtcttatcagcccttctttcaacatcctatgaagcgtgctttttggtatacccgcagctgatgcaaatgaccgtaatgtgccccttagttgcaggggggcattagcaacatctgacaagtcaatttcattcttcttgcgaccagaattagttttctttctagaacttacattgactggaattccctgtgcacggcactgctttgctcttcgccaaatatcttgcactctaccccttttgatattgaacatttcagcaacttcagttgttgctttttttcttagtcttccattgatagttttcttaaccaatgcatcatatatctcttgcctttgtatgttggtaagatttttgtttggatgttcatcttcctcatctgaatcatccaactcctcttgttcaaaaacaatttccacatcaccagcatacacaccgtactcctgcatgtctacaacaacaattacaaggtgagtcgtctgtaccaatttagatggtggatattttattatcatggatcaacatggttgtaaacttatggctgattttagatttcagaaggacatagaaacattgacacaatttactttatgtgctgaaatgtcaaattgacagtccataatttgcaactaatgcatccaatgttatgtttagattattctaggtagttcgcatgatgtcatattagtatcttctaattaaaaacatggtttcagttaattaatcttattcttcagtggtgctttatgtacaaccacattttattaattttactaagtttgttatccatgtcagctaaaagtgctttacctgcttgcatttgtagatgttcctcataggcatcagagttaacatcaaaaggaaagccatgttggttgtgacctccataaatttgcagaatttcatccatggcatcggcaccgtctacaataacaattaccatgtgagtaccaagtctaatatcaatattttgttaggtacaatactattgcagctattttattacattctacaataaaataattatgggccattatactcagatagctcacacattgcattattacaaccaatcattagtgctgatacttgctatttgacatgccatgcatattggcctaactggatatgtgtgactaaaagtaataatgcttatactactcttccaatgtagccaaatacttctatgaataactgatctgttatgctatatatataatggaaccaatgattaatataggttactttgtgcagtacaacatcagcaaaggagattatcatatctgaaaaccacaatcaaggtaccaattttatatccatctcaaatttagttttgttgtctacctattttgttattgtactcttcaccttgtttttcaatagaggtccatgtcagctgtaaataaactcatggaagtgctcatgtttctttttccctaacttgtgctattcatgattgtgattttatcaaaaggtgcttgtgctgtagtcaggagaaccattgggtattttgctgctctagttatattatggccatacttgaatgacttttctacattgtacaaactttggtgctgaagttcagggatttttgtgatctgtattgaaggtgcaatctaactttgatatatactaatactagctcaatatcagtggtactgtaaaggaaattatacatgtagaatctagcatatgaggattgatcgtagacagaagataagcatcatgtgagcactatttgattagttatagctagatacatgtataacttgtgatattatggaagggaatgaacttcaatatgcccaactcattcacagaatcgagctggtaaagaacaaagagaaaaaaaaccaagaacatagcagttccatcaatgcacatggtatcttttttaaaaaaaaatgccaaagatttagagtgatttatgcaagtcatatgtacaaagatcgatcgtttactattcttgcttgcaaggtcacctggatggttatggttggcacctccctgtacatcacctccaagttgatcctcctcttgaccaacatgcatttcaacttctgtagccactggttcattaaggtcaggcacatcatgctcatctccctcatctgccactggttcattaaggtcaggcacagcttgctcatctccctcatctgctagttcatttagatctaaagccatgaaggtggtgtttttgcagactcatgaagtgataagttgggagggaaacttgtgagaatggttcattttgagcttttatagggtatcttgtgctggggtgtgctcaaatttgtatttcttgccgccaagcaatggtgttgtttgattcaaattagttggcgcgctggattagtggcctgtacagatatttggtgcccatgattggtgtactacttgtactactctactcaagttggctgcagatattcaacttgtattattattttatttgtaactaatgattggatgtacttgtattgagggcattgttgtcttttgtcacttgtcctaaagttgcattgggattctagggtttgtgattttgtgggacggagggagtagttttgaaattaaattttgtaagagttcatttttaaaattcaaaaaaaataaaaaggttcgaaaaaaagttcatcgatggccgacacgagacggcgactcgatgtcgatggtgtctccatgcaatgatgtaatgtttcccttcccgtgatctcctttttccgggatgcattcgttggcatcgttggatgatgaatcattttttgtagcaaccactttaattaatttggcagtgagccagtgaccgtgacgcagatacatgaggatgcactgatgcagcacagcagcgaggccggacaaacataccatttatcgatgacgttgataccggtaggccacatcgctgctagtagtactacttatattactccattcatccaagaaaaaaaaagttaaattctaattggacttaaaactgatgaagataaaagttacgttgatgtatataaaacgaaaaagttattactcactccgtattttaatgtatgacgtcgttaactttttgacaaatatttgatctttcgtcttattaaaaaattatataattatgatttattttattgtgatttaatttatcatcaaatgttctttaagcatgatataagtatttttatatttgcataaaattttaaataagacgaatggtcaaacgttgattaaaaagtcaacgacgtcatacattaaaatacggagagagtagtatatagttaattaagttttaattttaattattatagacttgatcgctcctcctcctccgtacgcccggccgtgcttcatgatggtggtggaggtacgtggtggagattacctacagtatccgtcggaaacagaatacgtatgacttttaaaagagaaagtacacgtgattgccctcctcgccacatgctgacatgcattatgtttacacacaacccctgcctgaatcgatgatagtattcccacacaagataaagataaaagatgatgatgatcaagtgtaaaataagttgatattaatatataattaattgagttttaattattaaaaaaataattaatttgatattttagagtaacttttatatataaaattttcgcaaaaaagcgtgtcacgagtatccaaaattttatctaattttttattggagaaaaagaacgggacttgaataattgtttattaatttcttcccacactgccctccctacctacccaccatctgcagcaaccacagggccaatcatgtacttcctcgctcgatcgtctctggccccgccattaaacggtagatggggagacctgagcatcatcgatggatgctttcttttccctccctgcagccttcttcaattcagacagctactaatatctgcaactcaaagtattcgtactcctgttaactccatcgatctccattgttgtgcactggagagctagctagctagcagagtagcaatggagaggacgacggaggatgatgagaggctgacggatcctctcctggagcctaagccggcgatcaacggcggcggcggaggcagcaacgaggaggaagaagaggttgggtcgctggggcggcgcctggtggaggagaacaagaagctgtgggtggtggcgggtccgtccatctgcgcgcgcgccacctccttcggcgccaccgtcgtcagccaggccttcatcgggcacatcggcgccaccgagctcgccgcgtatgccctcgtctccaccgtcctcatgcgcttgagcgtcggcatcctggtatgcctgatgaacgctgattattcttgcttatacggtagtacgtagtactacttaatttaattacaggtacaagttagttttcgttagtacgtgtaacagttcaactcgattttttttcacatgattagtctttctgcaactagcaacatttaaagacaaaatttgatacatgatattcacaaattatggtagtaattaacccttatttactaatacgcaccatcaaaacatggctttgtacgaatacaccttaaaacatcgatctactccctccatcccaaaaataacctaatcctacccaggattagttttttttcttttttgaccgaggaagtactcagctaagaaaagagaagacatacaaaatgtcgattattccctctagtcttcactcttgctagggttcaacagcgagagagcagagagactaggagatagggatacggtctggttttcacacctgagagggctgggctattctggtcgttttcaaatatgctaaaaatgataaaataatagatatgatattttctagcaaattaacacgttcttttaggtgtcctctggtcaagccacgttttgggagtatccctaataaaatcgctctttggatatcttgtagtaaattttgccaattttaaaaacataactttaataatgttggagtcatgacttaattatgtctatcgatactaatagcgtcactaagttttttttcttgaatttaatttgcacatcgattaattcgtacaaatcatgtatgtttggtttgcctttatactttcaaagtgtttttttccaccattgtactatagataagagttaggctcgatgtaaaaaaaaagacatgaaacgtaccgaaggaagaaaattatatgggatacttgcctcctcacatttttttttcttcttgagaaggggatcatcaaattattcaactttcaaaacactaattaatatttgaagcaggctcttcatctagtcatccaccccttaatcatggcattttcttcatgcaataactatatagtgtgctctttctttattcttcttggatcttccatatcctatcttcttcgtgctacctctgacaaccagcactgcaacaataacaaactctttatggtacaaaatatacaaataaaacataaacataccttactttaagttataaaaatgtttatcttttactaacaatcattttttgttacaaatcatcttgtacaaaatgcatacataaacaattcactattaacaattaattgatagttaaccatacatatacattattgtaactgcagataggcatggcaagcgcattggaaactttgtgtgggcaatcatatggtgctaagcaataccacatgttaggcatatatctacaacgctcatggatagttctcttctgttgtgcagtaatccttctcccaatctacctcttcaccaccccgctcctaattgcgcttggtcaggatcccgatatctctgttgtggctggcaccatctcactatggtacattcccatcatgttctcctacgtctggggcttaacaatccaaatgtatctacaatcacaaagcaagaacatgatcgttacctacctctccttgctcaactttggactccatctcttcctatcatggctcatggtggtcaagtttcaccttggccttgctggggtgatgggctccacggtcattgcctgttggatccctatatttggtcagctcgcatatgtcttttttggtggttgtcctcaaacatggacagggttctcgtcctctgcttttactgatctcggtgctattatcaagctttcgatatcatccggagtgatgctttggtaagtaactgttatgtttatgtatacatatgaaattctggataattttgatgatagcaaacaaaaggcaatatgttatatcaagctagtgttaaccaagttctttcctatagctaatttggtagctcattgatttgttcttgttgttcctttgcctttcagtgtagaattatggtacaacaccatattggtgctcctcactggttatatgaagaatgcagaggttgctcttgatgctctttctatatggtaatatgttaatatactattgttgcatagtagtttagaaaataatagccaaagcatgcatgttgtatcatgtacatcaatttattgttttgtgtctatcctttagtgcttgaagaacttgcttattgagcactattgttttcacttacaaaatttgtagccttaatatcaatggttgggagatgatgatttctattggatttttggctgcaactgggtaacttcatgatcttacttgttactcattaagtggttcatctgactattccattatgtcctataaatttgacttatacttaatacatatacatttttagagtgcgggtggcaaatgaacttggagctgggagtgcaagaagggctatgtttgccattttcaatgtggtcaccacttctttcttgataggatttgtgttttttgtgctcttccttttctttcgtggaagccttgcatacatatttactgaaagtcaagaggtagtagatgcagttgctgatcttgccccccttctagctttctccattttattaaatagtgttcaacctgtgctctcaggtatgttattttatttgacagatgaatatatcaaaataatttaaactttcactttgaaattacaacgttttctaactatttataggtgtcgctattggatctggttggcaaactatagttgcctatgttaatgttgcatcgtactacttgatcggtatccctattggggcaatactaggctatgctctaggatttgaagtaaaggtaaggtcctggttgccattgtaaatttcattaggaaatcttaggtctaagctgtgtttctcacttttattaattggctctatagggcatttggattggcatgcttgttggaacactagtgcagactcttgtgcttttattcatcacacttaggactgattgggaaaaacaggttggctttattatctttttgctcatattttttcttatcttgtatttaattaaatatctttttcacataatataagggtctatctagaaaaacatgtgggccattgaaagagcacacttttttagattttaatggtgtgctctattggttttttaggtagagattgctcgagagagactaaatagatggtatacggatgataatggaagatcacaaaattcgagaggaaatccatgatatgaaacttttgcacattcataatggaattgtaagagttcaagatccttcacgatcacatcatccatcatcaatgaaccaaatgttaatcacaaggcatggatgatgtttttttcccccgaagtgtcagaccaaggaagaaccacgatggttagtgaagtaaccttgaatataagccccttatcctttttttttagcatgatgcagcatatgcttgacctttatgtgttttatataatttttttttgtatttgttggaaagagcatgtatggctaagtgcttgtatgtgaattgattgtacccattgggttttgttttctacctttgagtaaatttatggattacactatcaaatgagagaaaatatccacacaaagttgtgggtcatttgtccctttctggaatgaagtgctttgtaaaatgattccagttttaaattgcagaagatatgatttgatgcaattgaagtatattccacaattcttctcctctcctgcaaccaagattttttttagccatttgacgcgctttattgatatcaaaacacacagttataacgttcacaacaacgtttagaagctagggggttcaacccagttacaagaattcttcaaaatgaaagcatgatctagataatttatgtgctacacaatttgcctctttattacaatgttatatggagatattctctaaatcaaatctaaagcatagggacattggccaatgcttaacccttctctgccgtcatctgaaaaaaaaaaagctgcgtgggctgggccgaatagacggccgaagaaaccaaaaatggtgaagctgtgaagcaccagtgccccaacaaatggcggcgccggtgaggtcggtgctccccgtcgtgctcctcggctgcggcggcgtcggccgccacctcctccgccacatcctctcctgccgccctctccacgccaaccaggtacgtacctcgtctgaccgcccctccctctccccctcctctccgattggatgctctcatcgccgatacttgtatagggcgtcgccatccgggtgctcggcgtcgccgacagctcctctctgctcgtcgccgacgacctccactccaacggcttcgacgacgcgctcctcgctgatctctgcgccgccaagtccgccggctcgcccttatcttctctgctctctcgaggtatccccattctatttcgttattccttttttttcttttttagaattctccatagcttactttgtcatgaatttgcatttgtacacgtgacatgtaaagtaatggatggttggattgtgcaattttcagggcaatgtcagctattcaacaaccctgaggctaggaggaaagtcattgacactgccagcgttcttgggaaaacaactggtctgtgatccttctccctaagcagaatacattgccggttaagttttttaaaattttctatgggatagaaaccagtggggaaaaagatggaatctttgatatgctgtatgattgttgattagttctttgtttttttaaaaaaaaggagtattaatatcttcttcggttcttatcttacaatcctttttgcaggtcttgtactagttgattgttctgcaacttatgatactgttggcatgctaaaggatgccgtggatcgtggatgttgtgttgtattggcaaacaagaaaccgcttacttgtgcttatgtaatgtcctccttaagtcttccgtctggtatgtttttgtcattttgacatgcttaccaaatgtgttttttttttcatgcaggaggatttcgaaaagttggtttccaacttccgtcgcatgagatttgaatctactgtatgcatacgccactagtaattccttcgtttcactattgaatgttattatatttgtttttcatggaaattctttcctttatttgatctgggattgtatgatatgactctggccatatgattaagcacagcctttttttggaagtttcttttattattgcaaaggagttgagggtctctgctgatatttactattcctactcttaggttggagccggtttgcctgtaatagcttctgtgacccgtattattgcctctggagatccagtttctcgtattgttggcagtctgagtggtacacagttattatcttatttgtttgtaaaaggtgtttgttttccaaatagcagagcaatgtaccacttccattctatgattctgcaggtacacttggttatgtgatgagtgagctggaggatggaaagagatttagtgaagttgtgaaaactgccaagtctcttggctatacagaaccaggtctaaaaatttattcattcatttgacattataacatcaatgtgtactcagtattcattccttatctgtaattacagatttcatgtttacagaaagtctactgatgcttgtgataagtgcacttactcagttgtttaattttggtagatccacgtgatgatctcagtgggatggacgtagctagaaaggttaatttttcatctgatgaattacatgctactctacataattcactttatctgtgcctttgttaaccattgccacaattttattctactcctaagtccatgaactaatatatcatgagctgctgctgtgtatctattttttgtgcttaattgtatcatactatgatttgatccaaaatatattcagtaccacatcaatatcataaatactacagttcaggaaggcctatatcatgcactgaccctatttggaatttcaataataaccttgcaaatagacattggcataagggaggtttatgttcaggttcagatgttttatttgattatttcattctttgtcaattaggtgatgaggtctaacaagttcatctttgaatgcaggcattgatcttagctaggcttctggggcaacggatcagcatggagaatattaatgtatgcatataattaatcttgatggtatttgttctaatgttttgtgtaaacatagcttggtgtgcacgggcttatgttttcactaacataaatgaggctggtagcaagtgttttcctgttattctggctgttcaaaaaaaacctagttggtttaaaatgatacatttcttgttgataccattcttggtgatagtttgcaagcattacttggaaccatccttttctctttagttctacttctataatatcttggcacatggattctatggataaggacagacactcttctacaatatcaggtcactggatatcaccatagatttgtgttcaggattattggggatcccgatgaattatacaccttatgtatcttatagtctgaaaatgaaatgaatgtcctccaaatcttggaagttgttatttagtttatgtagccattagctttgttgagtggccgctagttcagttgttttctatgatacaagaactttgattttgagatattttaacccctaaatcacttattcagaaattttctaatcatgcatagcctatttatgcacatgttctgttgtacatccctgttcatagaaaaaagatcaggtctgctaagtttttgtaattatcttcaggttgagagtttataccccagtgaatttggacctgatgcaatgtccacaaaggacttccttgaaagtggtttagtacagcttgataaaagcattgaagaaagagtaaaggcagcatctttgaaaggaaatgttcttcgctatgtctgtaagattgaaagcacagggtacgtatccttttattgtgctatgcccatctgaatcactaagtagtgttttgatactcaaagcatactattgtcagagacacgtaggcctattctgtgcattttgtaaaggtacttttaatggtagtgtagactgtagagtaacatccccattttgtaggtgccaagtgggccttgaagaactcccgaaaaactctgcactgggaaggttgagaggaagtgacaatgtggtatgctaatccttttttttcctttctctatttctattttattcaatgtcaagcggcactgtgcagttggtagccttaagggctggttattttcaggtgaaaacaaaagagcctacgagtgtgagcagggtctgtattggcataccattccccatttcttctttgcgttgttcaaacgagcttggaagttggaacactaaaactaccaaagacattgtttgtgttggcctataacacgttagaagtagattgatgaaatccatttttctgttttgagaggattaaagaatgtttgatatgtgattttttactgttggtagtgagtgatgtgaaacgtaaaagtgacgctgctttgttcttgggcaggtggagatatacagcagatgctacgagagcgcccctctggtgattcagggcgctggagctggcaatgataccactgcagctggagttcttgctgacatacttgatctccaggatctcttccacaaaacggcttgaaacctatgtcttctaggtcgaaccgcagagttgattatgagtcttgtgacttgtggggttgttttggtcacagtattacttaaataaatcttgagcagatatcaatttttgtactgtacgcagaaggtttttgaacaaatttggaagttggaaccaatgagcagtgtcatccttttgcttatggttatgcttatctgtatggcttattagcaactaaaatttaatttataagtaaaacttttatatacatattcttagcgattcaaaagcaaatgctataaaataaactataataaaaaaatcatataatcaattttaaaattaaattttaattttaaattttgaattataagtattaacatgagtgaaacgatggggctgctcatttatcttaccttgattgtaaatttgtgatctgcaatgcccatgcttgaactgccttttaaaatttatcattactggattttggcaatgcggcgacaagagttgtcttgctgacaggtggggcatatgtcaaggatggtagtgggcccacctgtcatcatccgcacgagtgaaggagatttcaaactagccacccttgcatttcaaacccggaaaaaccccccctctcggtgttgctcaccccgaccggcgggccgccgctccaatccaccacccctcccatggcggcggccaccgagcagcactgcggcggcggcggcggcgacaaggagaaagacctcctgtcggcggtggtgggcgacatccgctcctattccggctccgaccccctccgcccatggctccggtacactctctctctctctctctaccactccgaatcgcttccccttctcctcttctcgatgcatgttgcttgatggatcgattcgttgtttgctaggggcatgaggaagatggaggcggcgctgccgcccgcgacgctgcgggcgaagctgcccaggttcctgcagaagtgcgcccaggagttccaggacgacgcccgctaccgcgacgattcccgctacctccgcgtctggatccagctggtcagccaccttcttctacatccagccatccgccatatgcttcctttcctttttactgatgttgtcatatatagtggatttcatttcgttggggatctgttgagatagcctgagaggttcattggctgcagttccataccaaaatcaatttgtttggggctcgagctttgccctgtgccaattgaatctacagtagttcgatagtgatttcaatccgatgtcctcatttcatactattgtttgcttgctcatactataacttgcatgttactcacagcatgaatcttttgataagaatattttcttatcttattatctaggctttgttacgcacaacagagatcttttgatatgaatattttcttggactgaaaggtcctaatgtgatctttgcattttttttcaatggtgtagatggactatgtgaaagatgcaaagccattgctaaagaagatggaaaagaacagaataggccttaagagatcagcattttatatggcttatgcagtgtattatgagaagcacaagaggtttgaggatgctgagaacatgtaccgcttgggaacccagaagtaagatttttaccaccattttagttgctggtaccatattttgcggttatcattgcttaaaatttagttcaacagctacatctcatatgtcctaaaggaaacatctgatatgtaaggacacataaaaaaaatttcatgtactcaattcaattgtcaatggacgtatcttagatccgcctactgcaaaccaatggagtaacaaatccttggattgcagtttgcaagtgaaacctcacaataaaattaatatcaatacgaagtaccttgcaaattaaaggtaggtacttaccatttatcaatgtattcaatagccttgcagagcctgttggggagctgcagaaagcacatgaacaatttattcggcgcgtggaactatacaagaggaggaaatctagagtgcagcaggaacgaatgcctaacaaggttcagtccattgctatatcaaagaacgaagttgaaggtacttctaagtggaaaaaaacatgtatcaggctatgcaaatcaatattttcttatgtgaccagtgttacctttatcaagcttcttactgttcgaagcttactgatcaagactatgaaagaaaaataccttcttggcagcacttaaactatcattattcaagatccatacttttgaactgtctttttgcatatttgttggttgtttcatggaatggttcttgatgttggaatatgttgcaggtcaaagcagaagttgtacaaaaccgaagtccaatccagtgcaaagatcaggaagtggttctaatcctcatttgggttttccgcatcccttagggcgtccactatctagaggcacttcaggagaaacaatgagtttgtctcgtcataatagtgatgatactgtagttgtaaggtttgtaggctctgcattggttgggaaatcagaaactgaagatgcatgccatcatggccttgttgaacccactataaacactaaagaggcaatggatgctatcagtagcatgtttttggagccattggaaccagaaactaagctcaagaggcgctcaaatcgtgataaaccaagttttaatcaggaagcaagtgcatttgagatctttgtcgatgaagatgaacctaacaagagtggacccagcaaactccaggacaaaaacatgaagcaggataatccaaagttaagtcagcaggcaagcgcatttgagatctttgtagatgaagatgatccttactgcaacaaccaaaatatggtgcagcataggcactttaataaggagaacacacaggtaaatcagaatgcaagtggatttgaaatctttgttgatgaaaatgaggctcatggcaatggtcgtaatgccatgagccataagagtagtggatgtcctccaaagccatcgcgtgattcaaagcagcaagccaattttgacttccagaaaccattcgtgggagggtttgcaatactgcctgatgatgaagatgaacagcttgagaaaaatgataatggtgttaagatcaattctggaactgtgcaactaactgatgataaggacacttcactctgttcgagacaaactgattcaaaaataagatgtgatgacttacgtcctgcaatatctggacttcgagaagacactgtctttcatagatttgttggatcagctgttgttggagagcctaaagtggaaaatgcttgccaccatgggttggtcgaaccaactgtcaatttaaaggaggctatggatgatataaataacatgtttgggataccactgaacttcaaaggtgataaacctaaaaacaagaaaaccactgcattgtcagagagaaaagcggcactgctcagtggtttctccatattagctgatgatgaaccaggcgaaaatccagcagcccaagttaaaccaagcaatgcttccaaatttgaatgtcagagtggtctctttgagcccactattactacccgcgatgtgatggctgagatcaatgacatgttcggaatgccactggacttctaagactagtgcttaaatggaacagaataactcttttgacagaagagttttcctttaccctctcactcactccttgagagtgaggtaaggttcccaagatgtcagaatatgaaatgaagtgctatgtagtatattggtgcattcttgatgataagaagagcttggttttttttgttgaatcctttgatgcacagctgttgtgtctagtgaatatttacatgagttattgaaattacaattctcaaagctttatctgattcatatttccctgataaaatttgaagtgtagcaaatgggcattagtttgctgatttatactcttggtaaatgagcactatctccttgaattgcaaatgtatcttacttttgatgccctgagttgttttgctgtatcacttaaatgagaattcctttttcccgctgttgatgttgttgcggatgtaattgatctctagaatttcctccagagtgtatttttgctagcatcatccaatctgaatgcggtattgggttaactgctgcttaaatatgattatattttcctatattgtttgttccactgctgtgtgattcatggtgttagtgagctgcaatctctgcatattgaaaccaatctcctgttgtaattgtttccatttagtctgtaataaacatttctccctactttcaattgttgttcttcagctggttgatgataactacaggtctggataccattacatacccatgattgattaattaatttgttaatcccatcctaccaaggatcaaggtaagtatgaaagaaaatattgcaggcgtaaataaactactatacattgtcaatttccatcagatatatgtacagggttacatgctacagagagactgaaagaaattctacatcaagacgacgacggcgaggcgacataagggaaattcacatagaaccctaggttagcagtggtggattcatgggcggcccatgctgatcgcagcaagccggccggcgatgtccactccggcgggggcaccctcctccctcgccacgcgcagcccggcgagcctctccgcgaggccgtccagtgcggccagcgactccgtcaccggggagatggcgccggagacggcggcgcaggcggcctcgtcgaggaagcagagcgcgaactcgtctccgcactccggctcctcccaggagagcgtctcgccgtccatcctctcgaaggcgtcgcccgggaggatcgggtaggcgaacacgatgcgctgctgggcgccgccgtcggggccggagtacaggacgagggatcggccctgcgggcggaggaatctgacggcggcgtaggcggcgccgaggttgtgccattggccgccgccggtggcggcggttgcttggcggtggaggagctggactgggtaagcatcggtcgccatgggaagagctcgagataggggagtgtttccggaggaagacgaaggagagagaggtaattaattcgtcggcctgtgcgacagatgatctcagccgttggattttgtttaggtctaaacactctccaaacccgggcactagcaccgttggattatgtttaggctttaatacgggcaaaaaaagaataccacccgggttcaattctcggataaatgatttgatccattcggcccatctgaattttggtagccgcctactactccccacaaaatttgaaaatttgaccatttccgaaaactaatttcgcaaatgaaccgcggccaaaacttattttaaaaatgatatttttttcagcgtcaaatcgtatgacactgagtttagacacatcagcatcacatcaactggcgctaaatgctgtgtcaccgtggatgggaggctgagtcgacgtgccaacgtgcattcagcgccgtactatttagcgctgatatgtctaagtttagtgccgtacgacttggcgtggaacaaaataatcatttttgaaataagtttttggccgcggtttatttgtaaaatagtttttgaagggtcaaattgtcaaatttcgtgtactactccctatccaaaaaaaacttaaagtagtatagggtagaacataatctattctgttttcgttgtactgtattattttccatcatacattaggtttggtttctttagaaggaggaagtaactctctatttggtatcaagatcgtgaacccgcaactgagtcggtcgattgcttggtgagttgatcttatcggttcgtttttagatctttattattgccgtgtttaattagttgaattaattaagtgatgtttaaatattttgtaatcaaaatgattctttggtaaatgtaccaaaattttaaactacctattcacaatgtataaagataataattgacattaaggccctgtttaggattattataatttgaattattaggagtaaactgaaacaaacaagtaaattattatgatagattattataatctataagtcagattactataatctaataatctcctctagaggagctttttttgattactgggtggctaaagacccactacccctagatgtctctaataattaaaaaaacaaacaactcacagcttattctatgttaacttattataatccagcttatagtaatctagatttatattacaataatcttaatctgaaacaaacagcgcctaagttagtgtctgcatcctataaaaatcacatcaaaataacatagaaaagaagaaagagaaagagagcgtattttatttcatatgagtggtagtgaaggtatgacgaagagttataaaggaccattttgtggatgctcgaattataaggtacggtgtgaagtttctaactcatcaaggatcttcaaggttatgcgtctaaacctaaaaaatagaaaacgaaacgtgcaaattatggatttaattttgacataattgtgtcatgtcgacttatcacaagattaataggtatatatacatataactcctttcaaccctttaatactttgttcccacacgacagtacgtggtcctcctgttcataacaccaaatatgaatattatatcacaaatatatatttaagccgtgagtccttttctccccgttcgatctctcttgactctccatcttctaaatattgctcggcagattagttgttactcaatacaatactcccttgctgacaagtgcctggaaatgaacaaagacccatatctaactttcaaagttcaaaccacttgctggtaatataccaataaaagaacccatgcttgtggcaccatgtactacggcgacagtatgagagtatgtaaaaaggcaaaaaaaaatataactaaaatcttttatatttatgtatacacatgattagcatcgctcttcagctcttgcgttgtatgttttagagagtgagcgtgagcatatactccctctgattttaatatatagacgatgacattaatttttggtttgacgtttgatcattcgtctcatctaaatatagaagtgtccttttttattgtaagatactttactaattaataaaactttaagcatgacttatacttttattttttatatattaacagtaaatattttgaataagacacatgatcaaactttatatcaaaagataataacagcatctatttaaaaacggggtgatatctagacttctataaaaaggtagtggtaaggaaaaaggcaatgggctagatgacctacatgttaaccaccgtcaccaccaactcattatttttttttgttagtatcaaatatacgcagaaatcatgatgattttctttaactttaatcccattgtaatatacacacagtatacaagtaagtgggatattgtaggaagcacgtgggatattgtaaatatgagaaaaatgatgtgattgatcgactccattaaagtgggagcggggctgagacaacgtggaactacaaacgcccacaagatgcaagatacacgatcatctatcattcacatcattattatgatcgatggtgcataaatatggcactaataatataattcctcgtgacctgccgtgtgatgcactgataatatactagtgatgaactcctgtatatctgcacaatttctacaggagccctggattgcatgatctgtcattatatgttttgctaccaaactatatatatcataataaataaatgcaatttggaatatttttcattcttatattaaaaggtcatgtacatctatatatggattttatttcatcatttacaatattttaaactacacatggagttataggctgcacgtacaaacattgctgacctttggccgatcaattggggtctcgatcactctcactgtgcctatatatgcatgtgggcattctggcaaatagcttttggatgaagctagtggacctaccatcatatatactgggtgataccccgcgcttttctgcgggatttatggatgagtatatgttaaatattgtcgaaatgatgaaagttaaaatattaagaaaataatacgaggaacatgatttgacacatacatgtcgatctctataatataataaaataggctagaatagtaattgctagtgagtgaagatgtgacatacttgcataggattttaaattaatgagctaaaatagtaattgctagtgggtgatgatgtgacatacttgcatgttgagctttagcttgtaataattgttagtgggtactatgtagaaagtatatatatgcacagtatgagaacatatactccatccgtcctgcacagactccagttttgggtttctatatctaacgtttgaccatctctatttttttaaaaaaaataaaaaaatagttacacataaaatactatttatgttttatcatctaattacaatgaaaataataattatagataagacgaaaaatcaaacgttatattaaaaactaaaaaaatggagtttgtgagacggagggagtatatctcaaacacgttgttccattttagaccacgtacagaggggatcattgagacaatgtaacgttctgaaagtgctgacactgcttttacacaacaaaatgcgcatgtctgaggtaacttttaaattctgagaaacgagtggtaggaatcttgagaagctaagaaaattagcttatggtattactttattttctttctagattctacatctactttttaaattttcgatcaaaagttatggtttggaaagcttcagattttagaataatccgtaactgtcagaaactcccaaatagactcaatatatcatttgagcttcacgtaaaatgactaacctgattatatatggccttggggttttatatctctctgaaccttaatcagctagctataggtgtcttcaaccataatttgctattcagcttaattatcatccgtagctaaaatttaaatgttaatttaaattttattttaaagttgattgtgatgttttttaccatagtttattcaacgtatattggttttttaagttgctaagagcacatatataaaagttttactcataaattattttttaagccgctaataagtgttatggcttataatcaatcatctttagacaaaaatgatgggagtgcatccttccttagaatcggttccgatttttatatatctttacatagatattgcgtgtacaataaatttcccattttatgtaattcagaaatatatttttatttttggattaatatgtctgaaattcaaaagtcatatttaccaagttgtatgtggaacaaaatcttaaaaatttactgtttatatgttaaaaattcccaaagtctgaatttccaaatatcaactactagtaatttgcaatagatttaaaaaataactagctaataattatgttattgtgggaatgagctcatacaaatcgaattgctaattcattttttgttgttccatgttttatttgtttatcacggtaattggacttatagcatattctttaattaaatcccaaatttaaaaaattgatagaatagattaatatatgatatatcgatcactacacaaatatgcaagtttgaaattgacttctaggagctgaaaaaaatataattgtgaccacacgtatacttaggaagattgaatttaaacttgtatattcgtgatatataatatatcaatctatcttactatttttataaaaaaaatcataactattggatggtatgcaataactaggggacatatcctcacgagggattaaaaatccatttcccaagagtgcccaagtttttaccttttccgttttgtttttttaatgtaaacctgttgtaaatatcccaatgcttacactgctgaagaatgcctcatcagtcccggtttgtaaccccttttagttccgggttatgcgtatgcgtattctcgaaactcaggtgaatggttgaagctttttttttctacttttctggttaacacacaaattttgtatgtagtaagagttatatatagttggacagataaattgcttacggtaagaaatgcctagagaaattaagtctgcgtttaaatccacgggtgtaaaattttagcgtatcatatcaaatatacggacacacatttgaagtattaaacgtagtctaataacaaaacaaattacagaatccgcatgtaaaccacaagatgaatttattaagcctaattaatccgtcattagcaaatgtttattgtagcaccacgttgtcaaatcatggcgcaattagacttaaaagattcgtctcgcaatttacacgcaatctgccatttttttgacaaattgacccttttggaaaacttatttcgaaactaacccctgccaaaaacttcaaccaaaaataggccgtcgcctcagcgccaaacacattggcgctgacgttggccgtgtcagcgccaacgggactggcgctgacattgtgccaccgtggcggccgggccgatccccagctgacgtggcagctacctcagcgccaacaggactggcgctgaggtgggacttggccgcaacccccaaggcccagaccagcaaggcttctggatggcttgcgggtttggacctcagcgccagccataatggcgctgaccgtgggacactcagcgccagcccacaaggcccagaccagcaagcctgctggatggcttgcgggctgggacctcagcgccagccataatggcgctgaccgtgggacactcagcgccagtccacctggcgctgaggtgggccttggccgtttcgagccttctggatggcttgcgggctgggacctcagcgccatccataatggcgctgactgtgggaaactcagcgccagcccacctggcgctgaggttggacttggccgtttcggccgtggcccagcccagcaagccttctggacacaacacaggccatttagacatgtcagcgctgagtttggacatgtcagcgccatttagcatggcgctgacgtcccagccctgctaaactttagcaaaactttgcacacaacacaggcaaacatcaaatcacagaaatttacaggcagtaatatatccagagaaccatacaaaacatacatccatccatcaatcccaacatcattccatacatccatagaatccatcaatacatccatatatgaagtccatatatataagaaataaaaacatcccatcgatcctcgtctatacatccagtcgagtccatacatccagtccatacatccatcgaaccatgcatcaagtccatccacccatccattgaccaatgcactcacttcctcctacctttagtgcgaggacaaggcacgtcgggggtgtacctccagtcttggaaagaggcccgccggcgtcgtggtcaagacgggccgggctgcgagatatccggctgtgacgactctggtgcgtcctctagctgcgagggaccgagctcatccgcctccttttctctgtcctcatccccttcttcctcctcatctccttcctccgcctctttgtcttgctcgccctcctcgtcacccacctccccttcttcatccccctcttggtgggcatgagcatgttcgaccacatcagtcgacctgcagccgagccttgctgccaacttccgacatcgctgccgtagtctctgcataaaaaataatccatgttaagttatcgcttttggaagaaaacaccgtagtttcatctctttccaacgattacctgtagggcgttgcggagggtgccgccctctccttcggagccaggagcaatgtaccttggtatttaccggttaagaaagtgccatcaattgctagcaccggcctcaagtgcttgaatgcttctatggactggccaaatatccaatatgcatgtccaaatactcgcctctgtactccatccaccatcctggacttctcgggatgagcctcaacacggaaatgcatggtagggttctttgctttgatggcacgcatcagtgtaggcaagcgaacatacgcctcgtcccaatctccccaaatgaccttcatagcaacttgcttagcacgccatgctttgccatacgtaggccgatagtgccatatttgctcaactgcctcgacaatcgctgctggagataaagttggttcagctcgcacaaatgcatgtaacctgtttccaataaaccttgaagtaagttgcaaatgcttgccggttacttccgcactacatcatgtgtggtcttcgcccaccctagtcacccgccacctatctcctccactcttccttgcattaatctgccatttgcaatggcgatcgagacaagccacagtatactttactgacgcgttagattccttcacatggtacggccggtggacacggatagaataactctgtagccatattttcagatcatccatcaatcgaaactccaaccccttccttggttcatcacacattggttcgaaggcaccgtcatattgtggatccccatcagcaattgctagcccagatctggtaagatcctcgaattgtgttatttccggatttctacccaccagtttcgcaaacacagtcctttcatgctctgacatcttacgcactggacgatcatcatcggagtcggaagcggactcatccaattcatcctctgtatcatactccaaccagcctgggttcaatccactgcgtatcatagcctcctcacactcctctcgggtatagaatttcagcctagccaactcccttaggcccatacttacattcttagcattcgcttcttcctcaggcaactccacatcatctcntacctcccgaccatcctcaacatctccttcctctcttaccggcacattctcctccacattaacttcctcccttaacggcacattgtcctctgcatgtacttcttcccttaacggcacattctcctctgcatgtacttcctcccttaccgggtcattctcttccctgacctccacatccgccatatcatttactccctcgcccccctccacgtcttcctcaatcaattcttccttcctactacacctctccgacagttcgtgacagctaatgggtgattctatgagtgaactttcattaaggtctacaagttctttctttcctatcctaccatctttcttccatgcaaacacctcaagagatttgaaatgtgaccccaatactatatctatatatgtttgccattcgatctctccattcaagtctaacataaatttatgtgacatgacaccgccgcccacatcgtatctcccttgcataccaaccgactcatcattccaatccaattcatgcttgatgcgagacattaactcctcaaaggtaggcttcgcaaaaaacactaattgtctaactgtcattccctcaaattggcttccatgtgtactttcatctaccacacaaccaccataatgaagccggaccaatctatccatctacaatttttaacccatgcataaacattaattacttgaaaataatatgtaattaccattgcaataccaatacttcaaaagctaacaacatgtctaatttttccaataaataagtacattactcaaatactacacattattgataaaaaaaaactctactcctacaaattacctacccttcaccacacatcaacccctttcaaaccctctcaatcaccacaaatccatcccacatcctaggccatcaccacacatccatctcccatcaaaccctagtgcatcaccaaacatccatcccaaatatattttgtcaaatgtatcaataacaaccaaatggataaagatatgccacctccacacttcatccccacccatattatccatctaataatccatccttagccaactattatcaaaccacgtctacaaccaaaacaatgcaaaatatccaataaaactttggggaacttagggtttatagaggggtttatcttctcttccgatcccaaactcaatgccgcacaaatcaccttcgattagagaggtttttgggggagattgggcgaggagaacgcggtggcgaccgaaccctaggcgggcggctggggaaaaaacggaggaataactggctggggcggcctcggccgggctctaagtagccaaggtcagcgccaacttacttggcgctgaggttgggcacctcagcgccgaagcggttggcgctgagttagctgccacgtcagctaggggatcggcccggccaccacggtggcacaatgtcagcgccagtcccgttggcgctgacacggccaacctcagcgccaatgcgcttggcgctgagccgacggcctagttttggttgaagtttttggcaggggttagtttcgaattaagtttttgaaaagggtcaatttgtcaaaaaaacggcgcaatctgtgtaattagttattttttcgtctatatttaatactccgtatatgtgtctaaatatttgatgtgataggatgtaaaattttaccaaggaatctaaacacggcctaagttagtcatatccatgggtggtttgcatgggagaagtcagtgccttttaaattagacacagtgagaccaagcagtagtacgtacaggttggagctagctatacagacatacaacagtctttcttgctagctttaaggtgtggccgtgtcattgtcactgattcatgtgatgctgttgacagaaagagaaagcatcctacatacagacagatcgatcgatcgatcgataaccagatcaactgacttgctagaaagtgaaagtaaatcatctcatcgatcgatcagaaagtggcttacatcagagatagcaagtgaaaaggagctcactcactcccaaagtccccagtctcctagctatatatatctctacactcaagcacactgtcggaagctcaggtagcacagagagagacgaccgatcgatcgatcagctagctgcagcttccagaaagagtagttagctcgatcgatcgatccgggaaggatcagagttaattagtgagtgaggaattgtagccatgggccggccgccgtgctgcgacaaggaggggatcaagaaggggccatggacgcccgaggaggacatcatcctcgtctcctacatccaagaacacggccccggcaactggagatcggttcccatcaacactggtacgtcctaattccccaattctgtgtagtttcttactttcttttgtagatgaactatagctagccaagtagccatggtgatcgatgatgaactgagaagaagctgaagctgtgggtggatggatggatgcagggctgatgaggtgcagcaagagctgcaggctgcggtggacgaactacctgcggccggggataaagcgcggcaacttcacggcgcacgaggaggggatcatcgtccacctccagtcgcttctcggcaaccgctgggccgccatcgcctcctacctcccccagcgcaccgacaacgacatcaagaactactggaacacccacctcaagaagaagctcgccgccgccgccaactccacttcatcctccaaccgccaccccatcttcgccgacgccaccttcccctccgccgccggcggtagctacacggtgagcagcaactccgatgtcacccagatggcagccattgctaggcgctcccccttcgccgactgcccatcctcctcatacgcctccagcatggacaacatctccaagctgctcgacggcttcatgaagaccaactccccgtcgccgccgccgccaccgctgcagcactatgacagcggctattacgacgacgtcaagcccgccgtcgatgtcggcggcaaccccttgctgtcgtccttcgactgcatgtccggcgccgacctggactgctgcttcgacgttcatcagcagcaccagcagcagcagccggcgtcgttcatggagtacggcggctatggcggcggctacggcgacgagagcaagcagcagctgatgaaccaggcagcgccgccgctgtcatcgatcgagaagtggctgttcgacgaggcggcggcggagcaggtcgccgacctcatggacctctccgacggttgctgctccgtcccaatgatgttttaattagctcaagtaatgaaagaaaacactgtcacattcgatacgtatactgtgcacatcaataattaattttacattaattagctagatgcatgtctaggttaaactattgttgttactatacttgaagctagaagatttgttttatttgtagttttggatgtgtgaccggttgtacgtgtgtcactggcatcaaacgtcagcacaagaataagagatatcaacaggaattaacaggtgtgattatatatgtaagcatgatgtaactcatcaagattatttcttattcattttttcgaatgaattcataaaattatttccacagagtgtctccagtagccaacctatcatgcacaaagagctggaatattggaatataatatcgttgtcaaaatccctatccaatccattattgttagactcctgtttggattaaagaggtctttaaaatgacaatcttatcttcctttcctaattcttaatttctagtttccacaatttcagcaatgttagatggtaattggactactctcataatgtataaagttcactttagaggtttaattaagactcacgtttatgtctgcattgtggctgccctaaggaagtgccagaaggtaccatattttctaatgtaaaatttgatatctcttatatttctggtatcaagagatacgaaaatttgcgttaaaaaattttggtgcctcttaagattataaaatttctctactaacaaagtaataagtgctccttcttgtctcaaaacaaaattattttgaatgtttttaaagtcaacattatacaaatatggctatctagttctttagcagaaattttacaaaattacatgtgtaatactaaaaaagatattgtaaatatgattttttatggtcaaagttaactcgtgttgagtgcacaccttttaaaacgactgtgagaccagagggaaatggtgaaagttccagtttattttttgttcctgaatggagtgggctggtgcaatgatttatgaaacagtttcttcgtcctcttatgtacttgccgtatgcccatatgaatgcagatactatactattcttacaaagcagctgcggagagaagaagcttaaacagactccttacctgtcggcaactgtgttggtcccccgatcacattcagtgcaaacgaaatcagctcccaacttttttttcttgccctgttctcattcattgagtgcaaagataaacagtgccctaatctttcgtttaatgccggacctaccctgcaaattacaccaatgttagggcaattggacaggtcaggtccctctctatgagtatatttttgcaaatagctaggcttcagaaacttgtgtgttgatggtgcatagctactctaggtagtcatcagcatcacagcaaatgcagcgttagcttgttaaacatcaactaaaactcatagatggtactgcactactgagaatagtggtcgatgtccagcaaattgagtgattatacctgattatgacatggcctgtgtcgtgtctctctctgttacacgtcccttttatgctaacctgcagaatcctctgcttctgcctagtgaacctgcttcagtgtacaaattacaaactccagatcgcctattaaattgtacgtaagacgagaggaaaacctggcattgcatgaacaattaagctgatgaagtctcaacctgtcctagcctggctcggtgatattctcaactgcctgacgccaatcagctacttcctccgtttcacaatataagtcattctagcatttctcatattcatattgatgttatctagatttattaacatcaatatgaatatgggaaatgctagaatgacttacattgtaaaacagagggagtagctttgtacagcagctatgtgcttttttgtgttccagccccagatcaggcaggctttggaccagcggggtgaggccgaccaggttacatttttcctggcccaaccacatccaaccatgctggcattgctgccatagtgccatggtccataagaagcacatttgataccttcatggagttcttcaacaaatgcaggactccaatccttcagtcctgccaagaaaggaaagcattatgatcaaccataccggttcagaaagaaaaatactctcaagatctccagatgttcaagtgattcaagtctactaattcaaaacatctggaattctggaagtaactaaattttgttgcatagtttgtatagagttgatcgaaggcttggccataattactgtatgttcaaatcaccctgtaaaatgatctctccagaaaaagaaagtaatgcttaaatgcttaatagtagaaattagaaaaaggaaaggaactgcaattcttgacaacatggtattgagtggaagtatacatctcagtcttcatgtatccatcagagtagatacgggaccaaggcagtacaaatatagctcacgtgtaattaagagttgccaagggagtgtgccatgacaaccaaccggcagctaccataagtatgagaggtctatctgtgtaacctcgggggagtacatagacaagctcaattcattcttccaggaagcatcctgtagcacaacagtaaccaggaaaatgtaagcattagccttgtcaaattaagaacaattgacacatcatatgcattttgtgacagaaagtaaaaccgacgttcagttctgaaagtggaggtagtgctactggtgtatgaacaaaatccattccaaaaagataaagatcagtggtagtcaacagccaatagcatggcagtctaactgcaaaactatacctcaaagtagttcatcgacactaacagcaaaaggagtcttaatgtgtagagaactagttcttgacaagtccaagtgcacattctgtaactacttcgtcaattagcaggcataagttgccatcgtatttctgtcagaataatggcacatacttgaagtagaattctgttgacaccgatttgaccccagctataggtatcctgatgagtatgtatacacagcatatgaaagggactcatacaatgtgtaagaatagtgttgttatcaggtatttaattcatctttaataggcaggtgttgtaaaaaagatcaaggacccaaatattttcatgcatcaatattttaatcaagaaagaatctcaggtaactcaggaatggcttccaatccagattttgtaaaaaatggatttatatgacaaggtaaaatctatgctaaacctgacaacacaaaagtgagcatgggttaacttatctttacatctccaaaccttgctagaaaatcaagtaaatggtgactagcaaactcctagcattttttttataaccacacaatggcacaaaaacttaccacgttacaatgtaaaaccaaatcaagatgtgtagctgtggatgaaatagtcggctagtttataatagttactcaagacattagaatcaccttcttaattactcaagaaaatattcactctgctaatagttccactactttactagtcaaaataactctgagtaaaaaaaaatcagccacagatttttgtacgtaggaagacagttttaattcagtgtctaattgagagggggggggtctgtacagagcaaacattgcaccaggacttgattcaagactaaatagattatattgccaatttaaagagcatggtattgtaagttgttgtgtgtgctgtgtggttgttcagctgaccgcaggtagttgtttttcttttccttgtaacccgtctgagtttttacttctacttattgaaacacaattggtaattcttattccggtttagtttaaaaaataagtagatacattttgccagaaaagtgtaaaatggtaccattgtactaattttccattccgtggggatggttagtaaaaactactccactaagtaacaccacctaaatgcttgaccccactttccattgtcgaaaccattaaatttgcaacaaggagagatataaccatgacctatgagaaattgatggggcatttgcaaatttgccaccggttttttcaattttgcaaggatgccactcgaatgacagttccagtggcatttttgtaattttctagtggcagttttgcaataacaattcaaagcagtggtaaatttgcaattgccccgaaattgaaagaacaaaaaataattgttcatgaacttttccagaagatctatccattcaaaaatgaaaatataaccaactttgtgaattatatagtatagtacgtacagtatagatatagtttcagagaaaaacactaagtggtatggaatatacattacaagataataatgtcggctcagcctattattcataacatcgttgcagcaaggacacctttaggcagttcttcagtttgttcatatattagttcacatgaaaggacaaacctacagcataatcatcacaaagagtgagtagcttacctcccaactactaaccaaactagcaccacaaggaccacctcagcaagccaattcttttgctattgagcatgactgcctgaacaccctagctaatgccttcagtaaagacttacaatcctgttaccttgctattataagaatgtgatgtgcatcgttctttttaaacaaatattgtcatgctcagaagtaagacttcttaaatgcgatagctaaaaagagcaagaagatccaccatcagtatattctgatgttgcacattgctaatgtaccttttcttcaagaaacctatagtgccatatactttggagtggttgcatagagtgcaatgcttatcagtaatcaataatcatttggagttgttggataagtggatggatctcgtatctatctgtacaggtgacaacaaactagaaagagtacaaagacaaagatacacaagttgaagatgtctattctcagaaataaatgtagctacatctgctatgatacacatgttagtatttgaggactgctagccaaaattaatgaatattcaaaaaatatgtgacgctcttacatacttaagattggaatttagtagagaaagctagtataacatagagccgcaacaaggttggtgctttctagttacctggattttgataacatactctgtgcagaaccatcttatataacatatccaatacgatatgcctccattcatgaaacatcgttaatttgttaggtaagccaacaatgtttatttataccataaagcaaagacaaaataaaccatttttcagaaccttatttggtgcatcacatcttaggcagatctacatttatgggagagttgtcccgtaaccaactatgcgatgcagattttcccaacggtgcactatcaattggcctgatatgtggtggcacaatccctgttaccctgctatatgttccaacaaaaatgtcaaggtcccattcaagagcagagagctagattaagatgttgaaccatttggcatatctagtgtcctctgcaagtagaaaaaatgatagatagcactatctacttgttggaaacattaatatgaatttatcattttaggcatatgagttgattgagcattttgagataggtacaactacgataggtgactgtcatgtggtatatatgacctgagtcagaagagatatcagggattggtcagttaacattggttcccagaatctctacaacattgagagtttggccagcttctttgaggacaaaccgaaagtggttgaacttttggtggctgacatcaaagaagaagtttcgatctggagagcggccggtatttttgatagcgaggagtagcaacttggtctctagctccctgtaaatagttttgtttttcttctgtttcggggtcttccccgactcggcagtttaatgtcgtgtatacctatataactctcttttatcttaatgaaatttggttggcgtccttccgccaacccggcaaaagagtttggccagctggagccagtattccatccatccagcgatgaacaatggattgtgcaaattttgccacccttcgcaccacattctcaagtgtctttaagaaaataacaagaaatcaataacctgtaaacccaattgtttttttttctctcgaaaccatcaactccaaaatagatttgttaaaaataaaagacttagcttcaaggagacaaatcataagagattaagaaaaaggttaaggccattttacaagtaactaaaagagattaattaagagcatctgcataaaaggacaaattggaattttctaactcaatagaaggccatttcaaccaacataagaaaatttactgccagggaatcttgaccaatcagttgtgattttcgattggtttattatcagttaatagggatttgacttctactgttgactactagatgaattccatgaacacttttgataagacttcgcgtaaaacaagtaacgagcatcatgctcttagatctgagtggaagttgttgcatcatcagcgtagtggttcttgaagctcaagagaaccaatgatgtatgttttctaaagaaaatgatgtgcagttgtaaatatagaataacaaatgctgttacgagcatgcctacttttagtagccttgtgcctcgtcaatcagaatttaaagggaaacatcacactaattattccagtcacatagaattagcataggaccactaattggttgcaagtcgtacaggaatataactctgaaatttgagcaattattttgtggtttggcgattgagaacgacctacttaacctacaggagaacatcaggttcagaccacataaacaacactagcaaggtatggataaacctagttgaaagtggcttttccgattgatggaaactaaacacacatacaaagcactgatttgaattaaccgttaccaatcaaagtgatgatatgtgatagcaaccgtatatgtatatggtaccctttcctacagaaaggactcataccagctgagggattacattgttagatgtcatgtcattttcaaaacttgaacttgtccttgttgcatcaaattcagttaaaaggttagtcaacatacccttatccttgatcagtggactaggtcattttggaacaagcacatgaacttatgagctataaatggggaacatcatagcaatttccgcgaattatatgggcgaatttggttcagggaatgacggaacttttggagaaaggatggtttctccttttcttttctgaaagttgaagggaatttatcttgacgccctgtatatatatctagaacgctcggtaaaatttgtgttactgacctactgacgtgcaacgcaacagaaaagtttatttataaaagagatagaaataataaatggaggatgttgagtggctaccggcaaagtttcctgcgatgctggcgcgatcaagcttggtcgatggcgccggcgaggctgcggatgaccggatgggcagccggcggcggtctcctctcttttctcttccatcccaaggagcagcagcgaagctggagagagaaaaaggacaaaatgggccaagaaatctgctctgcaataccgcctggtgagtagtgacaaggcccatagaagcacacttcacggcccatttcatagaccaacagacaagtcaggcatgcactcacaggcaaatccctatttgctctgctgggagaatacaaaatctgatgattttgtccccagctgagctcaccaagtttatctttacccatactttggcaaaaaaagacgttccctgacctatttccagtttatcacaactctagctcacagctatgcatttagctatctgatatacaacaacagacaaacctaaaacagtgtgatcagacttgtaaccagctacctaagggcctgtttgggggagcttctagctgctgcagcttctctcagaatcagaagctccctcaaacagtccagcttttggtccagattctaaaaagttgtagttgtagaatccagaaaatgaactagaagctggaaaatccagcttttccaaattctcagaagctggctaccataccaatcagttgcttcttagaatcttaaactccccaaacaagccctaaaacatgttcacaaacatggaacagcaaacaaggtatcttgatactagaaattttacatgatgagctgaaatggaggaacagaacgtagcaaacagcatgcctgagtaagaatgtaatattgtaagaaccaagaatgtagaatagaatttcccctactacctataacatcaaacagcaagccattttagggactatgaccaaatttcagaaaggtaggaattgtagttcaatttccttttatccaaagagattggcccaagccttgtcgaactgtaagagaactcacagaaaaccaaggtcttcatagtcacaaaccttactcaactgaacatcttcacacagaaaaagaaaaacagttagttctttaacaaagtcacaattttattgacttgatccagatctacaagactacgatagaaacttcaacattggcagggagcaaaccacaaagagaaaagggcaacttttccatttggattattagaattgaatatctgctaaattttatttcttctattcatcttagccctgtgaggctgtgaagttgtagacctgtagtaattgattgagaaatgtcatgtaatcacgttggttcgaaaaactgaagttggcctcctatcaatgtctggactggaatcccttctgattaataacaaaattagaaggaattggctataccctttgggctggaaatcactataaaatatctgtcacaaaaggatttgttctgaaacagtatcttgttcttattgcatgaacaatgaaacgcaacagcaatggaccagtgcattgaataaatgaagtttttatttagagtgataaatgaccaggatgcaggttgctagattagctaatctctagctgaattttatcaagcaaaagaacaatatagcagatcccattgtatttgggaagaatcccaaccttatcttcaaggaagctaccgcacttattacatagttcacttcactcaatagagagaaaccaggaaatgaaataactaataaccccagcacataaagcagatcccgttgtatgtcaatcaattaatcgagattacgaaagcatcacaacacacaatggttaggaaatagtataatgcatattcaaagtttacactttacagacatctacctgaccaagataaggatgcatattctaggtttgcagtcatctactgtgactaagaaaacgaaatgcaacaataggtctgaagttatgatgactgcacaaaaaataacaaggaagacacttatcagttacactaaaaatatcaagtaactgcaatggtacaagattgattacaacactaccctacaatagaaactgcaagcttatgggaatacaaatacaagcatcgattccatctatctagtatgaaaatcagcaagcaaatataccttgccccttgtgtgttagaatcaggtttccatctgaatctattgatctatcatttgctaataatggagcagttacactcagcaaacaatcttcccttcagtaacacataaaacacagccgttgaacaagtaaactctgaaaatcaagcaatttttgccaggctgctatccctaactgagtgaagatcatgtggggtgatgaggaaaatagaacatgccatgtaccaccagatcgatctaccactccaccagccctcaagctcctttattttagagtgtttaatcaaggaatcaagcctcaagctcccatcttcatgggaactgaaagaatcattagcgctagacaagcacatgtcatcatagcttctctgttaaccgaatcatgaaagagctgacagcaacaacatcgagaacaatccatgatgactcaaacatgtcatggaaatagtctgcaccaatctcctcggcagctgacctaaatgcattaccaaatgcattccccttaacagcccccagccttggcttcccacatacccccacaacaagcactttctcaggctcccttgctaagcaagcgcagataagtggcttcatccttgctcctcgctctctcagtgcgtccattaggaaaaagcagaatttggtaagagcctgaggttggcataacttatctgtatccactggatcatcaagcttcacccaccgaaacttctttgcactccgaatgaacccggtcttggtaatcgctgagcttccttgcctcagtattgccctctgtatctcaattgcagactgcatccctttccgcagctgatcgacattgctcagcgacaatgcagagtatgcaacccagaattgctcagcagcagaagaccccttggagtccttggactcagcattcagtgattcaagcaaagctgtgacgccataaacaacatctgcagcagaaaccttggagcggtacccatgcaccctcaagaaactccgataatagaactcggtgagcccatactcaggcaagaaccgatcaaactcatcacgcatcttccgcttgacctccatgctcatgtactggaacctcttctggcagtcggcgagcgggaatcccatccttgccagaagcagcttcagcttcttgaggccattgtcgctccaggtcttgagcttcgtcgcgacatacgacgagcagagcatggagtcgaacagactccactcccggagcagcatcagccgcggctcgtcttcataggcgatgcgtgaggcctccggcgcccggatcttggtgccatccttgagcgtcaccaccgcgcccacgccagatggatcgagattgccagatccattgatgtgctgctcgagctccatgacggcggcctggtagcgctcgttggtgatgcgctcgtggacgaactggtcggtgagggagacgcaggcgaaccagaggagctcgttggtgttcttccgcagcgcgtgggcgagctcgtacatgaggcaccccgacggcttcccgtggaaggtgccgagccggtagtactccctcctcagcttcccgaacagcctctccgggtcgccatccgcctccgcatcgtcggagagccgccgcctcttcctcctcccaccctcgccgtcggaatccgagtcggaagcatcggaatcttcgtcctcctcggcgacgcggaggtggtcgtcggcctccccctgagcggagaggtcggaggcatcggctagggaggagacgtcgaagtcgtaggagagatcggcggtgtgctcgtcgtcagtggtgaagagcacgacgacgcggtcgttggccgccgaaaggttgtggaggtggatggggcggtgcgaatccacgacgaacgcggtggcggcggggggcagcacggcgcggaggtcgcggtgggcgccccagttgatgaggaggaggcagagcggctgggatgcggagaaggaggcgaggagggaggcggcggcggcggcggacgcgacggggtagatggagaagcggatggagtcggcggagaggacgtgggtgagcaccttgagcgcgcagagggcgtcggcgtcggcggcggaggggaggatcaggagcggcgaggatgcgtcggcggcggacgcggcggcggcggcgtggaggcgcgcgtagaaggagtcgaggcggagctctcgcaccattggcgcatcaatcgaagtggtgaattggaggattggggatctgggaggaatgggttggaatttggagatggagaaggggacgaagaagaagaggatgaaatggggaaattgaattgaagggatttgggttggagaggggcagcgcggggaggaattcggaaattttgggtttgggagggaaaccactcgatcgaaatttggggatctcacgattcgaacccccgcgaagtttcagtgactgacatatggagccgattgctcgtaggccgtcttagaagaattgctcttgggccgcacgtaaaccgcatctccgttccggtccaattaacatgggccgcacgtaagtcgctgcgccgttccggcccagttccgcctgcgttggtccggcggatcgtcacctgcgtcgtaggcctgcacttgttcccccaacgtcgccgcgtgctggtccatccgtcctccctcctcccgcgccacaccgccgctccgcatacccacttggccggccactccgccgccaacgccggcgcggaaggggttagagcatctccaacagagtggccatttcactatctaagttaaattttggtaattttaagtaaaaaaacgggctctaacagacttgctaaacggctgaccatgccatatggctggctaaactcctccctacgctggccaactgtggccagccagagttgccttgcaaaatcgtgggccccacgcattttttcccatctcctctcatattctctctccgcagtcgcaagcgcgccgctggcgccagcgccatccctgctgtcgtccgccgtcatccctaccgctgtccgatgccaccaccgcaatccctaccgccgctccccttctccttttgcatcggcctcagaggatttggtggtgctgctgctccgccgttcgtcgtcactcacagcggcgccgccggtcctccggtccgccgctccgctctctccggtctccgccgcccgcgctgctcccgccggccttcaccgccccgcctctcccgccggcgtccatcgcctccaccgccccgtcgtttccatcggcctctgccactcgcgccgctgccgccggcgtccatcgtctccacccccgcgccattgcaatgcagagaagagaggagaagacgagagagaagtggatgaaaaagatcacaaataaaaagtgtgactgacatatgggacccactgttaaattggagatttgaatggagagactgttggagtgaaattcaaatttggctctctaaatttttggcaatttgctaaataggacatttggagaggcaaaaatagccatgttgttagagatgctcttaggatgagagaaagaggagagccccgccgctgctcttcgtggtcgtcccggcgccctgctgcgcttgcaccgaaaaaaagaaagggagagacagattagtagagagaagggatggcatgcgcgttccattttattttttttaaaatttattttatgactggactatcacgtagttctcgcgtcaacgtaaaccgctcttaaaacatttgagagagtttgttttggactgttttacttgttttgcaattaaggaatataaattagatccatccactagttaacggagttaaagtgaactttttctatggctgaatggccaaggattatctgcatgtaggcccagtaagtgatgagatcaaatactactagctttgcatgttgtatgtgcatgagttgattcgaaaattacaaatattatctatatctacatacctgaatatatgcacaaaccagtcatgcatgttcaaagtctgagacattagttgattggatatatatgttgagctgcaatcaaaactgttgctattgctagctccaagatgtttttggcatacctgcatgccgcctcctattagttggtacgaatgggcccaagctaagctagcaggagtagcgctgaatccaagattgtagctctagtttcacacgctaggtcctcctcgtaaaattggatggaactatggaactcatgtgagttgtgtgagctttaggtttggagccacatcatccgagagaacgatttaccccttctatttacatgctgaacggactatgcttaaattaattatagtgaagagtaaattgcacttgcagtaaattaacctgtcaggttcctatcttgaatgtatatatagtcttagtagttaattgttctcacatattgtccttgtccatattcatatctaaaaatacactcttaaagaaaggatgttgtagatgaaaaaaatactagatagacacacatcaattcaataaaaaaagtatagtataagacataataataatcgtaaacaaaaagatatgaaaaaccaaaacaaaatgatgcaaggagtagaaacatagaaagagaaaatagagactaagatttcaaatataacatgtctcatgcatgccacctcaagtcctaatcaacgacaacttagtaaaattagcctttcggtgtcattttaactttggttcacacgcgtcaaacaagttcatatatcaaatgagtgttttacaagttcatatatactaacttttaactaatataatttagagatgatgtttttccccgaatcatgtcaattagagatggatgcttcattacttcataagcatggatcaatataatatcatgatgatattgtgtaaagtacaccaatttttgcatggtttcgtaaataattgtggtctcaatcactataaaaagatgatttttcatagcatcaccctataattttcgttggcggctatacgcgaaaaccgccaacaaaaacgtaacgaggggtggagcctatggactgacaacgaaaactggccgcgctaaaagatctgccataaaaaactctatttttcgacgcgaaacttcttaagtgtccgccaacgaaaatcacgttttcgctggcagtagataaagaggaccgctggaaaaaaaatccaccgcgcacctcaccgcccaccaaacgccaaataaaatccctctctccgcctctctccattctccctcgcatctctccttctccctcccatctccaccaccgccggctaccatcgccaccccacccacccccagtaccgccgccatcatgccttgggagcggcgcagggaaggggggtgccgtctctcgtcatcagcggcgcgcgggagggggcggcgggagcggatccggcacctcctcctctctccccaccgacggtggcggcaaagaggagggatggcggctcgcgcaggcagcagcgatgcttgggagaggcgaatctggcgccgacatgcctcaagagggtggattaggcaccggtgggcctccagagggcggatccgccgccgccaggcctcgagagcggcgtggggaaggaggaggcggcgggagtggatctggcgtctcctcctccctccccaccggcggcggcagcaaataggagggatggcggctcgcgcaggcggcggcgatgctcgggggaggtggatccaacgccaatggtgcttgagtccaaccatgacaacctcgagtgcgacgatgctggtggcgggtttgcttgggccaacgatggccagcggatttttgtgatgatgatatcttgttaatatgttatgttgctgttaatatgttgatatttgtgatgctctgtatttggattgtgcttgaatgatgttcatgtccattttcaatttttttttggcaacttcctggatgagatggtagaaagggattctggggatttattttttttcctgaaaatcattttcactagcttttggcataatcttgctgactgcagaagtttatttttgctgggagttcacttaatcttgctgccaacgaaaatagattattttcacttacctacgttgacggttagcctagccgctagaaaaagcatattttagcagtcaggaaaaaccatttttttcccgtagtgattatgcctgcatcaaaactcaactattaaaagccatacatgcagctaaagcatcggcacgcatgaagcacgcgcagttcaccatccatatatatccttttaaataataagtttgcagctgacatgtcaatttaaatggccgcgctctgcagctgtactgtacttatctcgctcgtgcgtgcacaccaactacactgtaactttctgtacgtgatggatagatatcagccccgtttagttcctaaatttttttcccaaaaacaatcttttaagcctaatttgtctcgcggtttccaggcgagttataaaattagtctttttatttgcgtctaaaaatcttttttaacatccggtcaaacgttctatgtgaaacaaaaattttcatttcaccaactaaagacctgatatactcttatcctgcgtacgacaggtcgacagctttcctagctatccgcctgacgccactatctgactatctccaatactcctcattcacaaaaaaaatgtggactctttagttagctacccgcgactgatcagctcaacagcatgatgtgcatgaattttgctgttgcctgcatgcctacgtgtcgtgcatatgcatgcttcaaattaaagggagcatgtataatataattgccaacaattaaaagagattctaaagagcttacaaattattggacactcgatccttattagctagtactatataagttgcaattagcatgcatgttcttgcttatgaaggtgtgaattgtctttatttaggcctatatgtactgccttatttctcaaattaatggatgatgttttgaatatcgacatgcatgatccttaatgcacatctttaatttattattattattttaagctagacatttataaaaacttatataaaactataactatagaatttgtttgtaaaaaatctcctaggataacattcagactttaaaattccactatttttgtattaatggtttaaggtttagatcaggcttgactacacatattctagattctaggatatcatcattttaagacggagatagtatcaaataaaagaggagtatacatattttaaatatttcaaatctatttaatatttaaaccaaacgtatatgcgtagaccaggttcctaaagtgtttttagtaatatgctagaatttagtggtaaacaacacagtgactagatgaaataaagaaaacgtggtgcccctatctcacataagtatggtcgtgtttagatctaaagtttttcttcaaactttcaacttttccatcacatcaaaacttttctacacatacaaacttccaacttttctgtcacatcgtttcaatttcaaccaaacttctaattttggtgtgaactaaacacagcctatagagagagtttgcttgtatattcaacttccactgcatgtcaattatatatgcacgaagcctagaatggataggatagagaatatacattaagttgactcaatgactccaaacttatccatttcaataaaaatccaatattaaacgctattccatgcatgctcataaaagtagaccaaccaaagcagcaagacgccatcagggtttcccaaactgccgggaccggggttaccacgcggtaaccgtgaaaaactgtacaaaaccgtataaaatttattaaaaattcaaattattttttaaatttatttaaatttaaggaggttaccgcggtatttatattaccgtacccccgcggtaagcccggtaaccgcggtaaccagcggtaagggaaaccctggtcgccatcaccggccacaaaaacatataataaaactaacaatagttgtctgcgcaatgcatggcctttcttctatttttgtttctttttttttctaaattcacttaattctggatggttaagattgctacaggatccattcaaaatttctccatgttttcccattgtatgtcttcatgaggtatttctctattgttgtatttattctacttgctcagttttgataagccattttcattcccatctgtaatggattggttccatgagatccgagatgctaccacttcactcccacttccccatagccatggctaggccccaccaccccctccaaatctctctttccttgttaataacttatcctcttcctccgattctcaccctacagtacactcttccaccccacccatccttattggaatgatctaataaactaggggtgcttgttgcatccgccatcaaatatatcctcccacattatctctcttccttaatcaccagacttgctttggttggaggttaaaaaatggagacaattcaagaaatgccattttgacaagcattcaaattcaaaaaaataccatcgacgagtgtgagttccaaaaaatttcagagtacaaacgactttatcccaaaaatgtcatcgccgttagggttccgtctatcccgcgccattaagtgctataggatgaataatgtatttaacggcacggaatggacggagccctaacgacgatggtatttttgggacaaaatgattttggacgatgtcatttcttgaaactcacacttatcgatgatattttttggatttggacatttgtcaatggcctttcttgaattatctctaaaaatgtggaggttcgatcttgaatcaaccgatgtacatatgtagtacaactaagaagaataaaagataaactaaatgaaataaatattttattagggagcgccaaaaagtagttgcatagatatatatcaagagatagactcatataatgcacaaaaaccaaaatgtgatatccaaatcacattgcatatgcatcaaaaagctgccaacgacccaatcatacactgggacacatgcaagaggatcgatcgtgtggttgtttctgcatgatatgtgtctatgaaagcgaactagagctacatatcatgatttatatacctggcatgcataaattaaagttttgttttgatagatggatgttggccaaagaacaagtcacatggacttcgcccgtgcttgctcactcacctaaaaatggacctgacctttttggagggtcaagtatagtaggtgaagaatatatgggcatgtgtatatatatactttgttaattagttagctgagaagaagaaaaatgagaaatacaccaactttgtaataagtacagtaagttaaagaaaattaaatatagttgcatgaccatgtaatccagttgatcactactcatgggtataattaaatttatccttaatcaaagtcaaaaaaattatccttaatccactcgatctgaaaagcatatataagagaaaatcctctgaaaagtatcaacaaacattatggtttcggcagtgacagtcagatacagagatgacagctctgaaaatgatgcaaaaattgacatttgacaactaaatctcttgcatgctccagaatagacagtacactgaatagatttaatctgaagcagctaaattgtatacctaaactctgaagaattgactagtaaacagtacctctcaatcttctagagcctatacaccaaactagaggccagcttcctttctgcatgttgattttttgattccttgttttttagtacacaatatttcttttcatgaagacaaacgattttatttacccatgatgcaggaacctagtctctgttgtagtgttattgccattagcctagctttattttaacactcaagctatgctaggtaatcactttaacgacagaaacaacaaaaaggagttgatgtttaaacggctaacagttgacctgcagacttagagtatatatatagctctaatacttttcaggcatgaagatccaaatgatgaaccctcacacatgctagtgacaaaataacatactataataaccgcacccacaccttaattttttcttttagtaaaatgaaagccatcaagtaaatttgtgctacggcagctcagaagtcagaagaagagaacaacagtgtactaagcagatgataaccaccaagaaagtaccaactgctgcaaaaatctgttcccagcatatgaaagttaagtgacaattaattcagatatacaactactaatagtcaaacagaaaagcacagttattttagagaatataattaagatgttcatctgaatataatctgtacatggacacagcagttacatgaacgcttcttatgcgtatgctttttaacatatattatgttacattacacaccatcgattcaccaaaaatcaaaatatgaaagaaaaaaaggaagagaactttttaatcggttcatacacaatcagattcattcatccaccgaatcctttgaatgccaaatcgccaataccaccttacctactgatgatgctgatctactcgcacgacgaggccgaatcaaatccacggcgatcaccggcggccggtgccggaggaggtgtcggaggagcagtcgcattcggccgcggcggcctccacctctcgcctgtggaagctctggtggcagccgcaggcggcgcagaggagcgcggcggcggtgccatcggcgcccgacgccatgaactcccggcagccgtcgacggcgtggccgccgatgctggcggcgtggttgcgctggcactccctgtaccgcaccaccttgttgttctccttcctccccgccgccgccgccgccgccgtgctgccgttcgcgtacggcttggccgccgaccggtcttgctgaggccccatcgatgatcggtcacagatcacacctcgccgccggcgagcgtcgacgacgttaggtggcgaggaggagaaagggaggaagaagagaggaatggaaaagctttggtatcacggctttggatggtacgtacttatatggaggagaggagatgagcaaaagtttatctttttctttttttccttttttttttgttgagaggaagtttctcttttttattttgtcttgttaattactttacatgtactttgctttcttgatctcaaatatattactagggcgtgtactcttttgcttgtttatgcatattgttcacttgcaaacaatttaccttttttgttaaacaagtcatgcacatgagcgaaagagtatttggtctagtggtttgcagcgacctagtatcccaaagttctgagtttctatctctatagaagtgaattttagattgggttatctgagggactaaattcttgacttaaaatgttgtatatatccggttggatatagagacgtgataaaaaaaataccattcttgaagaaaaacgtcatgcacaggaactagcgcggcactggtataataaattaatatctttgagaaattgaaatattggtaccactttctattctgtacagcaattgtaccttttttgcatgatgattaaattagcaagcaattaactttggttgaacatattagtggcatgagaggactacattgaattgttaatcagtagatactctcagtgatttttgcttatcatttttcaggtaagtagataaatttgcactcgtagttaagttggtttctcagagaagcattgagccttttgaacttattatttattatattattatttccatagaaatggtcatgttgagcacgttggcacattaagcatgatctagtagctagttttggttgttatttctgttgctagtgctggaatattttcacttggaaaaagccatatcttatcttgtcctcttgtgctatttgccagtaccaaaaggcaactgcagagcattcagtttggtgactcgtgtgtgccatttagttaaggaccaccatgaccaactaactaagcattttaagtaggtcctttagtggacaggattagatatgaattgacttgacaaaacgtcttatgcgtctcttaggttgatggagattcgtctaattgctaagatggtgaccggtttttgttcactgacatggacatcttgaagaaaaggtgaagtagtgtgggggagaaagtcaaaattcagagattcagtgacttgtgcacaacacaaagcacagaagaagaaggaaatttagggatgagaggaagtttcttggatctacatgggaggttggattgagaagcactcttctccaattgactcttctgttcatcatctgtctgctacttgcttgtgccaccttctcctccatttttcaggaacaagtctgtccacttgatcaatggtgccaagctgtattctctgttgtgtagagaattatggtatgggaccttcctgtacgtcttcagaacatacctaattccaatgatgcatatatgtcctactgcccacatttgagcatgatgaaatcatgccaattttttccttgaaactaaatcattaggagaactaccaattatatttcaataaatataagtaaaaaatccaacagattaaaagaaaaagagaaaaaacaacatctcgacaaggacaaaaccttgccgaaagcttcaaacggtgggcggctagagaactaaacttacaacaccagctcgctaacaactaaacaatgacggagcacaacacaaggcatcgttgccgagctcattgcaaaagcaacacagctttggctttgttgcgaaatcatgccactttttcatgaattacctttaatctcactatcaatcaaccacatttgatctgtgtgtgactgctagctcttgtcacaaacctaagactttaagctagttcttccatgcttggtaaaacgacatctaatctactgaatgcaatgaacgtggatattgtcccaggttgaggtttggtgatatatatgaaagattccatgacatctgctttatcaagttgagatctctcctcaggaaatggaaaatgatgggctgtagaaacgataaaagtagatcactgatcgccgcgacaaagatacagaaaggtcgtattcagcaaccaaacttgtcttctgtagtggaactggtcatcaaataatttatgtctgatctatcaaaaataaggaaagaattaggtgccctagtgacaaaaacagcacacattctttgctttgcttaacttttaattattcaggtgaaaaagaggagcatgttctgaccagggaataccattctgagccttgtcaagttaatttgtcaaagactagtaaattaggtgtccttacaaagaaaagaaaaaagaggacatgttagcatgaaccgtgaagtagacttgttagattattaccacctaaaagtctaagaaatcaatcaagtaactcgatcgaattctgctcctgatcttgctggcattatcgatggaccagttattttttttctctcaggattctagaaaacatcactgcaaaaatgaaaggaatatctcaaactagtaccacacctgaagtccttttcattaaaacataatctcttaagaccctatgattagtacaacgatgtttttaatatctccatcaactttaaataacttataatatatcgttgtacatgtgccattgtctcttcagtttaaaaattaaaatatgcacttgatgaaaagtactattagttttctctacagggggttatgcactaaagttctaaacagtccatgctcatatttacttacacccaaacaatgaacttgagtaaaatgcaagaactaacttatcatcataagttgaaagaataaacataatgatacagttagttataccccacgggatgcatctcatcagtcagtcagtcatgacaaccaaatctttgaaaagttaaccaagtacaccggattaaatggatttgcaaagtactgaagtactcttgaatctccatgcttgagtaaggaaatatggggctcaattttgaccttatgaagtactagtagcaacaacattagggcctactggctggtggataacgtggaatttggctccaccaatcaaatcattacagaaatattaggacaaagctggggcacacctcactttaaggttcatcaactctggtgtcttctaatgctatcctctggcgattagaatgtttgttattatcaaagccattgcccatgaagagcaatcaaggatcagatgtacacgaatggtttgagtcgccatcactggaataataattcagctcatcatactaatttattttttcagcaaatgacatgtacagtagtgttggatagaagctgagaaggatgtgaaggtgcagggtcccccacgagagctgtttatgctttgatgtggcgatccaacaacatacagtggttgttgcaaattggctggcgtccattgcaatattgcattgcattgcaatgcgacgtatgtgaaattggcaaattgctaggtgcatgtgagattttgtgtttgtgtgtggcttgcaattgaagggcctttcttttcggccagcttatcctccgcaccgcaaatctggttgctcgcttcaatgaatgtcccagcctgcatcaatgtctgtcaaactcacaattcacaactggattgttcaacaacttttcagcaaagattttaaagaacaagtttggtttgcgcagcaggttcagcggcatttagcacaattctgagcagaaagcaaaacgtcaagaaaccaaaactaactaaataacgctgatgcttatctgcagatgtcaataaaatcggtggataataggctaggtgagcgactggagaagcatgaagagggtgagtagggtcagtgtgcctgccactgtaacaccgtgaaatggatggtatctggttggcgtccaatcgggcgtcgcgagcaagcgacactctgaaacgggacggaaggagttggtctcggagacaagaggcatctttttatcttgcaatcgattgatctcctcctattctttttctgttgctagtgactagtgatggcgattgcaatagcaaaacgggatagctagcatctagtactacctctatattccttccccatatcgttcgccagttgttgcttctgggatcatcgcgtggcatctcacgtagtatggtgctactccatccgtgctagtataatataagagattttggttggataagatatgatcttagtacaataaaatcgggatatacctgtctgttcacattcattgtaataggatgtcgtatccaactaaaatctcttatattatgggacggaggtagtagttttcttcttccatcttggagcatcaaagcttggtcgctgacgccagcctgacagtgaagcagtgatgcatgcgtgacaaagattgagatttgataagagaggcctaaactgaactgagatgcagcccacgagggaattaacgggcctcctagtacttatggccctcggcctataaatatatgggccgaatgcttatgggccttcacacggcccatgagtctgctctcgtcgcaaccaaaagtcttcttcttcttccccttcctttcccttctcatccatggctactccagcctagggagtagggagatcgatccacctccgccatgctccttcctactccaccaatccggccatgaccggagctcgccgccatgccgccgcgcgcccgcaccctcctcatgccgcttgcggcggcgacgctcctcgtcgcctccaccatcttcctcttcgccgccaccggcgctcgatggcgacccgccgacaccggcctcccggtccccgccgccgacttctctgcggccgtcctagagagcgcagtgaccgacaccaccgccgccgcgaaggagctctcgttcgttgacgagaatggccgccccgacgatcccgcctccagctcggcggccgccgcgagatgcgacccgacccacgccgccgtcagggtattcatgtacgacttgccgccggagttccacttcggcatcctcggctggtcgccgccgacagatggagccgccgacgccgccatgtggccggatgtcgcagcggcgccgccgccccgcggtaccccggtgggctcaaccagcagcacagcgtcgagtactggctcacgctcgatctcctctcctcctcgtcgccgccgtgcggtgccgccgtcagggtcgccgactcccgcgacgccgacgtggtgttcgtgccgttcttcgcgtccctcagctacaatcgccactccagggttgtgcctccggagaaggtgagcagggacaaggaattgcaggagaagctggtcaggtacctgatggcgcagccggagtggaagaggtcgggtggcgccgaccatgtcattgtcgcacaccacccgaatagtttgctccatgcccggtcagtgctgttccccgtggtgttcgtgctgtctgacttcgggagataccatcctagagtagccagcttggagaaggatgtcattgccccttacaagcatatggctaagacgtttgtgaatgactccgccgggtttgatgaccggccgacattgttatacttccggggagcaattttcaggaaggaggtaacacgattaataactatgcttgctcattcaatctctacaaatgaagttcatactctctgaggtgttaatataacataatgttgacagcgatgtagtgtttagtttctttgctttccttaagtattatattttcattgcaactgctatctaaagtaacaagaactcatcttttgtgccaaggaaaggcttgtagccaaattagacaacaaaccttgagaacttccagggtatagaatgtgtgtttgcaattagttgtttatggtaaattgttgataaagtgtttgtttagctccttttttcccttcaatgatactcttgtgtatgttgttggtcactggggtagtaactgatcaagcacacgtcgtgtctacctgtatcttcctaaattgtatcaaaggcatgcatccctcctgcatgttccctcaaaaagaaaaaaagaatgagaatttgggcaggataggttaatagagggtgggctaactgcttcaagtcaaatggagcttgttggaactgcaagcttttgtctagggctcaaggtagacaagagtagttctgtttgctcaaagtgcagaaatcatgacccattaatgactttggaataaccgaataaatattgctttgactgcaccggtgcagaactcatgattatcaacttcttattgagtatatgactacactagtactctctgatattccaaagatcagcaaattaacaggtgttccaaataaatgatttgtcaaaagtttctgtcaagttagacaagagtagttctgtttgttcaaagttcagtgcttatgatcctttcataaatttggactaagatacgttttgactgcactggtacagaactcatgatctatgatccatttatgaacttcttactgagtatgtctacatgtcaatctccaaaatttcaaagtccatcaaattaacagatgttacaacatatgaatcatcaaaagtttgaatgccgacatatcagcagatgttccctgtttcagccatctggcatcaaataaatttactgtgtcaaaactttttttttgtcagctggatgtgtatccttctttaaaagttaatgttgatacatgtagactttaggttattagtttatctatattatctatatgctacaaaactagcgattcatggactaataaattgcatcatttttgttcagggagggaacattaggcaggagctatattatatgctcaaagatgaaaaggatgtttattttgcctttggaagtgtccaggaccatggggccagtaaagccagtaagggaatgcacgcatcaaaattttgcctaaacattgcaggggacaccccttcttccaatcgcctgtttgacgctatagtaagtcattgcgtccctgttatcatcagtgacgacatcgagcttccttatgaagatgcattggactattcgaagttttctatctttgttcgctcatctgatgctgtaaaaaagggttacttgatgaggctgattagaggagtaagcaagcatcaatggacaaggatgtggaataggctgaaagaagtggataaacattttgagtatcaatacccatcacagaaggatgatgcggtccaaatgatctggcaagcattggctagaaaggtgccagcaatccgcctgaagtcacataggtctagaagattttctagatatgatagaggaaaataaacatggagaagatccattagtctagaagattttcaagatctggcacaggaagaaaataaacaggaaggcggtgtatgcatgttatctagggccttggctaatctaactagcatttcactgacacatccgttgcacacgtctcatggtttcatgaacataatcggacagattagcaaggaacagtgagatgtaaagatatcaggttaattgttggctcatagcttaggttaggctgtccaaccgaagtgtatactggcaggcaaaagattgttgattttgtaacatatactcttaaaagtaaattaaaagagggtggcaaagttctttttctgaacatgatgttgtgaacagcattagacttggtcatatgcgaggttaagccgtcttatgtattgatgagtaatttttgcatttgctgttccttggttagttggtttgatcagctcttgggcatcagttatcgtaccctaggcttacaatagagcacaccgttcggggacgctattgttgaacagaaataaggtccaagaaaagctcagaattcacgggcaaactcttgaacggcattactttcctcctatattctgatagcagcgaaatctgtattacagctctattctaatgagctatctgcaattctgcatgcattaagcatttaagctacctgaatctgcagtttgccgctggcaatcatcaggaaaataagaaccacatgacagttcattaatctcttttaacagggtaaccatttatacatttgatatgaagagaaataacatagttcttattttcagagtacatttgggaacagggaaagcaaagcaggtgatcatacagacaaaatacccaagcttaagctagccttagtcaacctaaaactaaaagggaagtatcgagtcggtgacaaacctagccttagtcaacctaaaactaaaagggaagtatcgagtcggtgacaaacagcgatagatcagcaacaaagaatgaagaagccatcgacaacaactggtagtagaaaagattaaatatgatcttcatgactgcatcagttttcttcaacatactcgccatcttcccgttgttgcaacttcacaccaacgttcagagtcatattcagaagttaccctcctttgcttacacagcagcagcttcatccttgcttaaacctgcccactattaaaatttgtacaaattcaaaagatcacatcaaagtgacagtttttgcactcaaaacaagacttgttatctatatgttccagatatagcaatggaaggccattactccattagaatgatcacataaaggccgtgcatccaacagacggattgtaggcactgttgtagtgctctgcacggcttctaaaaccctacaaacttatgcaatgttgcaaaccaagaaaagatgctgagctgattcaggttgatacaaaaatgcacaagtcaagtcatgagggctttttttttaaactttgaacgtttatttagtcaaaaccacattgtggaagaaaaaccacgattttcaaaaggatcttgcaattagagtccgcatcaaaagttcaaaaccgaggagaaattagagtccacatcagccatgcatagcaaaaaagacatggattttaacagtgcgtcttccaaatttctcaaggacacaagaaaatatttgatttgtatatcattgaagggactgtcctcaaaccatcaaggttccgtttggtccacagaatagaattctgtatatcatcctctttaagctaataattgattgatataaacctacaacatcatcgaaaacatggcatgctaatatacatgacattgaactgaagtggagtgatactgtaatatggacatatttaaaaactaaactacaaaactaggatgaaaacaaggtttcaatgataattaagcaaaattcgatatgcccaaacttacaaagtaagctcaacaagtacaatgctaacatatctatgcacatgttcaattacaaaacatttgtatactatcctaacacattctacacaaacaaaaagcgcttttacatccactattgccaaacaggatctacgaaaccactaacaacccaacgcacattgactaatacgagaacaactaaatgaatagaactccgaataaaaaaatcatcaataaaacaatggcagaaaaaacgcaaaacattgtgatctgtttgttgttttggtgaacccgcgcggccatcatcgcacgcgctccgaccgcgggcagtcgtcatcgctcaccgccggcgagcgccacggataccaaacccgcctctttccccgaacaaagcgcgccaccttcccgccaaccgtacgaggacagcggtggcggcgcgaatgccggagaggcgactccggcagccgcggcgccgccggacggcaagctcagataagatcaagtagtgttcgtgagggtcgaaaccctagctcgccgcctcctcccccacggcctttttacaagcgaaaaacgcgcccaccaaatgggctcgcgaaggcccaactaattctagcccagcccataatggcccactaactatcccccatggcccactagagctaaaccctaatcccctcgctataaaatcgctctctcgaagcgatctctccccttcgccgccgcctctctcccgcaccaagctgcctgagccctagccgccgccgccgccgccgcgcgccaccaccgcaaccatggccgccgcgctcacccgcccgcctccaggcacggtccagtgcttcgggcgcaagaagacggcggtggccgtctcctactgcaagccggggcgcgggctgatcaaggtgaacggcgtcccgatcgagctgatcaggccggagatgctccgcctcaaggcgttcgagcccatcctgctcgcggggcgctcgcgcttcaaggacatcgacatgaggatccgcgtccgcggcggtgggaagacgtcgcagatctacgcgatccgccaggccatcgccaaggccctcgtcgcctactaccagaagtacgtcgacgaggcgtccaagaaggaggtcaaggacatctttgcccgctacgaccgcaccctcctcgtcgccgaccccaggcgctgcgagcccaagaagttcggtggtcgcggcgcccgcgcaaggttccagaagtcgtaccgctgagcgctcgccggaccgattcggagcggtgttctcttttccaccctatcaatggagctacttggcttgttctacatctatctagctactgcattactttcaagtttagtcttttaaaacttagccctgaaccttgcctttttgacattgtgaaatggatgtgattgaaatgtttaagactctactctagtctctggaatatggttttgcctgttacctatgttgagttatatttatgttgttaagatgatccatactgcaagtgttatgctatgttaagatgattctgcgagtagtgttgctgtctgctttggtaccgctactgttatgttgtgattgtgacatgctcatttcaggtagttagggttttcaaattt

SEQ ID NO: 4989 - DNA, 14676 bp, Oryza sativa
cggaatcggcggagccgcggaggcgtcactggcgagtgctggccaaatgggccggcacggtggaactgtagcagggcccaacacggcacgggcacgaaagcccatgggccgtgccgtgactgggccgccaccttggaactcgctgtgcgcctgtgcttgagcagcatagcaaggtcttttagaaaaaaaaaaaaaactagcaaggtgtgtggaaattgaaagtggaatattacgatcagtaagcctaacaaggacaatcaactagacttatgattcggaaccatatgctctctctctctctctcatcatctgctattcacctgggggaccaagtctttctttcggtaccaatgtgattcaagacttgttctatattctgacagaaacacgaagtacagttgcactactgttgacaacaaaaactagtggattgattgcactacgtttttcgcaaacaaaaatgatacttacaccgttccaacggaatagctgacgttctgataatatcaatatgatatctaggtgttctgataatatcaatatgatatctaggtgatctagtctctacgtgtaccacgtttaatactgaagatatcaaatccgatatatataaatatcatactgacgtcatgctacattagttattttcgttggagcggtataataatgccgttttgtagtctcctcttttataatctaatagctcattcgtacaatggttagctataaaaatatactacactattactacccggtcccgcctctcatacacacataacgtcttgaagtctgtgttgtagccggctataaatatgtagcatgcttttttctctcttgtcttttcttctcgatatgtggttatagctggtttatagcttgctattttagagcaagttcaatagtatagccaagtactagctccaattcatctatagccaatctaatagctcattcatacaatagttacatactacacaattaatacatggtcccatctgtcatacacacaccgtgtcttcgagtccgtgctacagctgactacaaatctgtagcccgctacccttctctcttcttatttatcttcttaaaatatgtttgcagctagcttataacctgctattgtatctgctcttacatgctctaacaaagcaacacggaaaccaagtgcgtgcaaattgtccacgtaatgctagctgctaattaatgatcatgcatgtgtgccatcttgaatggtggagaagtgaaagagatatccgaaccaatcgatcaaaacaggcaggaaccggccatttgactcacgtattagttgactctcttcactagagacagtagcgtgttgtatggtgagctcaggaagacatttttttgcttgatttcaccagttgaatcggtgtgatacacgtacgtacgtggctccgttttcgcttcagatttcagcaggtgtagcactgcagtgcagaccatttgtccttgcacttcctcgcactacacgttcgagatgtttactactaccaactgttgaatttcctctctgaagactgtgtgctagactagagtcaggtatttccataatttttgatcaatgattccagccagtattccaagttgcttggacctcaattttgattagcattacatcatcatcattctagacagacaggacagtactgttgtagcagaaagaacttttaaagtttcagaaaatgcatgcctccagtcaaattttcagaaaaagaaggatcaatctagacagacaagacagaaagaactcttaaggtgtgtttaaataaaaaaaatttggccaaaaatataacatcaaatatttagacatatatatggagcattaaatgtggaaaaaaaaaaccaattacacagtttgcatgtaaattgcgagacaaatcttttgagcctaattgcaccatgatttgataatgtgatactacagtaaatatttgctaattataaattaattaggcttaataaattcagcacaaccgtctgacatgtataccagtgaaagtccagccacaatctcttgcatgcatttggagcatgccgtagcatactgtttcagcacaaccgaatgattcagaacatgcactagctgtggcatatttgctactagtaagactatgttatcgaaattaaacagtccaaaacgatttgaggatactactcacatgtgtgcttgacttgacgatgtaggagtgtagtattgtccaacagcacgagctagtcaaaactcaaaagaggagtcaagcaagccgcaaagccaacagcctacaagtacctgacattgacctggtgatgaaaagtctcagcttacacccaaccattttcacatttgccaacaacataaacaaagcaaagaaatgagcttgccaaacctttcctttgttggtttctgtacaagaaaaatgatggattaatgttacatcatttgatttcgaaatattgatgaaactgaaagcgtccatttcattcgtcttgtgcgcttactctgattcatgccaggtcaagatttaattaggttaattaattgcatgtatgatatggactactacaagttagtactgaccgttatatacaaacacggtcaaaattaacctaattaattaaacagatgaattgggaaaaatatatataatgtaatgaatcaatgtttgaattgagcgaaatatcaccatgtactctgtacgtagtttggaacagggcacgcgattctgatctgacgacacatcaaaactatgggcacgagcgtgcgttagcttgcatgcacgcgagatcacacctagtttaattggtcaattttgattcgcaaattctgtacgtccacgtgtacgtacgtacgtaagcacatgttcttaatttgtttgtattgttcaatggtacatgtgtattctccaatcaaattgtacacagttgatgatccgtccatattgtactatctgaggagcgattagatcgtgtttgaaattccagaaacgattagtataggactagctaggatttcagttcattaataattagtaattattaagttaggtacaaataagcatgtacgtagtactatactatttgtagacaactaagaacacatattatcgatcattctctcttttcactcgttaattatctggtgatatcagacctgaatgcaatcatatcgttgttgtcatgttgtggattagtccaacaacataccaaactcttgtaatatgatcacttgaggttgaagcaaaattaaattacgtttcaacacctagctagctaacatgtacagccactcttgttgattaccatgccacatttaatgaggcaactaaaagatcgttttgcttcagaaaaaaatagtttgatgccaaatccccatctatatatgaatttcttttttaaaagatttttctacaagtaaaatatatgattggtccttaaacttgagcggagttgtcacttaggtcaactaaaatttcaaaattgcatgtttaaattcatcatcttggtttaatgaactacgataggtccaaaactcgtttgacgagagcttactgatgacatggcgctccatgtaggcaacaattttgtatccgctctcttccgcatcatagtgtggccccctcttaccccaaagcacccccaaatgctctaaatctctatctccattgtcttctccccgatggctagagttatgacagcgagggtaatgtcgcacactcacttgccactctccctcgcaatcttcgtattaggggagaatgggactgggagggatttggggggattctgtgtagtttgtatgggaggggtccaaaagcaaaattaccgccacggcgccacgctatgacacggtggagggtggatggaaaattattgcctaaatggagcgccacatcattggtcaactttgttcaaacgaggtttggactgttgtggttcattaaattaagatggtagaactgaacatgcaatttttaagtttaggcacatctgctaaagtttaagtattggcaatgtatttccattttcctagataaggttaaaccctgataattttaagaaaaagtaaggtttatacatactaatttttctttttacaaaactcttacaaaggaagatctcaaccatttgatctagccgattggtagttaataaaagtcaaaatgaagtcacaatttgccacgtagtttttataaaaagtttgcaagtttttttttacatgtatcattttcatgtaagaaagagtaaagacagatgagttttttttcatgataatcattttttctctgtaattactattattttctaaatttatttgcatatgaaattttgatgacataatttatcattatatttatattattttattgaacactggtatggtatccaaaccatacctaaaagattcatttcctaagaagaaaaatatcaagggttatttctaaatttatttgaaactaataaaaataagaaaaaagttgtccatatataggccacccccctgtctcccctcaaccgtccgtccatcccctgtcaagttcgccgcgcgcaacactcgcagcagagcatccaccgatcgtcgatgctcaccgccgccatgcacatgctcgactcctccacctcctcctccccttggcttcctcccgacctcatgcctcccccgccgtccgccgccactctccaccgccacttccgcggcgccgccgccgccgccagcaccagccgccgcatcgccaagcgccggccgcgcccgtcgcggcgcctgcccaccacctacatcagcgccgatccggccaacttccgccgcatggtgcaccaggtcaccggcgccgacgacctcccgcctccacctcctccatctctctcgccgacgacgacggagctcctccgccacgccgctccagcgggctcgcccggccctgcaggcgcgctgatgcttcccacgctcgacacctcggcgttcctgctcggccgccgcgcggagccgacggccgcggccgcgccgtgcgacgtgtcggtggcgttggtaggaggagcaggtaatagttacagcaacaacagcagcagtagcagcagcggcaactgtggtggtggcttccccaccttggactcatgggatctcctgtaaatctagatcatatattgtcgatttccgattcttcatggctgtaattaaccaagacaagatcgatgaacaggttggagcatctatctctctgattctctgttcgtgtccttgttaattttaagcttatgcctcatatacacatggacgagtttttttatcagtagtgttattttattgatctaactttaatttggagttccttctcttttaattgaggcgactgttaagttcgttttgctcttccttctgctgtttccagcatcactgcatcagcctcaaggttcttaatttatgcaggatttgattcttgtgaaactcttttgctttgtttgattgattggctcttgcttttccattggttttcagtcttgataaacactccttccaacagtacaactgctccagcaccatctcactgaacatgtggtttctgatcatttggtgaacaaaatgtaacaaaagatgtttttttatattagtacattttagagaggtgcttagtgcattaattcagctttagctatataatcaattaatgcaccaaaccactgtggggggcagtagcatgtaaatgctgcttagacactaagatacgttaggatgaagctaacagttcaattggagcagagcagggttgagaatcagtacttggaaaagattgattgtgagatacaacaataataatatcgtaatcatcgagccaggtttttttttagaaaaataaagtattgcaatcatatatgcacacgcatactaaggttcggcggaagagtaacattttttttttttgaaatctaaggcggaactttgttccacttttatatttagaagaagataattgacccagtttataaagaaaaccggatccgaaaattatacaactgcacggttaattacagaaaaaccgactgaaaaccaccgctacacaactaacaactaactttacattgatctaccagtagcatcgtcagtagaagtgatattaacataattgtactatcaatagttgatgtgatagtataaatagatataattcattgtaaagagtactataaaacacgcagggcggaaaatgaaaggaaaaaaaagaaacaaattgggtgtggaatcaacatgcatgcttaatgggaagaaaaaacaaatttgaagtgtatttgttaaacacatatgtaggcttgatctagagctgagctgtttggtgcttacaagtaaccacctctagattgcccctaaaatacaatgcaaaaagggaagttgacaaggaaaggactatatcaacggagaggaagaatcagaggcacgagctgttgactactgagtctgcgtgtgatttctttctcctcgatttgcagtgtacgtgtgctgtgccatcaacaagtgtggctctggctagcacttagcagcccctggtcctgatgtgatgatggtcaggcagtcggtccaaaccgccaaaagtctgggtccgttcctggacgatgttaacacataggagtacaatacaaaccaacggctgtcctaattacttctcgatgtcgtttaccgtactactaataacttactaataatagtagaattagcatatttttttgtaaattaacaagaaggagaattcatggtccagcatgcagctgccagtcaaaattcgcggctactctaatgagtttgtagttcatagtttcccctccgtcccaaaatacgtacagccatgagtaaccgtgtccaacgtttcaccatccgtcttatttgaaatattttttaaaaaagtcacacataaaatactactatttatattttatcatctaataaaaaggatgaatagccagtttagtccttcaacttttgctcaagggtcgaattagtccttaatgttttataatgtccaaacaagaccctaatgattatcatggagcttaatatagtccttagacccacttaaaacgccacgtggacatgccatgtcattcatgcatgtaagacaacatttaaatgtccattttaatcttcaattttctatcaaataaagaaaagaaaaataagaagaagcaatcataaaacaaagaaaaatgtcaatttttttagctatcaatgctacatatttttgccaatggtcaaaaccagacatttaaatattgaatttgaatgatgtggcatatacacatggcatgtttagaggatctaaggactatattaaatcacacaatgaacttaaggtacttgtttggacaatacgaaatgtcaggaactaaattgatccttacgcgaaagttcaaggatcattttaggtattcaccctaataaaaaatattaattataaaattttttaaataagacgaatggttaaacattagatatgaacggtgtaaaagcacacttatttttatggctacgcagtgagagcgacgagggatggatgttggccgctggccggccacgcaggaggggacaccaccattgcacttgcaacgatcgatgcaattgactgcttggtttgcctcctctccggtctccgctgccgtcctcatcaatgtcttctcacttgttgtttgtttggacccagcatgccttacctctacagtgcatgtgattcctcacagcccacctgacctgacctacctcccgcccccgcgcgcgcgcacacacaaatgcttacatcatcattgcgtcatgctcatgtcataaatgaacattgttacacatcgctgcaacatctttagaaaaatagaaggcagaactgtgttgttcatgctaaacacatcactgtcgggtcagctggatcaacagcaacccttgcttacacaacggagacaggaaggatgcaagcccaagagaaaacaggcaccgactgtgtttgccagacagataaacagagtcagctggcgcacacaaccactgatcacaccgcgttggcaggatgaaacagtacaccactgcttcagataatgacagtttgaacctactcacttgacctactacatataacaatgtacaagatctcaacaccatgcgtttgcaggctcaggcatgccatcacggtgatatggttacttactttgccgccttcagtacagcaataccagtaaggaacacgccctagatatttcactaccaaagaatttctacacctcaactgttaggggcacaaaagagagctatgctcgccgggcatggacgtggagctcattcgttagcaaactgcagctgcgacaagccactgcgtacttctccgtgtcgccaactatatatccgaatctgcctaaacctagaacgaatgcaaagagcaaaaaatattagtactgataaactgatcaatgataaatctaatcaacgagtgaattagaaatgctggaacatttaaacacaacaagaaaatcagattcaaatccaggctgggggtttattgatttattttactactagctatgtggaattacaagacaaaacagtcttgtttgaccttatccatttcttttgccttcagagacactactggttgttcctcacaagaaacaaaagaacaaatggcacctttagaaccaatcaacatcattttaaattgcaaaaggtacaaaaaggtggtttgtgtggctttggggaggtcaagctacaataattccataacaagtccacatggttgttttcaggggtggcagaaaataagtccgggaataagagacactggcaaagagttattgtgcaaggttacaagaacaagtcaaagtgtctcacatggctggtgaaattgaaaacaacaggaaataaaaggatgctcagagacgtacataatgcctactactacgtgtaatgaaatgtagttgatatcacctagatataaatcaggaaataagttatatatatgcactatcgccaatgtacccttgttggaaaagttattaaatcagacactcgcctcaacaaattaatatgggaacctgaagtaaggatatcatataacatgtccatatatataccatcccagattacctatttcacagtaacttctttgtgagctttaaatgatagaatcacgttccacgcaagggctacaaaattagcagcaagaacctggaaaaattaacagtaaggtgagaacagcattcagtcatgctaaagcagacagaaagaagcaaattcagctccagagtacagtattgcactctaaaatattttatgaaatgaaaatgtgaaagatttcaaagacctgaaatttttgtgggacaaagtaaaaattcaagaactgaaagggtatccacaattgccaattcgcaatcactgatgataaccactcctgtaaaattacaattgaaaattagctagcagtaaatgagtgcacatacatattatcagggagcagtggggattatctgcagtactgctgatacagtagcagatactgacgtatggacccggacccacatgtcagccactgctactgcatcagcagtactgcagaggatctgcgatggaaatgagagaatcaatcagaagaggttcatgtcacctgcttgagctttggaactacaagagaaggctttccctccaaggtgacgagtaaactcataaacactccaatgaaaatgggagagaaaatgaactgaaaggaggagataaaaaaaatgtcaaaaaataaatacataaatgcagaaacaagctagaacagaacaagcagcaacactctctctctgggggcagaagggaaagaggaaaaggacatgcacatacctgatcaagtaagaggcgagcaattgcacctgatgcaccattgatcgtcactaatttactcaagtacaagtacctgcatgtggcaacgagtaatgaaacaaacagcactgggcagagaacacatgctatcctaaacctcaataaacattggttgcgattaccagacatgcaatgttggccccaccaggacaagtcccaaaaatgtgaatacaaacgttctcttcaaatctagctttggcactttatcaattgcaagctggagcagtagcaaacaacaatggtaacagtaaatatcttgtaagaaaccgtaacaagataccacaataacaagaacagatgaaatatcaaatattttgcccaatccatggatgcaacccagtaggaatatacattgttttttaataatggaataggacactgttgctggagtaaaatccgttgaggaatcatatgagttacggattagcataggctaaagactgacacagttgagtaaagacaatatattcagattatggttgacgcaagattggataaaaagatatggacctgaaatttgataagaccataatagcctagccagttaagaatttcacatcatgtcatatttagaaaacaaggaaactaaaagagtgcagctaaggcagaaaagaaccataactcggtaaattgatttccaagtggtattagcaatggataacatttcaatgttgttttgaaggaaaattggtatgatttgaccatttgatgctaatacccatctaagcacgcctggcaatgtgctattgcagagtgacaggaagccctctacaagaagagagggagactactggttcattgttcgtcaaccaattaagtagtactaagtaatccactagggttgcaatggatggatgtgaaaatgcgggaagtagaaaacaactgcaagtcacctggcagatgaggtctccggtcagggttaggacggcagaggtaacagccttagtggtgatgggatgcttatcaagagccagcaggtacctgcaaatcatggcgcatttcagtaattttgcatttagatatgagtatggcaaaaagcgaggcaaatgaacatgggcagtgcttggccgcaggaggcaccaggaatcaggaagaggcggaattggacttaccaggctaacaggagacgccaatccattgctccttttgctccaccaccaccagctcctcctccggtggtgactccggcggcggaggcggaatcgcagcaagaggcggcgtggagcttcgagaggcggacgcccttgcgcgggtggacgactgcgattgtcgcggggagcgaggcgaggcgggaaggaagggtgaggcggcgggagtggaggagcggcggcgcggtaggcctcggagtcggaggggtggagcggtgcacgaggaggagcgggagggtggaggccatcgccatgggtggtgcttgcgctgatgctgcaaataactgcaatggtgtgaggaggagcttgggttttgggtcgcactggactagggttctagtagttgcaattttggggagaagatgatgaggtagacgaagatgctagcaatggatgatgggctttgcatatttgggctctcggcttccttgttgggctcttggcccacctacatttatttaggtctaaccttttttttttgcggggatatttaggtctaacctaactgtgcccatctcgccggcgccgcctccattcttctcatcctctccactgcggcgcggcggcgcggcctcttagcgccatttcctcctccacttggaagcagcagaagcggaagcccgtcgcccgcctggctcgagctcaaggccatggagtagtaagtaccaatcccttgctgtccattgctacctacctgtattttagtttgcccctgtatttctgtctctgtatatgtctgattgattgattagcgaagattttcatgtgttctgtcccagtgatgagcagtttagtaatctgagcacttgattcagttcagttggtgctccctccactgcaatatgctgtgaggttgaaggaaccgatcgatcgataattccatgtgcactgttgagaataggcattctgagggacagacatgattcagtttagtttgcttcttcgtattttagattagtgttttaatcttccttttcatttcagtgtgattcttggtgttaaatacttttgctggtggaatggagttggagcctcagtccaggctttggttttccctgatcagatccagtcctaattgcttgtttgtttatcagttatgatcagtcacttactctgatgattcggagggaggatgaataacgatcacaaaacgagatgattgattcatgtgagatccgaacacccatcttgagctgtattttctttcaagttcttgacggtctggaatcctaatgtgctctctttccatgggaaatttttggccatttcagtttcagagcggcaaggagccaaggatgcagcagcactagggtcctagtccaaattgtcagctgggggctcaattgcaatggcggagatggtgaggctgcccgaacagcagcgtcgtaggcctctcaccattgccaacctccctgaagaaattctgtcggagattctgctcctgctaccgccaaaatccatcctccagtgccgtgccgtctgcaaagtctggcgggacgtcacctccgaccgcgccttcctccttccccaccactgccgccagcctccgcagcgcctcctcaccttcatccgcgacgtgggcagtcgccacgatgacctggatatcctggactactgtgttgaagccgttgacttccgcacacaccagttccagtctctggcccggttcactggccaagattacgactgctcactcgaagacagcccattcaccgtccacgcttcttgcgatggtctccttctcatgtcctacaacaactatttgcatctctgcaatcctactacacgtcaatggctttgggtcttcccgccggcgcttcaacatgacaccgtcctggggctctattctcatggccattcttctgaataccgagtattgtattatcgagaaattggtttgggccctgaattctacatcagcattgttggctcagggaaggagaggagcatttggccccattcatcgtcagcatccctgagaaagtggttggcgaaagggaaggaggaaactcagttcaacgagcctttcctgtttcatggaaacctgcactggctgccgcacttaggtggacagaacaagatagtggtgttcgacactctcgatgaggtgtttcggtggttgcatgtacctttcaagatgcacaatatgtcgtcattactcgagattgagggtagccttgccatgtcaaacagccatattggatcatcaaaggtggatctttggcttctgcaagattataagcatatggtatgggtccacaagtatcgaattgaattgccagttatagagattcgccgttttgaagaagatgatggttggtatcttcatattgtttctcaagagggtgatgtcttggttgatggatttgattggcagtttcactacgacataaagggcaatttgctggagaaatttcaatgtagtggccgcatgctgaacattactccacatattctccaagaaagtctcgttccacacgaagtgtgccaaattctaaataatgaaagtagacatgaaccacatttcttcagggggctgtagagcatactttctttaccgtgaggctacttcacacttttgggtgtctattcattggatactgcaattttagcgatggaacttaattttgtagtgaatggtcaatgatctgatgttgcaaagggcagcattcactctgatcagtatttctgtacctccacatgttcatcttcaacattgagggtatcatttctgtactgtacatggaaaattaaatgcctgagactgttttttcctggtttgtggaagtctgagactgaacagttgattatgctcgttgtttatttcaacattgcgagatggttactttttattggcttcttgcagcttaattttgccacttgggttgcgtatataacgctgtggtattgaaaggtcattatctacttgtgttggtgatgcgtatgtctgatgagatccttagtgccatttattttgagtttgttgtgtcttgctggaattgttgggttacattccctgtttgaacaatgaccagtcatgaactgttgtcctagtagtcggtaaggaggtcttacagtgactcaacttgaattatgactgcactttcactgggctgctggaatttcctcaacctttgtgcttgttgcaggaaccgagttaccagcttgatgttatctacggaggcacggagtgatggaatccaacaggaacaggtactattaccatgacgacccagagccagaattgtaacatgcattgtaaacaggagaggaggcagtatagtcaagcagtgtgtgtacatatactcttgtggttgagcgatgcgattcaagcagcggcatgagttgagggaggcatattaaacttattccaatatttaactgggcttacttacggcccaaagactggtccaatcaaaagtgaactatgacgaatgtttctctccccgtagcagcccaggtgcacatgggcccagcaaccgcagccgcagccgcagcggaggcagcactcgcccgccgcgcggccgacccgctgcccgcgctccgccgccgcgacgcgctcccgctcccgctcccggcgcgcctcttcgcgcagctccacggtcttctcctcacaaccggcctcgcgcgccactcccccaactt

SEQ ID NO: 4990 - DNA, 16847 bp, Oryza sativa
acttctcctctcctcgacccgagatttccacccctctgctggttgcttcctcgcatactgcaaagttccggtaataagtcttcttcttcttcttcttcatcatcctcttcctccaccttggggttccaatgtaccatagctttgacaagaggcgtttcgctgctgactcgccgagttgttgattgggatctttcctgtgttcttgaggaaatgaggagggcaataggttcagttgcggtaaaattccaatattgggtagttccggtaattcccttgctccaccatgtgttgcagctgctgctttggctcgtcagattctctagtggctagtgccacccgactgaaatctcatgaattcactgccgaatttacaagttttggccataagttcgcagttgtttccatggctgcaagatcgggttcagtagcactggcgaaaggggcgaaagactcaaaatggaggtaaaatctgtttctttgatctgtataagtttgtgtccggtttggagtccataaagtgagccctcaggttgatatcagattaacatagtacagatgtacggcaaattgtttacttacaacttttgtggtccataaacgtgctttctttattgtacagctgatcactaaaatgagctgagttgtgtagtccctttttctttctttatcactattcacttgtgctttttttaatatatatatagcagtcactcgcatgcattgatccatacaggctctctccccacagaaaaaaagttgagcacattatgtgctatcattgtacttgtgccgtgcttatgagaacatgttcaaaggaagagctcagcttgtgcctgtaaattcagtctggaagctgaaaacaagatggatgagcttctacgggtacagagggagcttctacgatttcagttactgctatccaagcatttccaccgatggagaaatattgacatctaacttgtttcaggcacagtaatagctttgacaggtcaggtaaaatagccagattctagagggagtgaagactgtgcaacgaatgaggtgaaacttaaaagtgagagtgacagctaaagataccaagattgctctccactttccctacaaaacttctctcatggtggtactccaaagcaaagaatcctagaaaaaaagggcgcaagcacagcactgcagcttcctatctcctttatttggtcttccattgcttcttgttgctgaggttgccttcctattgcccccttcccttttccactcttctactaacacttgcttcaggctactgagggctttggcttctcggtgttgtcgctacaggtgagcttggcattctgtgcatttttgcgttctactgctaatctggtcttgtgctaagctccactattagcctcttgtgtggtcataggtggctcctaatttagcttcttgtgtgaatctgatgtccaatctttttctaaatgatctgtaaattcgctttgattttggtctgattagattattttgtttatttctttgttactttcctctcttttatgggttgatagtatacaattatagcccaaaaatactgttgaattcagagatcttcattgtgataactgactgatcatttaaagagatggtgcttttccacctacctgttgaatgttaaaccattacagatgattttttttttgaacatgcaatttctatagatctctaactaaggaagctggaatgtcaccttatttgagcagtttgattgtattgcacattattaaacttgtgtttcaagtataaatcttttttttttcgccgggccggcgtaagatacgcggccgaagtttattaagattgggaagaggttcaaactagtacaacaattacagctgccatggaggctagagctgtacggccgctattgttcaagtataaatctttacttgtttgaatattcaccataatgttatagtgatgaattgcttctctctttcctatttccaggccaacgttttatctgagggtaaaattcaagaagatatatatggcttttggtgcaaatgacattgtgttgcatatcaagagactaatgtattcatctgtcagaattggatatcaatttgcttgtgattaccctatagtactagctgctggcgttttgttgctgtttctacacaggctttgcccttctctattcaacttcttgctgtcttcatctccagtcttcctgttaactgcacttctgcttggagcacttttgagttatggtgaacctgctgttcttgttcttggagagaatcaacaaactttgtcctttaaatccaagatttccattactgactgttcgattgacaaggttgagactgttgctgtcgaggagcacttggataaaacaactaccagtaatgaagtatatgtcagggaaagaaattttgagggtaatatacatgacactcactgggaagagaaaaatggcacctacatgacagttgataccgctctaaatgacgaaatacatacgaaggatggaacttctgattatgatttgcaggatacccaccgtgaaggaaaaggtatcacatcagtggaaactgatactgttccttgtgtggcgccttcaagttttgcctacagtggtgtaactgtggaaactgaagacgttggggagaacagcaagaagaatgatgagctgcaagaacttggaagcatcaatcctgaaagtgataacaataaagtacaatatcaatatcagttaggtgagtttatgagttcatgttgggaacctgttatgagacaggagccacaggatgcttgttctgattctgaatctgatcttactgagagttctcctgatgcatcaatgactgacattattccaatgcttgaagagttgcacccattaatagacttgcaaactggccacccttcattggtctccagagacaacttgaatacttcttcggatgatgatgaagatgatcttgaggaggaggatgctagcacagatgaaaatcaattggaagggaaaatagatgattttgctaactggaaggatgttattgatctaaattacttggatatggacaataatagcaagctggagggtatgatggatctgcaaagagcaaagaacattctgaaatttgaacttgacaggaggttaatggacttgcaagcagctgatgcagtacagaaaatggaggaggcatcacgcttccgtgtgcaggttccctccatttccactggaaggcagaacccatttgattcttcaaatggctcagatgaaataatagagttaccacatgttcctgattcagcaccgtcttgtctccttccacggaaaaatctatttgatctttgcagtcaaccaaaatatggcccacgatagtccattgcaagaaacttggactcctctttcgtacttttcagcaagacggcatagaaagcatggaaacttatatgttaggcactctactagcctgcatcacaatagcttcaaactggagaaagatgaaataagtgaaaatgatgcccataatagtcagtcagactgtgatgccaagcaagaagggaacaacagcaagttatttggttcactggaagcacatataggtgaagaaatcaaaatattaggcgcagcaatttcagatgtgggtgtattagaagtaaattctggaatggatagtggtaaccaaaatgctgatttcagtgatgatatcagtttatctcctatccagaagtctagacaaagcactttcgaagctaaggaagcagtacatgcaggtaaaactgttttttaaccctaagtaatgtattgcaatttgcctactggaaatgataactcaactgaagttgatgtcatgcaggtattgagcaattaacatcgtgctccccttacaaggtaaataattttgaggcacatattgttgaagcagactccattgatgaatttaactcattgtttaagtgccgtatggaggaagtactagtgcaatccatctcagagtccagtatcagtcaacccttgacagttaaacttgaagatgaattgagtgaaccattatcttcagactctgggaccgggacacatttcattgacgggagttcagttgaagattcggatccacaatttgcacagctcaaggatgaagcactggtatctgctacttctaacgcaacatgtcgtaatgagtcaattgaagagaaatcaagtgaagcattactggcaggaaacgaagattattcagaactgccaaatgaactgttaaaatcaggagatccacagtttgcagatagttctgagattcaaatgcaggttattgaggctacaggtcactgaatcatcacaagggcctaaaacaaggccaaacagccaatttctcagagagatctgtaaagcatagatgtcctgtcttagctctctgaacaggtttctgcccccctttgttccaacttactctatggcgtctggatttaactattcctcttcttaatacaaaatgtgcagcaatcatgctgtttttcctccaaaaacttttctcaggaagtccgcaatgtcagaaatatccaaggaacagtggatgtacatatggtttctgcttatttcttctcttttgtttctgcttatttgctttcggttttgggctaataggttagtagataggagagtagatgacattgatatgaaacaccagttgcagttgggtgtgatatccattcagtcaagccggtctttctttcgctgcctatggagtattaatttttcttgtctgccagacaggcattggcaacccctgatcatcactttgtttcagtaaataagatgattggatgtctgtttgcctgttggtaaaccgctggactggagttgcagcttctgcagtttgcttcttcaacagttatcctgtcagtaatcattgagtaatcaagtaatgctttcacagatttttttttaacacctcctcatgctcattatctgcttgctgttggtggtttcattaagaaaatcacagttccttgattaaaaaattcatagtcctttacattacatacatgatgcattgatgcttatgttgggtatactgatctgaatctgaggcgtgctttgttgggataattgaagatacgctactcccctagaaccattttcaggaaatcactcctttagcttgaccttgctaaaatgaattgtttgcatgatactaacaaatagatgaatctttggtgtagaatcgcagtgatgaataaatctattttttttcatctgtttgtagagccatcttacagatgagagcgtggtattcttcgactgttattctgttaaacaaataaaaaaacttaagagtgaagtacatgggcacacctaaacttaagagtgaaataaaaaaacttacagaagacacacctacatctaggttcctgaactcgcaaaatacatttttaggtccctaaacttgtcatgtgtgtcacataagtcctaacggattcaaacccgctccatgcgctgacgtggcattgccacggtggcacctacatgtcgagcatatataaaaaataaaattaaaaaccatattttctcctcgtaggtaaacagaaaaaagaaaaaaaattctaatgtagagaggagaaaatatgtatttttaaaatttttttctatgtgactaacacgtgagtccgactaacacaaagatgctatcgtgacatgccacatcggcacgtggaacgggttagagctcgtttggaccttgatgatatctcaagacaagttcggggactcgaaaatgtattttagtttaggttagggaccgctcatgcatttcactcaaaagttaaatatgtaccgaacatagggtcaaacatttgacaactacccaacacacagaaatatcgttattttcaaaatcacttcaaagttgaccaagacaccttcagcagtacacgggcgccaccaagtttaagctctttcatgtcatatccatgtcttctagctttgaatgggcaatattcagagacacgatacgagccatccccctgatcaaccttgaagaccaatggacagtatttagggatatcataatccgagccatccctatgaacagccttgaagattaaaaacaaaggtgtattctccaccacagcaactacaaacctatccaggtcacatggcttggaaatgacaccatcaaagagccgaatcttttcaggaatttgaccgatataggaatataaagataagcttaagccattgtcatgcacttgtgatatgctaacttgtattgtggcctccactgcttcgtggaaaagggctcgactaatgtcgaccgcatcacaatcaccttcaatccgttgcgtaaacactctatcgggaagcacgaattcgctgcagatgatggcaccatcgatgagctgaaaatcatcgtcttgtgtctctccgttcttgatcttcatgtcaaactcgatgagcacacgaacttggtttccaatgcctctcttggggcctgacattggtatcaatgaattatccgaatcaacgccattgtcttatcccatgatgaaagggtcatccctggtgcggttgaagatgtagttgcgtagcgggtccaaatgatcccggacagcaaagtatccatacaagtgaactgggccatcaacagcagcagtgatattggatagcttgagcgagaatatctgcatcatgaattgcacactgtgcgccttgcaagcccacatgtgtggccggcaattggttgggtttgacagcatcattgcctccatacgagctgaacagccagccatacacgtcagtggatgacagtaagttagattgttaaccccaatattgaaatgagcaggaaagaaacaaatagatacaaataaggtttaaaacagcaaactccgcactatcatggacccaaagcaatatatacaatatactagatggtgcctttaagagttttttgaagtagtacttaaggaatatctagtgttacttagaactagattatgttatgaaaggtctaaatttgacatcaagctagacagatatgttatgaaaaaaaagggtttaatttgacatcagttccatagtactgagcatacacaggaacaaattagatttttttttattattttttttccgtgctgaccaaagacccctcagtccatatttccttacgattgagaatatgtacaaatttacaagtttagaattctgacaagatgatatcgaaactgaatggagtatgccggagcgccctcccaaaaccaaaataaaagggattgcatctctattcttactctcctaagtttttaaagactcctgcttccttccagattacgacctcttctttgattgcacccaagagggaacaaattaggtgatacagcaatatataaaattgaagttaaaagagcgtgaattgaatagcatcgatctgaggtgctaacaagtgaagctaaattgaaagggaactaattaagggcagatgagaggattgtagatgatgcaaagttaaattgaaaaggaagtaattaaggagatgaggattgtaggtgatgcatggtggagaggggaaaaagctagggtttgcaagaagttaaaacttactctctcgggtatcgtcgaccttgtaaaacatgtgccaaaaatcgtcgccgctgtagatcgatccatcgctatgtttgctgcactcgaggatgaacgcgcgattcaccccgtcctggctacctgctgctcgcctcccattcttctccgcttccgcctccgcctccaccagctcaagctcggactctgccgccgcttcgccatgaaatcccctcgcgattcaacccggcctcagcctctctcccttcgatctctctcgttagcttcatcttctccgtcctccacccttgggttttattttgatttttgcggcaacaaatccgaaaccgattcatattagtagtagctttgaaaaaactattatcctctcaaatagcagtagaaaatagagagaataggatatgggctgctttctgggcctggatatgggccgtacttccattttccgttgaggcccatctagacccataaaagatgaagtttcttccctaacctccggcccccgctcccttttcttgtcttctctctttctgtagtctgtatatgtatttttgtgttgatgcaaggtaatagtttattgttttaagttaaacacacaaatacgattttcttattgtttcccacgaagaattgcatatttgtgtagcaccatatctaatttgtatgaacatacaagaatagaaacttgctttcttacaaataacacagtgacgttctttgactgctaaacttacacaacaaataaataagcttaaatatgtgctgaacataggaccaaacatttgccaacaagacaatacacagaagcatcgttattttctgcttagcatagactatgtatcccttgggctgttcaaaatcactccaaagttgaccaagacagcttcaccagtatattggtgcaaccaagtttgagctcttgcatgtcatactcatatccatgtgttctagctttgaacgcacaacatccaggaacatgatctgagccatctctcttgtcaatcttgaagattaaaatcaagggagtattcaccaccacagcaactacaaacctattcagatcacatggcttggaaatgaatccatcgaagagctgaattttttcagggattctactggtataagaatataaagataagctgaagccattgccatgcacttgtgatatgctaacttgtactgtggcctccaccgtactgtggagaagtgcaagacttatgtccaccgcaccacaatcaccctcaatccgttgcgtaaacactctattgggaagcacgaattcgctgcagatgatagcaccatctatgagctgaaaatcatcatctcgtgtctctccattcttgatcttcatgtcaaactcaatgagcacacgagcttggtttccaatgcctctcttggggccaggcattggtatcaaggaattatctgaatcaacaccattgtcttgccccatgatgaaaggatcatctctggtgcggttgaagatgtagttgcgtagcgggtccaaatgatcccgtactgcaaagtatccatacaagtgaactgggccatcaacagtagcagtgatattggataacttgagcgagaatatctgcatcatgaattgttcttcgtgaatattgcaagcccacatgtgtggtcggcaattggttggatttgacagcatcattgcctccttgagagctgaaacgcagtatgtaggagcattttacatcagcggataaagttaaattttaaacccaaattgaaataaaggagaaaacaaacaaatcaagaggacggacagaatattgatacaattaaggttttaaatagcaaacttggcgctgccatggatccaaactcccaaagcgagctatacaatatcgtataaggtggttttaattctattctaattaagaaaggcctaaatttgacatcaaagtagatagatgtgttatgaaaaaaaaagcttaatttgacatcagttccatggtattgagcatacacaggaacaaattaggtgacacatgaatatatagaattgaagttaaaacttaaaaagagcatgaacgagttcacagcatgaggtgctaccgagtgaagttaaattgaaagggaactaactaattaaggagatgagaggatggtagatgatgcatggtggaaaggggaaaaaggtagggtttgcaagaagttaaaacttactctctcgggtatcggcgaccttgtaaaacctgtgccaaaaaatcgtcgccgctgtagatcgatccatcgctatgtttgctgcagtcgaggatcaacgcgcgattcaccccgtcctgactaccagctgctcgcctcccattcttctccgcctccgcctccgcctccgcctcggcctccacctgctcaagctcggactctgcccgccgcttcgccatgaaatcccctcgcgattccacctggcctcaagctcgatctctctcgtttgcttcatcttctccctccttctcccttcggttttatcttgcggcaacaaatccgaaaccgattcgtattgctaccattaaaaagacgaggaaaagaaagaaaaaacgattcttatatcctctcaaataaatactagcagtaaaaatcgatatgggctgatttttgggcaaatatatgggccgtacggccatctaccggtgaggcccatctaggcccataaaagatgagtcttcatccctaacctccggacgactccttgatgctgcgcctcgcgatcgagcggctccagcgctaagtagcctctcccttgtctcacaatcattccatcccccttcctggctaccttgctcgccgggatcaggagtctgctgattgggttgggctgcggacctgcggtggagggattcagggtttctcttgtccctgatccactgcctccacgaccaacaatggaggacaacgttcttgtctcctcgaaaatccatggaaggtgactcccaactcatgcaccttttcctttatttgcttgtgattttaatacgatatggaatctaaacaaaggcccccgcaaaaaataaataaatagagaatctaaagaaaggcatccttacatggcagaattccatcacattatatgcttatattcatttatttgtgtactgttactactaataataatgcaaaataccctctgacatatgtgttattttgctaaaaaaaatagtttcaagaagtcaattctgtgtgctacttaaaacttctgaaagaagtatcattgcatactggcagagcatgcatgatatctttcaccaacattagccagagttactgcccttctttctttttcggcatgcatacctgtagggttgtactgtaatcaaacttgttgaaaaagagagagcatcttacagatgttatgctgaggcagaattcatggttattttcatcaccttgttaatcatgctgattgttggtttcaggagtaaaagcacaacagccaaaaggaattgtataatttgcggacaacgtattagtaagaggagaagaacacaacataattttcagaagataagtcgggggcagcttaatttacagaggacaagaccatgtctgcttaattttcagtctcttcccaaggtatgtcatatcatgacatgaagtcatgaaactctcaactccttttgtgctaggactaggaggctgtattctgatgcttgttcaaaatgcattgtcaggatattgtactaagggtaatgtcaaaattaacattaaaggaagtcgctcagttgagtgttgtgtcaacaaactggagacaggcttggacattccatcctaatctgtactttggtattaaaacagcccttggaaataatgccaagagaaaaggaacaagctctgatctgaactgtagaatatcaagtggtaacaagttcattaaaagggttgatgctattctggaaaaacattgtggaacaatggtaaataagtttgctgttaagtttggtttgtcaaatgagcatgctaaccatgtcaatggctgggttgcgtttgctattgcatcaaaggcaagggttatcattcttgacttctccccagattggaaatcacatgaaaacaaatatgactttccttgtcatattttcgacaaacataatggatcttaccttgaggctcttcggcttgacagtgttactttgaatccacctctagatttctgcggatttgcaaccttaaactgcttgctcttgacaatgttaggttgcaacatttagagcagttaatatcgaaatgccatgttctagagtggttaagcatccaatcatgtaaccagctgcataatttacatgtgtcagaaccattatgccgtctgcaatatttgtcaattcagggttgtcatttacaaagaatggagttacatgctccgaatctcacaacatttgagtacgacggttccctggcattggtaacgctcaatgaatgctccaatatcaaagcatcaaccatcagactttttgatgagaaaaccctccaaaatatattaactggaattccaagtgtattacctcatgttgaaacgttatatgttgaagttcatgtcaaaactcaggtctgattattcttgtactctctatatacatttaattctattttattttctgtttcacatcttgttgtttgaacctatgtgtggcctggtcaccctccagatgtctggatttacacaatcacctctcaagttcactcaattgaagtgtctaactttggaaataacttttgagagaggttcattcgatagaaattcagtcttccagttgactaatcttttcgtagcagctccatttttggaggatctttatttggatgtaagtagctatatcatttgtacttcactacttttattgccttcttccctagccagttacagttcgccttttgtattctcattgaccgattacctcttttttcctatttaatgttatttcgttggtttggaaacccaatcagaataacctgctaagccagtactgtcaatctaattaggaattacctgcttgtccaatgtgccctatgcatgattcatgaactcataagtcccagaaactggaacattcgctgcagactattgatcctttttaacgatcatcagaccatcgaacatagctttggcaaagtaatattgttcggcccggcgaaagtagtattgttcagcattagttggcaactgcatttttttccatttgacagtggactttgtaaattttaatcataattatttgggacatctgtagaagcttttgctatatcgatgtcactgtttaccctgagcatcacatcaccatatttatgcactgtacaagataccaaatagtatgaatcaaggtgataatatgtttggaaaccgattagccatgtgtttccttgattgaatatatttgtatccaaacagagcaaaagcttctttttttctaacaaaatctcagaattccatcccctgcatttgttttgacaagatatatgttcaggctatccttctcttcctcgatcatgaatctttgatcttcttttccctaattattacgtgttagcttgctccttgttagtgatgccataatttcttgcagatgtattgtagcttgaacaggtgccctttggatttggatgacatcgtggatcagcctcactatcatctcaagatggtgtgcatatttggattttgtggcaacacaggccaggttgagctagcaaaatgcattctcagaaatgcgttaatattggagcaaatgatcatcgacccaaaagggagatatcggttggatggatattttgggcgccaggaggcagatgagaagcttgttccagaagatatagatggtgtactcacaattctgtaacttatactccgtacagtagcaaactacagtcacaagttgaagtgttgttccttcaaggcactagtaactaggagtaagttttttttaacagagtttacagagattattcggtactgcaagagttgtggttcactgttcaatacgattatattagtatgtatcccttccgattaaaaatgtttgacatttaggaccatatttagttgcatttttaaaaatctagacatcaataatttgtcaaatgcttagttttcaaaatgatatacgtagatttgtctcataatattataaacttattggattatataaacttattctggtgtaaaatagattgccaaaatttttaaagtgtggccgaagtttgtgctaaacattaaactacttgagaaagtatgcactattcatatgttacaatgagttttaatctccaacccatggaccttttttttttaagcttcaattcaaaggatgccaaaggggtgggagttttaatctccgtcccccaagggactattttttctttccccaagatcgagcttttttttaatgtagttttgtgcaaacacatttggatagttttgaactactagtatatcacatagtaggaaataattgattactatggaagtattcttcacagacaaaaagcttcagttttcacacacatgtacacacacatggattgtttagactagcaatgcatataagaaaaataattacttcctcgaatatgcggatatcttaagttggatatagtagaatactagaatagataaacatctcatcttacgcagataagtgcttctggcagagaagtgcaagataacaaccacattcagacaggatcatataaaaattagagtaaagtccatcaccggtccctaaatttataccgttttgtcatcccggtccctaaactcgtaaatcgaccattcaggtcctcaaacttgttcgactgtgtcatcctagtccctaaacttgcagattactcgtttaggtcctccaacttgttcagttgtgtcaccccggtctctaaacaggacggtctaaaaactttatatcaaaaaataattcataactttttcatgtgaactctaatgaagacaaactttatatcaaaattgtagctctggatgcgacctacaactttgtagttgaaaagtttttgaattaaaactgttggtcccaaaatattgttgcatgtttatagattttgaaattttaattttaaaattacattttgggacaaaaaatgacttaaaataaaaaaaaattcaactataaagttgtagatcgcgtcgagggctataagtttgatataaagtttgtcttcattagaattcacatgaaaaagttatgaattatttttaaatataaagtctttagaccgtcctatttgacccagatgatatttaaatccaagtttagggactagggtgacataactgaacaaattggaggacctaaacgagtgacctgtaagtttagggatcgggatgacacagtcgaacaagtttgaggacttgaacggtcgatttgcgagtttagggaccgggatgacacaacggtaaagtttagagaccggtgatggactttactcaataattaggtacagtatgaggcaccttgagaaaaatcagtgctagaatggaacgttctctttcagatgattacaacctacggagtagcttgtacctaattccgtagtaaacccccataatatttgactctttcattcacattcatcatcgaacccacgctagccatttccttgatcaaattatcacacctactcctgcaggacatagtaaataaagtagcacgttgtcttaaaataatactactccaccttttaatctcataaatgaataaacggagaaatagaaaaaaaatcaggattctgatagaaatgcaagtgcaaagcaggtgattgaaaacacagaaaaagcatataaataaccgtttattggaccgctggaaaaatacagaaattgaataagagagatagacttaaaggaaaattttcaagagattattcatttcataggaatttcaaaggatatgataggatatgatttaatcttttgtttcaaaagcattcataggaaaattttctatatggttgaaatcctccaaagttcttatgtttttcatccaaatcaaaaggaccctaagcatttttagtatttaaaatttgtaacacaatatactttctttattttagaatataagtatttctactatttaaatttcatatacaatataagcatttccaggtactacttcagaattcagatacaccgaaagctaagtattttcagtcacttaggtgattaggaagggggctaagcaattcacaaaatcaaccaatgagacaactgagagggaatatttatcctttagcttactatttactaaataaactaaaaatatgtgtcctttgcagtaagtttaataatactactaccttcaataattgaaacatcatctaccaactcatattacatcaacaatacctaatccatccatctcccctcacatagtctattgaaagccagtcctgtggttggctacaaatctagtccgcttttcttttctcttctctcctctcttcttcacataagtacaaatttaatgtgccaacttttacatcccgctttcgtcactctgtccaatgcataaaaattcatgcattttcaaccaatcaaatgcttgggaggataatctaaataatttaatattttaccactactttaatggaaaggaaatcttcttacttaacctttgtaagatttgctaaacaacctaaaaatactcatattttaggacgtagggagtactattctctcttttttttaatgtatgatgtcgttgatttttgacatgatgtttgaccattcttattattaaaaaaattatgtaaatgtcatttattttgttatgatttttttgtcaccaaagaaatcttaacttatacttttacatatttacattaaaacttttaatatagtcaaacgttatacgaaaaatcaatggtggcatacataaaaaaaatagcactaactatcaatagaaaaaaagatagtgaaattatttaatagtaccagagtatgaacaggatatcgtgagatttatctttaaaagaaaaaaaaagaataccgtcagatgaccttttccgcgtgttgtgtctgtttgttgaagatgaattctaatagctcaagtggacgtccacccgtttattgcatgtcaactagatggttacgaaaaattttcaaaaaaattgacaacatagatcaatatgtaatatatcactccacaaacatgcaagttcaaattcaacttctataagtagtaacgaaaataacaaacaaaactcaaattactatatgtatatttataattaaatttgttatttttgttacaac

SEQ ID NO: 4991 - DNA, 95766 bp, Oryza sativa
tcctgcaccccttccagcattggatatcataacagggatataccacaatgaaatagtgccggccatagcagcgatcttaggatcctggccaagaaaaattaggagtggagtggtgaagaggtatatcgggaggaggaggactgcacaacacaagagaactatccatgaacgttgtagatagatgcccaacatgtggtattgcttggcgccatatgattgcccacacaatgtttccaatgcacttgccatgcctagctgcagtttacaacaatgtgcatttaaggtgagcaatttataatgtgtttttatgcatatatagaagataagattacatctagaaattaattgttagtaaaagtctaaaatataaagaggtcatcattacttgtagtaaggtatcttttgataccaaagtctgtgattgagagcattgatagggagaaagcactgcttatggaaatagtcagatatgatcaactccaaaaacaattcctggctgcttggcataaggtttgcagactaagttaaaggagaagaggaggccattaacttgacaatccaaaattaggcaccgctcatgaaacacttgaacaaattttataacaataaggacttgccttaggtaaaactgatttagaataagtattatgtctacctagtgcctaatttaactatcccaaaagagtccttctggtggaatgatgtttgtaaaacaagcatccactttagaggaattcctagatgtatcttacataagggaactgcctgcaccttctaggaagatatgtggtctcactagccacctccatgcaatgtatatctaaggctatattcctttgcttctaataaggaggcctctgtcaaagtgtttgtatctactgatctggatgataattttaatctgccatcatctcggaaaacatatgatgaggtttctcgatagtcaaacaaactcctaaacttggaattggatcacactgctgatcagtggaagtatatatggggaaacatgaactatgcctttcagaaattcttctatctgatctttaattacatccgtctagcctccacattttatttggttatggaagagtaagtgcacttcaaaagttaaagtttttggattgctacttcttatgaatagattgaacacacgatatatgcgagatcataaaaaattgctccaccaaagtatgacctagtatgtgtgttatgtaatcaaggggtcattgaaacaatgcaacatttgtttcacacgtccattttcatcttcatgttgagcttcaattggatttagttggaataccgtgatgggaacttaaattatgatggctaaggctaaaaaccaatatgtgggttacagcttcatcgataaattcttaacttctgtctagtgtatttggaagataagaaataacttcatcttgagcagaaacctcccaccttttcttccgggagatatctgtttaagactgagctcctccttttaatatttggactaaatgaggagataaagatcaataaaatatattactgtagggcctccctccctgctgtgcttccttaaaaaatatctagatatataaaaacttggcagtctgctattgttccagagctagctaacacagatatcttacgagcttatttgtacttgaagtcatgaagagcacacaagtatataactaatgcataaagacaatgcaatgattaagagggggtggctgaactaagagtccgcttcaaacattaagggatgctttgaattagtcggatggcccctttctaaacaaaaaatacataggtctcacataatttagttcttacagtacgaattgtgtcttttttaaaaaagaaaatttttttatgtgcctctgaatattttggatcccttccgtgacattaaatgttgcctcatctctctgacatgtctgatatttttttccccatcaatacactttccattactttgaccgttagatttttttttctaacatgactatatgcccacactatccatttctcatagactcgcacttatgtacactttaaaatataaatctcaacttgaaaaaaatacagtaaaaatcaaatcgagcaaagtttgagagttatttgatggaaaatttggaaaacaaagtttaaattagtttaaacacaaaatgtaattaaatagtattaagtgtagtgggtagagaggatagttacgaggatgccgccgctgaagcgcatgaggacggtggagacgagagcgtatccggcgagctcggtggcgccgatgtggccgatgaaggcttggctgatgacggtgacgccgaaggtggagaagcgcgcgcagatggaaggacccgccaccacccacagcttcttgctctccaccaacacccgcggccccaacgacccaacctcctcttcatcttcttcttgcttgtcgttgttgctgccttcgccatgagcgtgcttaggctccagcagaggagccgtcctgcagtcatcatgttcatcacccggcctctccatttctcctagcacagcttggcttagctagctgctgctaactttaattgtgcaggaatggagcgaattaattaatgggaataattgcacttgaggggaagaggagctatcagaattgatgaagggaagcaggttaggaaggctctcagctaccgttttaaaggagattgatcaggtagctgggttgatggctggacttggaccagagagttgagtgagcaagtacctgattgtccctgtggctgctacataaggtgggtaggtagtgagggcaaggtgggaaagtagtagtaacactgactcgttaatcatcgatttaggaatcagcattccagacaaaaggaaggaccaataatatagcgagtatgaaattaattaacagtgactgtcgtcatatatactacagaactatcatccatccaggaatctggggttgtgtgtagtgttaaatggctcaatgcaagtggattgtgttatgtacgtatacacaccagggttcgacttaccgccggtaaccgcgcggttaccgtggttaccgggcttaccgcgggggtacggtaatataaataccgcggtaacctccttaaatttaaataaatttaaaaaataatttgaatttttgataaattttgcacggttttgtacggtttttcacggttaccgcggttaccgcgcggtaaccgtgcttactgccggggcgcggtaactctggccccggcgatttgggaaaccccattacacacaaacggcggagcttgcaagcggcgtacagagccagtaattaacttacactataaagccttaagaagttatatatatatatatatatatatatatatatatatatattaagcacatataccatatagtgacacaaattaaacatttatagtatgatagataataaataaagcaatttgtaggttgcaatataataatttattctctataaataataaacgataatataattacaactaaaaaggccatagtagaaataaagtggtataaataccttataaataattgaaactataattcaacaatgaattgaaatcgatagaggcacttctgtgagactgtgacctacgtaccttcaggatccaggaaacacagccgcacaggcagggctgcaggcaccggcagcttggctgatggcgtctcgctccgtcgctcggcgcgtaaggaactagggcattcgcgacttggggttcggcgacgagacgagtagacgacgaagcgacgcgcgctcggcgctccccggcctgggcgctgcgctatgatgtgggctgccgcctgggcccccttccggcctgggcccaggcggttgcacaaccggcctaggcccagggcaggcagcggctacgtacgtcatgtcgccggcccggtctgttcacggcagctatagttgccggacgtacgtgtcacgtgtggctgaccggcatccccgcttggcgcttgcatcctcaactcgtcgtggccaccaaaaccaaatgtaggacttcgttcatttgatgtcaaaaaaaaaaacttactaaaatttaagcaacttgtcaaaattttggcaggatttcttatatgctctagttaccaaaatttagcagtaaactaaatgtagctattttttttttgataactttaccaaaatttagtaaagttgaaaataacatcaaagtgaacaaactgtagagttcctcgtaaatccaacgataccacccaatatgcatctaagaactgggaaatgcatcttgacaaaaaggagatctcgctgcaaggacggcgttacatcattacatgtatgatcaggttaggttgtttatgccctgcagttcaggtaatacccacacaagaattgggtttgaaagtaacactagaaaagaaaagaacaaaataaggggaaggccggccgggggatcaaataacaattgattctttttttctttttttcctttttacatgcgcggtggtgcgtgcgcgtcacaccgccctttgaattttggttatcaaatctgcattctttttgttgtaggacttggtgatttaattaaatcttgaatatgcatgcatggagctgtaatgtataggtctcaccataatctctagagaaaatcccttatatacccctacaattttagctaatcccttctatatctctgaattttgtttacctccttgtatgcatccaaaatttgattttgatcccttctatacctctcccgtcagttgaccgtctaatttctataaaatgacaattttacccttttgatgaacatagaaatttataaattacattattgaaaatgtaaaagcttgctgtatgagactattatagttgtgtgtttattgtgcgatacattatctatgacaaaatttatttttagataatgaaataaaaaatatgtatttattttatttttaaaaaagtcataaaaaattaggagcatccatataaagataggactaccaatgctcacgatatatttttatgaatactccgataaaaaaaatccattgtcctattgaaatttcaaataaaaaattctatttattaaatttgttttattttcaaattttatgtcaaaatttcttgcactaattattttgtctcattagtttcgtaaaatgcacatattgtgcactcaaacaaaattttcaattgcttttcaagcatatattcaaacctaaatcctcaagggcataaaagacatttgcaaccaaacttaatagtgaaataaaggaaaatataacgggaagggcatggaagggatcaaattgaaatttcaggggtagagaagggatcaaataaatttcaaggatatgaaagggtttgagtgagtttttaaggctatacagggaatttactctaatctctgtggagtgcgacacgccatcttctttcgtcaagcaaccaatcgtcctaccgaattggctcatcatctatcacgccttccattcctcgtcaaatcctattaaattaatgcttagattttttttaagaaaatcctattaaatcatcattatcatcaattaattaattaattaatcaatgtgccattaactaagaacgtttaattgttaatatgtctgtccgggacgggagatgatctcacttgattttttacattttaactctttttaaaaacttattttataaatagacacttaaacaaaagacaacttcgacattgggcaaccgcgggcgcaactatgacgtccaaatctgtattagtcccactctatactctgagtaggccttccatgcccttcacatagcactctatttatacctttgttctcgtttctaaaagcattaacctggaggtactatatatgcttgaaatgaactgggtatataagttgacccaaatctatctacactctccatgtggagctcttccaccaaacgaacacttgggtctaaaccggaacaagaagagtcacggaccgaaacagactaaatgggctggattttacactctcactccctcatgggttgatgccctagcaactcaccgctacccaacagccaaatttccaggatatcccctcggtgctacggcattgtgcctatgcgtcgtgtccccctccacgggctaacacacacgcacacttgtgtaacacgggttgaagttctaatattacatgtaacactcgagagacaaaatcaacaatagtccactctacccgctaaatggacccacattcacattacacccaacttacacttttcatcatcacttttatgtaaaaatgttaaccaggaggtactatggttatatacacttccaatagatgttgattaaatgtgctagtatcaatttatgatttaggtgtatatatatcatgtgtctgagctataatatgcatgtttaattgcaaggtagttattgtcgacgtttgatgtcgcgattccggtatttgcatagtatggggatcgttggtactaggatatacgcgagactgaggtaaaagagatggggacgaggatttttatacaggtttggacccctgaattgtcaggtaataaccctatatcctgttggtcgaagccggttgttgctcttattcatcataatcacaccagtacaatatttggggtagcctatctaactgttgtcgacatggcggtctgaaggtctgactcgtagtcgacaacagggtagctttcctcctcgagttcgcatccggcgagatcagagacaacgctatatctctcctgatggtatctgtaggcaccataggggactagccatgcctatctctaaagtcgatatccggcgtcttgtcttggcgtatgttggcttgtatgttgtggtttctgttgttttgtgtatgttgattcttccctctcctcctaggggccttgtatttatacccataggtgtccccttgtccaagtagaactagggaaaccaatatggatacaatccgagtagtccttatcgtttctatgtagaactctggtcatccttccttatgcggaactcctcctatatctgaaggttgtttccgtataagacatggtatgtggtgggtcctgccgagatttagtcaactactattaggtatgtggtatccataaccctgacagttatatgcatttgttttttaaaaaaaaaatcttgcatatgctaattatgtttgtttgattaatgatgtaggagtatacatttttattacttgcttaaagtgcttgttttggttgaagggtagctatatttttaatttgttcctttttgtgaatcttggagatgtcaattgtgtttggttcactattcagtagtatttaatttttgatatgtgtttaagcactaaagtgactatttccttgtagcatagacatatccatttgtttgtttgtgtgaattccataattgttgattgtgctcaattcacaacttagtaggatttattttggtgatgcgtttcagccccaacatggatgtttgattccatactgaaatcttgttatggattgttgaacaattctaatgaaatcgattctcttttgtttttgtatatgttggaataaatataccaacttgatccaatatctcttgatattgaataatttctacccaacctaaaaaatgtggtgtattaattaattacacaaaaaagtgggatatacatttcaaaaatagatgtgtgagattatgttgtggtttatgcatattcttgagtgtgagtgcctcgcttagatttgttggtagccttatacactacgattgttctcaagagtaaggaattgaggttcttcgttttgatatgtagctcatgatttgcaccgcatcgtctgaatttcatgatcaacaaaaacatcttgattttaccttgtttagtgattaggtatgttctaatagcatttcttaaacaacatggcccaccttcgaagggtttgactattagttttattaatcatgaaagggatgaatttcattaatcagaggaaggtttttcacctttgttggtttctacatatctagtgtttttagtcatgtatcatataagatctatattttgcatcattgaggctatgatgccaggactactttattggttttagataagttttatactttggcacaatgtagaaaattccatcatcattcaaccagttactttagagtcaacctactagaatggtttccctggctaatcaaattagtaatacatggattgtggagctgacactttggaatttcgagggattacttttttttttgcattggtggaaataattcgttacagataactccattcagtgtggtcaatttttagtcttcacttatgataaacgatcacaattcttagtgacagtgttcgagccatcaggcattgacaagatgtcaacccactctactcacccttcaaaaaagatgatcattagaactaaaagtgatgaaagggaatgcaactatcacatcagaaaaaatggctcccgccattaaggagaataatggaaccgtaggaaagagaactagaaatgtagattgtcttgtgccttgtggaatatagggttccataaagaagttgtttgaggctaatgttttgaaaagtgataagagaaaatgtgcaggtccttctgttggtaagtctaaggcaacgtcaacaagccatagcaataccaaagatataatattcctctatttctgaaaatgttatatacactaatgtatttattttggcatagcttctcacatttgtttcattcatatagcatgtttaattgcattcttcatttgttccatgcatcaccataagttaggaggccatatgcagtgtcaaagcagtttttaatgtttgacgtggacttttggatatatatttgaccattcacgttattaaaaaacaatgcatagttatcatttattttatgtgatttgcttttatcattataaatacttgaagcatgacttacatttttgcatatgtgcacaaattgttttgaataaaacgaatggtcaatcatatgtccaaaagtcagtggggcgtcaagcattaaaaaccgaattgagtaattgcaaagagacctatatctagtctcttggcttgaggttaagttagtttatttctttcccttatgactgattacgaaagtcatttttgtacgtagttcatacatgttaagagtcctaagtattcacatgatcccccatcaagcttacttttgcacattatagattcctcaagctacatgtcagatgaagatatttgttttagcaagttgacaaagacaccagtactgatttgctttatgtctactaaggtgactccacgtggtaaattttaagttatcccctaaacgcagggttaataaatcacttttgtcgataatttaatgtggttacacttttcagacatttctaaggttctaagacatctatgagtaataccacaaaggcatgtaactgaagtagaaaaccatgctcttcaaagggcaaaagaatttaaaacctaataatcctttttaccgtgtaaataatgatatgttggatttttcatggtaatgttactttcatgtgttcattctcatcccgtattgaactttttttctatgtgcatgaggtattatctaaaaaaatgtggatgacaggattgatcttaacttgcataacggtactgcaactatagtttgagagttttggatgagatctaatttgaatatcccatcttgatgtttgatttttatgtatgtttattgtgaatgtgactgtaccaattgaaaaatcctacaactatataaatcaccaatttgtgatagcacattgtttttatgtcagaaacacaattttgtgtgatagcaaataacttgcaagattttcttggtgatgctagaagaattaacttccagcttctgcattatgaggcacatgtagccttacataactaagtttggtatatctaagtggccgtttggtcttatcgaccaatgattcattgaaattatatattagcgaaaatttaaacagatttttttaataatactatggccctaaagttaaacttctcaaactctttttaatctgctacagattgatatctaaatttaggacttactaggagatattggagacatatggccggtcaacatctccaaggtgatgggacgacagatggtggtgttggaatgagatggcgctgaccacgaccagtttgcgaggagggaggtgactacctcggtggggctatacaggtcccaccacacgtgtcgctgcggggtggggcacaccatctccttcgtcaagcaccccaccgtacccccgaacgggcccagcccacagcacgccttcctcgtctcatcaaatcctatcattatcattaatcaccatcattcattcattaattactgattaattaattatcattaatgactgcttagtaataacgagtcattgatttctgtatcaacgtttaagagtacaacaagagaagccagctataaacacatacttccttcctccgtactcgtaaaagaagtcgtttaggacaatgtttaagtcaaaccttgggaatataaatcataaataactctcaagttgttgagttcgaaaatgtaaaaaatatatgaatagatttgtcttgaaaaatactttcatagaagtatacgtatatcacttttcaataaatatttttatagaaacaagaagtcaaagttatgttttggaaaccgtgtcgttgtccaaaacgacttcctttacgagtatggagggagtattgagaagataaaagagtagagactagagagtagaagcagcaggctacagatttatagccagctatagcacagacttcaagacacaatgtatgtatcacatgtgggaccatgtattaatacggtagtatatgtttatagttaactattttatgaattagctattatagatgatttggagttaggccctgtttagtttccaaaaactttttcccaaaaacatcacatcgaatctttggacatatatatggagcattaaatatagataaaaagaaaaactatttgcacagtttgcatgtaaatcgcgagacgaatcttttgagcctaattagaccatgattaaccataagtgctacagtaacccacatgtactaataacggattaattaggctcaaaagatttgtctcgcggtttccatgcgagttatgaaattagttttttcattcgtgtccgaaaactcctcccaatatccggtcaaacgtccgatgtgacacctaaaaaatttttgtttctccaactaaacaggctcttagtagttggctatactattattaaacttgctccaatcttgtttaccgaatctggcaggatgggtgatgatgtccatgatccccttgtagatgtcgcagaagacgatgtcggcgccgggcagccgcggccgcagcgccgccagccgcgccgccaccctcgcgctgtacccctggacgagctcgttcgcctcctccacgcagctccggccatccacgacgtgcagcccctcccacatcacccgcggcgcgcaccccagcggcgccacccccatcaccgccgtcctcctcgccccggcctcgtacagctcctcgacggcgcgggcgacgcggtcggcgaggaggcgggcgaggccgcggcggccgtgcttgggcgccgacgcgtcggcctccgacccgcgggagagcacgcgcgcgtacgcgtcggtgccgaaggacaggatgaacaccgcgcgcgccgccgccgcgtccgcgtcctgcggcgtcggggcctccagccgcagcagctgcagcgtctcggtggccagccgcagctgctgccccacggcgcccaagcggaagatcgcgccgcgcccgccatcctcgccggcgaagttgacgcccctggccacctccgccgccgtgccgttgagcgtcgagatgaggggcggcggcgggaggcccatcttggcggctgcatcagaaatgattcgaattagagcaattcgtgttcgtggggctcacagttcatcagttgaggaggagctaggtggttggttaccgaggagatcggggaggaggcggtgggcggaggggaagagacaggtgccggaggaggaggtgagggagaggttgatggggagtgtggtggcggcgcagctggcggtggagtcgccgaggacgaagagggcggtggccggcagcgaggccggggcggaggcgacgatgcggagcagcagcagaagcaacagggggaggagcgccatgcctcgggcgttgtggcgccaaccaaacaaacacctcgtcaacttcaaagaggaatcgattgccgatttggagggtatgaattgaatttactaatatattaagggttaaagtgtaattatttcatctcatgacatatttcgaagaggccccctgtaacaaccaaaattactggtctcggtggaatcgcagcggcctgcagatctctcttctccgactcaatcattcgccctgcgctgcacaaggtgagaggaaggaagggaaaaccaattggatctctcaattaatcggggtgtgggagcaagccgcttcaacgcaattacgcaacgccggaggtagtcaggtagttgcgatgccttcctgttcttaatttcgccgttgttttcccctttactgaaatttctttaaactgtcccgaattgttcgatgcattcgcggggaacgaaaattttatgttcttgttcgtagtttcttgggtcaacggctccgtcggctgcagtttgggatttcaatttgggcgccatttatgggtagatttcggtgacatctgatgatagctgttaggtttgtcagcagtcaaccaattggcctgcccgcgagtttgtgcaaattcctttcgtccttttgtttgggcataaatttgatgaatgcccttgccctacattgcttgtagttatgtggaacacgccgagcagaacaatttcatggtcttagtgtactctgatacaagtaatgttttcttcagtttggtgggagatgtcaaactttgtttgctaccactagctatggctgcttggttttgtacctgtatttcatgttgacctagagcatgttttgcttcaccgtgttgtttttttggagttgtaatccacaaatttttgttggtgtcactatctattggttggttggtttcaatataaatttttcaataatctctttggcgttccaatttttcctacataacaggcatgattcatgcaatacactgactgaaaaaataatatggcttcaaaagccattaaaaggaagccttacactgctgatattgatagaagcgaaaaacagatggagacgatcataccagattctgtaagagaacctcttctaggaaacagaactcatgaaagcaaatccgaggttagtgaaatttctccaaatcatatgaatccaggttattaaccgcattttagttcttcatgcgccttaccccttttctcgtactttttttttagagacatgagcctaatatgcagccaaatttatgggatggaaaaggacaagagcgccttggttggatgcatattatatcgacttttattgctcaatctgtaagaaagataggtacctatcatgaatatgattccagagaagtggattttttagtgtcttactgccctctcgaatgtacacagcagaatgcttaaacttgaccttttagaacatttactatctgaaaaatcttctttttttttccaggaaatgcgctctctcagtttggaccattgctagcaaagttctttagtaggtcttgtgcttcccatggttcacatgatgaacaggcagttctacttgatctcagtccactacaggtataatcagtgctggcacatgcagatctcctatttccatttaaaataccatatgattgatgggttaagtttcccatcaaaagcatgaattcttatgagtatcagatgtgacatgttaatttcatgtaaatattttgagatatttcaaaccttttactgaagtatgaaggaaaatatcttttcttcctcagtagtttaagcatttgaatgagttgtttcaagcatactctcgacatctttgatgctcaattcatctttcatttattttttatccttttttacaataataaaagttcttgtttgcttttgtgattattcatggacaaaaatgttggtatatccatgaacaatatcatggtaacatccatgaaacttgttatttcttccacaacactcatttagtagttgaattgcatgctttaaaaattcaaatgaattcttgacttggtttattaattccaacccttctgttctacaggagcaatgatggcatctttatgttattcttgactgtttcaagtttttacatttaggaacttttttacatgatactacggttttgacagttccatgtttactttataggaagagagactgaggttcttgagacaaagattaaatgtgccatttgacagttcctctgtcaagcatcaggttccgcttctgtacctaactacctataggcctttggtattcttgttctattgttctcaccaatgggacaccaattttcttgctcagaagaaatgataaactgaacaattcatatactaacattcatgatagtaaaatatttcattttttctatgacaggatgctctgaaagaactttggagattagcttatcccagccgacaacttcctcctctgaaatcagatctatggaaggagatgggctggcagaattctgatccagcaactgattttaggttcgtttcgctaatccctagtaatgattttaggatatatatatataagctgtcatgcatttatcaacaccgcttgaacctcgacaactaatcttttgaagtatctaatgattgcagagcaggggggttcatgtccttggaaaatttaatatattttgctagaaattacccagtatgtttctattaatcatgaacatttactccgcattagtctgctgttattgggtgattcgattaggtacaatgctcaatgtctgctttaacatgcaggattcctttcacagtttattacacaaggcggatggtaagagatctgaatgggaatatccctttgcagtagctggcgtgaacatatcttatatgttagtgcaaatgttggatctgcaatcaggtgaaatttgcagtaacaccttatctttgggcccaatttacctcctttgctcttgacttcgaaactctcttttttttttcagctctatgcagagctacagcttatctctttcacttcttttgtaggaaaaatgggcacaaaagtcagttctcaatttgttcaactacttagagaagacgagatggcttttgataaccttttctgtatggcctttcagatgcttgacgctcagtggctcacaagacaagctagttatatggaattcaatgtgtgttctctgtagaacatctggtctcttctattggcttctcattctaccaccttattcagttgtcttcatttccatttttcaggaggttctaaagtccatgcgtattcagttagaacaagaacttactatcggaagcatttcttgtgttcaggagatgccatcatttaggttgctaaaaaggtagccatgtttgttgtttacagaaaggagtgtatcttacttgtcagtaggatcttgtgcatactaccgattctttcattggttgtacaacatgacacactgtaagattatttatcatagaataataaacccagtatatatctggtactttggtaagtgttcaatgttttctggggtaacaatttaagtatttctctaatgaaaattacctgcaacaggtttgcttcttgaaacatgtgaaaaatgtaagtaaagtaaatatcttttattaacattcctgatgtttggaatatcaataaaagatgcagcatttatgcattcatgcctcaaccaagatgtatagtatagtttattctgaaagttagatagatttacatattgtgatttctgtataacatatgctccattaccttataaaactgtgaactacccagagttttcttgtgggaatacctatagtactacccaagcattcaagattctgagtaatcagaattaactagctcaatctagggtaagggagaaaattctctccctagttaatcaatcagccttgggggtattacaagaaaaggaacacagacacttgtctcatgccaagttgaatgcctttgggtttctaggagactaggaccatagggagaagcatatgaatcttccccacctgaacagaacgcctacagaagctttgcttctttgtggcagtgccattagacagaaaaatataccccaagataaaaacctgaaaacttccctgtatatctcaagattttcaacacccagaaacacgcacacagagagaatcagttgcacacactgatcattttttgagggcaggagatattgtttgcttgaggagatattcgctccctatctgaaattgaaatgtccttgtctaaaaagtctgaaatgtccttgtctaaaaaatctgaaatgtccttctccaacatattgcattcctcaaacaaattgtattctgccatacctgagttatccatgctgttgccgccttcagttatactggagcacccttcaaataggtactccatgccgccttcgaatgcctcatcattgaaccattcactgaaattcatcgagttgctgaagtaagccccaggcattgtatccaattcataatccaagcaagggctccagaggctttcttcaatgccatcaacaattggaaggggttcattcatgcattcggcgctgtcatcggctgcaagtggctcattgttgtcacttgatgtatttgcttcactggaactgagctcttggactgcattctcacttcggtcatcatcttgaggctcttcatgtaatgctggcaccacctgtggctcttgttgcagttgtgccaataactgtggttcctgttgcagctgtgccagtaactgtggctggtccaggtagcagctgatgtcgaagttggttaccgcattggcacctcggtattcgattgcagcaagatcataggccttggctgcctcctcttgagtatctgtaaaaagaggtacgtttgttgaaatgagaacaaattttctggtgagacactgaatctttggggcaacttagtactactaggagtcatgaatacttctagtaacattggcattacagaattgatcaggtcatgctgtatagatttaagactttagaaaatgaatgcattggatcttaatactgagagatgctgaattgcatcccatattcacattttttttcactttctagtttgacatgtgctggacaccatctgagatctgatatgacttttcccacattgctggttgctagaactgtgctggcaaccttctgtttactagtaatcggtgaacactgttcactctcccttttttctttctttatttgtgatgaaagtagtgatgaatccatctgtgtggttctggatcttgaatcttgatctagtttggcacagggggggtaatagcctagtagggcattctccatgcacgtgaagtgatcacttgcaactggctgctgactcactcagctagctctagtggaaagagccggcagtgatgaacaattgaagatccctatgcaccatctggtttttactactggcattgcagcaccactcacgtgcttgtcacatgcatttccaagtcatgtaccatataatgtatctatgtatactaggattttgtctagtaattaggacatggtggtgatcaagacatggggcttgtttttatgctatttctagggcaagttgggcagtcttctggggattgcatacaggatggtatcttggtctcatggtctttgatcttgacagcaggaaaagattttctgatttttttaagtaaaagaaaaagaagtttcaacactatgcttccatatcagtgatatcaccagctcacttaatttatagtaaaatggagagtttgtggttcaagaacatacaaggagaataatatatactactttctctgttctaaaatataagcatttttagaatagtcctaaatcaacatttttaactttaactattaataatgaaaaattaaaaagagcaatcacgtaagaataatgttactagattatagagtaaatttaataaaactataggtattttgcataatttatcacaaaactacatattaaaaagcttgtctcacaaaactacagatttagtgtctccgtttatcacaaaactacaggtagtttgtacaatctatcacaaaactacgatttaagaactttcacaaaactatagatttagtgtattcgtttatcacaaaactacacatttagtgtcttcatttatcacaaaactacagatttagtgtctccattatcacaaaactacaagttttaacaacgctaaaacttgtagttttgtgataatgaagccattaaacttgtagttttgtgataaatgaagatactaaatctgtagttttgtgaaataagtacttaaatctttagttttgtgatatattgcgcaaagtacctgtagttttgtgaaaaacgaagccactgaatctgtagttttgtaaaacaagttcttaaatctgtagttttgtgatagatcgtgcaaaatatctgcagttttatgaaatttactcaaactagtatcataatatgtaactctttcatttaagataacttgtttttataaatattattggtcaaagtagcatcccgaaaattatattgaaatctaaaactgtctctattttgagacagaggaagtactacctagtaagtaatcctcaagaaaagcaaggggtcaaatctacatcgaagggaaacaagaaaaacacgccatttaatttcgcagatgggttgatcaaccatcataaaatttggtaaaagttaggtggccggcttacagcaggcaaattctccaacaaacaagagcggcttgtaaatgctagtaatcagcatttgattaagttaagtgggctccaagaaagaaagaagagcaaagagcatgaaagattggatgaaagaatacgtaccgaaagtacccaggtagaggtacttgttccccaggacccgccctatccgtgcctcccaccgcccattgtggtgatgcctgaacaaaaccagacaaaaaaaaagttcagaaatgaattactaacagacagctactagctctgaacaaaatggaaacagcaagttggtagcactggcaccacaatacagtaactgatgttggaagcagatttcatcaagaaagagagaagcttaaaacttttgcagttctgacttttcctagatgcatgcatgacattgcacgaaactgacacaagaaagagaccatggggcatccatgcagagcatacacggctggcaaatgacgttgccagctgatgaatgccaccctagctagcaatactatgctgactcatcattcagggagagagagagagagagattaattagagttaattaatcagtagtcctacctggcaacgcctctgtacttggagacacccctggagaaaccgctgctccggcggcggagggaggccaggtactcctccctcgacacaccctccatctccgacctctccttctcatattcctccagctgcaataattcacattatcttcagtaataattcagattacacaagtcgcaattgtctagtggtaagttggcaaacttactgggaaattgagcactgtctcaggaccccagtacttaagagctgcaaggtcatatgcacgagcagctgcttcctcactatcataagcccctaaacaccattaaacattgcactaatgttcagaaacagatcaaacaccaacacaataagtagttatgtaacaactagttgctatatgcctatattcttagggataaactgttttcatattgagacaaaccaaggatgtgacagatcaaacaaacaaaatgtgagattatacaagaacaggaagcaacatgcagcatgaatctgacaaaacagggtgtatagacaactagtttgtgggacttacccaaatagactattgagaggagcatcaagcagcagcagcagatcaaggtcacatgcgcatcacaagggcaaggtcccccaaagataacagcaaaaaagaaaggagataaaaaaagcttaatcagaatgtcagccttaaaaaattcgctccactttatagtaataagctttgtactaatggccgatgtatcaagatccttggcagtatacagaagtacaccaaggaccttgtatgtttcactttttctttcattatagtacattatactgtaaaaatactcaatttcactttctttacagcattttcagataaaattcatgttaaaaatcctaaaaaaaattaggcaactaatgcatgttgcgatcaatgtaccttgcctccctttcttcttgttctgaagtgaagtggagcaattcttgtcccacagatgggcctcaaatctgccagtccaccgatgcctgtttatagacacatgcatgcagcaaatgattccaccgtatattgaatttattaatgattgataaataagcagcattcaagcattagtgtttgctttacaggaggaagaaaaactgaaggagttgaccaccccagcagtaaatgtagatcaaccaactccctacttcccagctaataataattgactcactccaaggggaggagcagcaagaaaaaagattaaaaatgggaattatgagatcaagaaatggatccgatcgatcatgctcgccaacctccaaaagatgaggcatgaaaaggggagcagactcgccacccacaaaacgataaaataactgatgatctctgacatgcaagtgaaaatattcaggaacagattggaaagaagcggctggtaattttgggagcctgaaaggatggaaatgatgcggaattttgggctggaaatcagccattgattaactagcggcaatgcaggatgaattcgcgactgaaatcgagaggggatcagaaagaacagcagaattgggatcagagggatggaagcaactgaacatgcagggacgcatacctggtgactcccctgtagatagaactcctcttgccgccgccgccgccattggaagaaggatcagccacctccttgctctccttcttgggcctcttggccttgccggtgctcttctccgtcctcggcctcgccctcctcttgcagggcatcgacatgggcgaagaggaatcctcggaggaagaggaggaaggagacgacggcgaggatgatgcagatggagaagatgatgcaggatcaggagacgatctcttcgccatgatctctcgcgttggtgcaggtgcaggtgaggaggaggaggagaggcagcgaagtggagcccctgaagttttgtaatttatagcggagggggggaacgaaaggaagtgcagcgcagagatgggttttttgggttgctaatcaccatcatcagcattaactgaagatgacacctctgttttttttgtatttttgtgcgtcagggcctcaagctggccaccatacgagtcaattttgatacacttattcattattttttttcatttcagatatttcctctgtttttatacattattattgatgtaagtgcgcattccgtttgtgcacaagtagtggtcgtattcagatttctttctctttctttatttttgcagatttcggtatacgtgcagacgctcatatacatacgtgtatactcaccttctataaatgcatatgctatctctatgaacacctttgaagattaggcaaggatattggcgtttctgaatagacataattttcaaaggaagcacaccggtaataatatctttgagatttgcgaagatacaggacaattttacatagcatagcagatgacgcactggcaaattaactcaagataacaccttgttttttgtatttttgcgcgtcagggctctgctggacaccgaagattagcaatcaatttcgttgcacttattttaattggtttctttttgagagatttcctctgttttaattatattattaacgagtctccaccaaaaccctggtatatcaaacaggcacaacattgagaacatttcttatgagccttgaaatttggtggggattgttagaataattgggttaggcccaacttataatattaaatctcaaaggcccataataagtgttgaggataataataccacctcaggatttaagcgagaaatatctcaacctaaatagggagttattggaggctccctgttgaccagttgaggtgggggtcggaatgccacacgcgcgcacgcgcgcgcgccgggccgggccgtgggcgagggcgagggcgtggctggcttttgcagccactaacccacgttcccacgattccctccgcaacagcgcttccacgttctttctcctgatagataaggaggccgcgagtccgatccgatatcatcgcttctttcccggtgttagtttctccttctccgcgcctgagttgctctcgcttcctcgcttctgatctcttacgcgcacgagagattggaaggagcagtgcctccgaaaccacaccttcgcctgagatctgcaccgggtaggcgggtgatcaggtttttggggagtgcctcccgcacgactgctcatcaccatgtctggagttgccaccgccactgctggcggaggtggtacgccgccgacaggagctcgatccggagctggtgcgccaggaggtgccgtgaacgacaacaacaacggaggcaattctgcctcaccatccagcggagggagtgcctcccgtacgactgctcatcgccatgtctggagttgccaccgccactgctggcggaggtggtacgccgccgacaggagctggatccggagctggtgcgccaggaggtgccgtgaacgacaacaacaacggaggcaattctgcctcaccatccagcggagggccattctcagggtataatcttctcctcctgctactattgttagcgctatcgctatactatgtgcgctatgttcttgttcctgttctacatgatgcctctagcatgttatcgcgttactgttatgttcctgttcctgacattcatgatgtgcatagtatgctactggttatgtgaagatcaccctacactgcttatgccatgatcattgctttaactttttggattaaaatatgccgattaatgactatatttccaacaatccaaaaacctgataggtcattttcggtagttggctttgctgctgcactgaaaccacatgcttttgatggttcaaactataagagatggaaagcacgtgcactattgtggttgacagcgatgcagtgcttctatgtttcacggggcaaacgaagtgaaccacctctttctcctgaggaagaggctaagttcgaggcttcggattgcctgttccgtggagcattgatcagtgtactcgctgacaacatagtggacgtgtacatgcacatgccttctgggaaggacatgtgggatgcacttgaggccaagttcggagtttctgacgccggcagtgagctgtacgtcatggagcagttctatgactacaagatggtcgatgaccattctgtagtggaacaagctcatgagattcagatgctggctaaggaacttgagaacaacaactgtgagttgccggacaagtttgtggcgggtggcattattgccaaactaccaccttcttggtcggactttgccacttctctaaagcacaagagacaagagttcagtgttcctgatctcattggctctttgggtgttgaggagaaggcgagggcaaaggacgtccggggcaaaaaggttgagggaggttctagtgccaatatggtacagaagaagaaccctcatgcatcccacaacaacaagaaagtcaagcctgatgtcaaacccaaggctgcaaccaattttaagaagaaaggcaagggaaaggcaaagggagactgctttgtgtgtggcaagtctgggcattgggccaaggactgtcctgagcgcaaagataggaagtctgccaacatggtcattagcgaggggggaggaacatcggggtacggtaaaatgttacctacagttctctctgtttatcattcacctgattggtgggtggacactggtgctaatattcatatatgtgctgacatttctctgttttcttcttatcaggtcgggagaggttcctccttgttgatgggaaacgggtcgcttgcggctgttcatggtgttggtacggtcgatctgaagtttacttcgggaaagaccgtgcagctgaagaacgtgcagcatgtccctttaataaagaagaatctagttagcggctctctattgtgtagagaaggttttagacttgtgtttgagtccaataaatgtgtcgtatctaaatatgggacttttgttggaaaatgttatgacagcggaggcttgttccgcttttctttgaatgacatgtgtaataatcataatgctgtgaaccatattagcgagaatgatgagtctaatgtgtggcattcgcgactctgtcatgtgaatttcggttgtatgacgcgcttagctaacatgagtttaattccaaaattcactttggtaaaaggttccaagtgccatacttgtgttcaatcgaaacaacctcgcaagcctcacaaggcatctgaggcgaggaatttggcacctctagaacttgttcattccgatttgtgcgaaatgaacggcgtgttgactaaagggggaaagaaatatttcatgacactgatagatgattgcactagattttgctatgtgtatctattgaaaacaaaggatgaggcattgcattactttaaaatctataaagctgaggtagaaaaccaacttgaaaggaaaatcaaacggttgaggtctgatagaggtggggagtatttttccaatgagtttgcatccttttgcgaagagtttggaattattcatgagatgacgcctccctattcaccccaatcaaatggggtggccgaaagaaagaaccgtactctaactgagatggtgaatgccatgttagacactgcggggctttccaaggaatggtggggtgaggcagttttgactgcgtgtcatgtcctgaataaaattccaatgaagcataaggaagtaacaccattcgaggaataggaaaggaagaaataaaatctctcatacctacgaacatggggctgtttggccaaggtaaatgtacctatagccaaaaagcggaaacttggacaaaaactgttgattgtgtgtttcttggttatgctatccacagtgtgggttatagattcttaatagtaaactctggagtacccgacatgcatgctggtacaattcttgagtccagagatgctacattctttgagaatgaatttcctatgaaatatacacctagcacttctagtaaagaaactgtcatgccccatgagcactttgcaccgatagaacacaatgatcaaacgcctgaggaaaatcctgaggaggacaacattgtagatactcgcaagagtaagagacaaagggttgcaaaatcctttggagatgactacattgtatacctcgtggatgacaccccaagaaccatagaagaggcatattcatctcctgacgctgactactggaaggaagcagtacgcagtgaaatggactcgattatgtctaatggtacttgggaagtggttgagcgtccatatgggtgcaagcccgtaggatgcaaatgggttttcaagaaaaagcttaggcctgatggtacaatcgaaaagtacaaggcaaggcttgtggccaagggttatacccaaaagaaaggcgaggacttcttcgacacatactcaccagttgctcgcttgaccacgattcgagtactacttgctctggcagcctctcatggtcttctcgtccatcagatggacgttaagacagctttcctaaacggagagctggaggaggagatctatatagatcaaccagacgggtatgtactagaaggtcaggagggaatggtgtgtaaactattgaaatccttgtatggcctcaagcaagcacctaagcaatggcatgagaagtttgacaccacgcttacatctgcaggctttgttgtgaacgaagctgacaaatgtgtatactatcgctatggtgggggagaaggggtgatcttgtgcttatatgtcgatgacatactgatctttgggaccagccttaatgtgattgaggaggtcaaagactatctgtccaagagttttgaaatgaaggatttgggagaggctgatgttattcttaacatcaaactacaaagaggagatgagggtgggattacacttgtgcaatcccactatgtggacaaggttttgagtcgctttggatatagtgactgcaagccagctcctactccttatgatcccagcgtgctattaaggaaaaaccgaagaatagcaagggatcagctgagatactctcaaatcattggttcattgatgtacttggctagcgtaacgaggcctgacatctcatttgctgtaagcaagctgagccggtttgtcacaaatccgggagatgatcattggcaagctttggaaagagtaatgcgctatctaaagggcactatgagctatggaattcactataccgggtatccaaaagtactagaagggtatagtgactcaaactggatatctgatgctgatgagataaaagccacaagtggatatgtgttcacacttggaggtggcgctgtttcctggaagtcttgcaagcagaccatcttaacgaggtcaacaatggaagcagaactaacagcactagatactgcgacagttgaggccgagtggcttcgtgaactcctgatggatttgccggtggttgaaaaaccagtgccagctatcctaatgaactgcgataatcaaacagtgattattaaagtgaacagttcaaaggacaacatgaagtcatctagacacatcaagagaagactgaaatctgtcagaaagcagaaaaactccggggtgatagcattggactatgtccaaacggctagaaatctggcatatcagtttaccaaggggctaccacgtaatgtgatagacagtgcatcgagggaaatgggcttgatacccacctaaggttgcataatagtggaaacctgtccattgtgatcggagatcccgtgaatttggatggtgaaacaaactattgtgtgactgagagaagagacccttgaaaagggctcatttttatgatgtgcttctcttctttcctgcatggtaggatggcttatgtcttaatgtgatccgagtggcttttccaagtagagatgttgacctgcagaacatctcagaaggaacacacctatatgagttcaactgctagtcacagtctatgaggtttgggcgatctctagatactcatgaaaggcctggagtttgacttatatgctccaaacagaggggatgcgaacggcagcccagtaccagtcaaggttctgagtgaaacctgatcacacaaaactcacaattcaaggcatagtccattgttcagttgtggtctaatgtagctcatttcctaggtggaagttcaacttaacagtctccaccaaaaccctggtatatcaaacaggcacaacattgagaacatttcttatgagccttgaaatttggtggggattgttagaataattgggctaggcccaacttataatattaaatctcaaaggtccataataagtgttgaggataataataccacctcaggatttaagcgagaaatatcttaacctaaatagggagttattggaggttccctgttgaccagttgaggtgggggtcggaatgccacacgcgcgcgcgccgggccaggccgtgggcgtgggcgtgggcgtggcgtggctggctggcggcgtgcatgcgtcacgtcgctatgcttttgcagccactaacccacgttcccacgattccctccacaacagcgcgtccacgttctttctcgtgatagataaggaggccgcgagtccgatccggtttcatcgcttctttcccggtgttagtttctccttctccgcgcctgagttgctcttgcttcctcgcttctgatctcttgcgcgcacgagagattggaaggagcagtgcctccgaaaccacaccttcgcctgagatctgcaccgggtaggcgggtgatcaggtttttggggagtgcctcccgcacgactgctcatcgccatgtctggagttgccaccgccactgctggcggaggtggtacgccgctgacaggagctcgatccggagctggtgcgccaggaggtgccgtgaacgacaacaacaacggaggcaattctgcctcaccatccagcggagggccattctcagggtataatcttctcctcatgctactgttgttagcgctatcgctatactatgtgcgctatgtgcgcgctatgttcttgttcctgttctacatgatgcctctagcatgttatcgcgttactgttatgttcctgttcctgacattcatgatgcgcataatatgctactggttatgttaagatcaccctacactgcttatgccatgatcattgctttaactttttggattaaaatatgccgattaatgactatatttccaacatggtacacacctgagattctttctggaaggacacaatttccacggagactacaccgagtcactggcaatatttgccgatgttgaactgccttttgcccaagctacacttcatttttacatagcagggtacactaggaagtaaacaagctcataaatgactgcaaattaaacgttactggagatgaaattttttgtctatattgttactgcaagagctttcacctctgattcagatcagttacagacttgcagtgagttgattctacagaaagaggacaagcaacttttaaactagaaatggacggacggacgcctctttgccagggtccttagactgaagaattgaaatgaaggaaggtgcatagcatagcagctacacaaggagacgaatagcatcgggacgtgaaaaagaaacaaacacatgtaacatgtaacactgcaaaatcaaacaaattagcgccatgtgtccaaatggcagagctctgcagccatgcaaaatatgcaattcctcattcagaggaaagcatcctactagccccgcaaccacaacacctgtccccaacattcagagcaacctactgtgtctgtgtgcagtcagtcaattactgtacacaacaagcatctacagtagctaccaatgcagcaaccccctttcgatgaagaatcatcaaacaaacagttcatccttcaaccaggaaaaatattcagcagtcactaatgctgtagtactacgtacagatcatgtgaaacatatgtgttgtgttgcactgtggatgatggtttgatggctgaccgtgatgacctcaatatttgagtaaattagtcatcccaattaagctcccatacctgactgccaaattatttgttttgtagtagatcatactcaccaaaatggtttatcacgagtctgttttctgaccacatttttgtctagacagtctgctgcaagacggtagttgcccagataattaggccatgtttagtttctaaaaactttttcctaaaaccatccaatcgaatcttgacatatacatgtaatattaaatatagataaatttaaaaactaattgcacagttagggagaaaccgcgagacgaatctttggtgcctaattagtccatgattagccataagtgctacagtaacccacatttgctaatgattgattaattaggctcaaaatattcttctcacggtttctagataagttatgaaattagttttttcattcgtgtctaaaatcccttccgacatctgatcaaacgtccgatgtgacactcaaaaaaaaatttcttttcggcccaacctgactgactgtcgattagaccgactgacgtcttctgtcaccaccatgatgtccgtccagcttgttcacattcctcagcagacagacatgcaatcacaacaattaacactaggtttatgtaccatatagtggtccatgatgcagaaatattaatattctcaactctaaattctactacaaaaaaaaagagtgacatgttgcttgtagtacaggcagtacggtttggttgttaaccacgtttctcatctactttgcctgcatttgaggtgctagagtgaagataaatcctaggttgccagattattcaaatattcaatcaagataaaagaaattccaagcttttccatctaacatctccctcattagaccagaaacatgcttgcttgcaagctactccctccgtattttaatatatgacgccgttgactttttgacaaacgtttaaccttttgttttattcaaaaaatttatgtaattatattttattttattgtaacttgatttatcatcaaatgttttttaagcatgacataagtatttttatatttacataaaatttttgaataagacgagtggtcaaacgttgattaaaaagtcaacggcgtcatacattaaaatacggagggagtacctgacaatgcaaccgtccacggactgattgcatatcgtacaaaaatttctgtaacacaaaacagcactagtcaaacctgaagctttcatggaaccaaaccatctctagaatgagcttgcactccaatttgttataatatccaataaagcacacactctctcctggtattactgtagtaatgatcaaatttcaatgttcagaagaaacaccattaaatcatgaattggatttaaaacatgtgtccttccatgtaacatagtcctacagagacagctgccaacagcagtcgatgcaaacttctggttttcatttggtataacttagaaaggatgaaatgtgcaaagatattgcaaatagaaatggatattgtagaatcaaatgcgaactgtttcagagctgtccacaagaatagatataatatttctttataatactaacagattattcccaagtaacaaaacagcatgcagatcacatgagagcaatgcaatgacgaaaaaatcattagtagagataatcctatggatatatatacaatagagcactactaattgcacgttccatttccaccactgcgcactacttgatttttttttctttcaggatcttctgatgttacaaataattattcccaggttaaaaagaaaatagcatgcagatcacatgatatcagtcgatgaccaaaaaaatcacaattagtagatagaatcatatgaacatgtatacatctctagtagtactaattgcacgttgctaatatgaatatcagtcctcccaccatagcgcactagttgatgttttctcagtatcttctaatattacaaataaggagacccccaaaatttaccatgttcttaaatgtcacagtatccataattaagtctgcattcattttctgaaatacatagtcatcatcacaataatttgaccttatctctcttagatctttactgattccccttccaaaacttcttaaatattgttgaacgtcatcgccctcaacagtttttgttggttcatgagtgaaggagaaacaagaacttctgccttttggtgtgtcaaagccatcgagatcatcactggagctatttgtagttcttgaaacgggggtcatcatagtatgactataagtatggcctccagacacatcagatccagttaagctaactgagcactgggtttggttgtcagattcctgggagggcaaaaaatacttgttacagtgtgagaatgatcgttactatccacatcatatacctacttgtctttctactaaaatgctgctggcaaatcaacaagagtatgtaatatgattccatacaacacattaagtacaatgtagattgtagacaattcaggaatatttgagtggataacaataggaatatgaaaatagctacaagatgccaattaatggagagcaaagactgtactatttctgaaccacatagtaaaaaaatttaaatgtttaaaagaatgttgatggaggttgttgggtacttcggttgatattcctaaaaagtacttcatatctcaaaacctcagtgaagtgaaccagcattgatttgctaacctcattatgccaatgacgatcagttggatagtgggtttctgcaatgcttgatccacctttgtcaaaagatgtatttctgttcttttgtgggatgttcacaactgagtttatttgagggtcctccagtgatgagaaatcagtgctatccaatgtcgagatcgatacacattcctcaaaataattcattgcctcttcagccaaatgcttcgatactttcagtcgttctacactactctggtaccacaacatggaaacaaaggtcaattcaaatacaaagaccatctatatttatgagcaactgcacttatcgtatctttaaatttcagaaaactacaactttaatgataaaaccatctatatttactgtagcagcatactccctctgtcccataaagaagtaattcctagattcccaatgcaaaactaaagagatagataaatgaccaaaataccccttattaatagcatattagtattgatggttaggtaggtaaggagtattgaagaaataaactttttcgatttgtgaaccaagtgtgaatgagaaggtagaagttgatttattttgtgacaaagtttgaattccagaagttgatttattttgggacagaacgagtataacgtaaaagttgtagttttgtgataatttttcacgttattgttgcagcaaactgatacttttatcactaaagttacagttttcggaaatttactcttctttaaaactacccttaaaacaagcattgaaaaccaaattcatggtggataacagaatgaccatgtagaaatacacaataccatactttcttatacttataagtcaaaatttaaattttcagctttaaatttggagttgattttagggttttttttcattatagtttattttccagatttttcttttagatcgctagaaacacatatataaaacttttattcatgaattatattccgtttaccaatatgccgtttggccaaacgatggccccgtttacctatagccatggctctagccgatgtcgttgaaatgtgggatgggaccaagctgtcagtcactgtcactaaagacgcttctacctccgttctaaaataagtatagccgtgaaaatccgtgtctaacgtttgaccatccgtcttatttaaaaaatttataagaaaattaaaataagttagtcacacataaagtattattcatgttttatcatctaataacaataaaaatgttaatcataaaaaaaattcaaataagacgaacggtcaaacgtgagacataaacagtgtaaaactccacttattttaggacggagggactactactaaagagaatcccataaaaaatgttatacaaatttacaagctcaaaaaactaaattaaacaaaaaaaagtcaaaataattcatcgtgtcacattcacgtacaaaataaggcgctgaaaattttggtgagcagaaaattaaataactagaccaaaaaaggcaacatatggcacacaaaaagagaagagaactaaattagacaaaaatttagaagaaaattagaggaacacatagctaaattagaaaagaatttagaagagcacaaaattaaattagacaaaagaaaaggagaagagaactaaaatagacaaaaacttagaagaaaataagaggaacacatagctaaattagacaagaatttagaagagcacaaaattaaattagacaaaataaaaagaaagagaaataaaatagacaaaaatttagaagaaaattagaggaacacatagctaaattagactagaatttagaagagcacaaaattaaattagacaaaagaaaaggagaagagaactaaaatagacaaatttagagtggagatgcgggggatcgaaccccgtgcctctcgcatgcaaagcgagcgctctaccatttgagctacatcccctttgatgtttgaaatgaaactaagaaaatcattatgaatagatgtttacttgagcaacagcaaactgtttagtcgcattcggatattcatcaaaaattgctgttctcgttcagaataaagggaacattcaacaaaaatgtttctgctttaacgcaacacaaatggccaagtgaaagtgcatctcatgtttaggctgagtccatcaatcgtgtgtttctaggctcgtggatcaccaatagttctctaggctggccggagtattctagattcgaatttaaacatcaaatttaaatttttacagttgttttactacttcctccatttcacaatgtaagtcattctaacatttcttacattcatatttatgttaatgaatctagacatcaatatgaatatgaaaaatgttagaataacttacattgtgaaacggagggagtaatatattgtagctgcattttctttttttgtaattgtagccggtggtttcggaaaaaaataaccggttattggcaggtaaccatcattgatctgaactcaaatatttagtttgaaagtttgtccgataaaggtttggataaatgatgttcccaaacgccaaatacttattactccctccgtttcaggttctaggacgttttgactttagttaaagtcaaattgctttaagtttgaccaagtttgtagaaaaaaacaatactctctctatttctaaatatttgacgccattgacttttttaaatatgtttaaccgttcgtcttatttaaaaaatttaagtaattattaattcttttcatatcatttgattcattgttaaatatacttatatgtatgcatatagttttacatatttcacaaaaattttgaataaaacgaatggtcaaacatgtgctaaaaagttgacggtgtcaaatatttagaaacggagggagtaacattttcaatccaagaaaaaattattatgaaaatatattcaagtttagtattataaatattactatatttgtctataaacttagtcaaacttatttcaaatttgactttgaccaaagtcaaaacgtattataacctgaaacggagggagtaattattattaaaaaatagttattaccaaatggaaagtatacagatcatatgccatcacaggaagtcaaatcttgatcacacctaaacgcaatgaagtgtgaggttgggcctacacatgtgtccgtgctgggcttgaggtccagcaagcaacacgacggcccaaacaagtcgctgacacctcacgctgtggagtggatccactcaatctgggccacacaagccttatccgacggtagcccagagacccaagggggctcggagtctaaaactccgaaccccctttgtgttttgaggcgcagcggattagcttatctctggctgaatatcatcaaaatttgtatattttccaagactaaagtatctttgtttctagacatgaacacgaaaacaccatgtatgcattagttacaggaatcatgtaaaagaaacatatttgtttgatatttattccctgaaccttcctaaatgataggtgtttcatcatattccagtattccacttgtacaagattggcctatttctaaccacatgcgcatgatctgtgagactgagaccgtatgaacttactgtcggttgcttttctgcatataaattcagtacgtctcctgccgaatgtctagcgttttttcttctagcttgtcaagactctgatgacatatattgttcttatcagtcttcagcttgtctcaaaaacgattcttgccacaaaatgtgtatccatggtgcaaattgtgtaggtaatcataaagctccttgctgacctttagaacattccaattttaagttcagagaccgcagatggttctattcatttcagaaggcccttttgcagtcatacaatgagcatgtgacacaattagaaatgtagacaagttgatttccactcttctaatgtcccatgttccatatgccatctactatggaagtccaagaatgttagaatgattgacaggggctagaaccaacttggaagttaaacctgacaaatggctgatcaaatctgtggacttacgtggattgaagagaggagttggtagtggctgaactttgctagtcaaaaaacgaaaaaacaaaaaagatagtatttgaacatatttaaaacattaacaatagttgctacctcattgtcaaagtttgtggtacagttgcctgtgggaaactttgaaactatgaaaactgcaatgacataataataatagtcatgtactcaagctgtcttcagattcaggtatttggtatgcattgatgtttttttggaatatgaagaaatgcattatccatgtgattccatattgccatctacaatcacagtcaagtagaagcggccatgaacttcgcaatgattgaagagggagcaatgcaaaggctcagcacttcacttggcaattagtttatggtcaaacatgtttacttaggagacagatggtccatggccagcctcttccatgtggacaggcatttttatgtagtactggatgcatcatggcatttccacttggtatgattaaccttggtctgtcctgcactacaccgtcggctgatctttcctcctggtggcgctccgcgcggaaatcaatttctaaacaagaccgtaagacttttgatgctggagttatcttggtgacctggcttatatggaaggaacgcaatgctagaattttcgacaacaaggccattctggcggcgcacttatgtgcagcgatggaagatgagtggaccacttggggtgcagcagggctgctgtgtccactgcaagccggaagcaacctgatggcgagagagcaacattaagccggtggtggtagctccctgctctgtagtacagacgtgctttaatgtctggcaggcagcatcctctgtagcctgaatctgcagcttgcacctttgtaatttgtttcttgtgacttttttcccctatcttaataaacttcggctggcttccgccagcccggcgaaaaaaatgattaactagggcatcccattagtaagaattattcttaacatagtattcaacattgtttcagttttgcaaatatagacctacaattcgaatgtttcagacaaaatgtagattcaatactgaattggataattttattctgaaataagcattgagctgaatatatactatccaaaatcaaaattcaaagaggaaggaaggaaggaaggaattctgaatttctgatgtttttgttaggcttgcccgggtctaaaaacttgattctgaaactgtggacagtgctatctgtgtacgatatgtttgtagccgatcggccgtactctccacgacgaagttagctgctatgctagccgatctgaatctgaagcatgcatcattattgagattcttatacatcctgaatgtactcttgaaaaaaatgaatgtccgatctgctcacatgaccgaacgtattgtatttggttgtttgtatacggccggcctgactgcaactctgcaagagatgctattagtcaaatagaagcatctctcacatggtcggcactcacgcatatatccctagaaagaattatggatcatatgcttaatgtgaagcattttaatggattagatcatctgagacgctcaaggaaaaggagatttttcagtcaaagagaaacagcactattattagcttgtcaatttgaggtctgcaaaacaaaactgaggtctcagggtggcatgttccagacccacttgatgcatggctcctgtcttcttaacaaaatattccacagaagctaaaatttacagggaaatgtgtggcatgttctctgcatgttcccaagtagtggatgcagcgtgcctgcacattgcatctgcatgttactactacaaacaagctagtctgtgtaacacaagttacaagaacaatatatataagccagcattgctcccccttgatgcccaactgccatacacgcacacagtactgcaactaccaccacatcacagttgatcaacaaagcatcatcaccatgaagaagaaggctttgcaccgcatgttcgctgccatcttcttgctccatattctcctcgctgtaactgctgctgcatcaccaaagaccagcaccggcttgttgcgtgacggcaacaacaatgcagtagctgctgttgctgctaggagtagcaggagattgctgctgcagcaacagcagcccagggcagcggcgccgacggcggcaatggctaccaacaccttccgagtcaatggcgttcatcaggcgaacggcgagcccaaggtggagttcgacgccagcatgaagcacaaccccgggaccaacttcaatcccaggcacaattagaagcatccggcccggctaccttctgcttctttctggattctgctctacatttttagttagcaaaagttttgcagatgagttttatcaacttgtagatagttttaacccagctttctttagtacaattaagatcgtgtcgctagttttatcattagttccactacactgctagcttagtagcttgtagcttaatcagctggatgactcacgttctggccgttaggtaagctagcttaatcagttaatctgctgtatccttcaattcaccgagaagaagcaattggagaattaacagcaatttattgtccgtcgttcaaatcagtatgtgaatgatacttgtgggctcttttcggcttcctttttctccccatctgtttcacaggctaatgggctatttcctgtgaccatgctgcctagactggaacaagaatcaacagaaacagcagtctgtaactctgtattcctgatccacaattgctcaggatgcccatatcaaagactcaaagttgtgtgttcatatacctgaagcacccagcaaatatatgttccaactggcttacttttactttgttaagctaggagatttttttttttcaggatttctgaacaaacaataatcttgccacagaggacatggtgtacttgtattcacaatgcagggtacagacttcacctcccctgaattatccactctgagtctgagctaacaacgcagccacatcctcagaatgaatgaaggaaaggaaaacagcaaacttgcatagcaatcattttgaataaaaaattaagtaaacaaataaacttgaatatgacaaatatttgcagttcacaacttcaagtaaggatctatggatatatggcttctctagcaaactaacagagccacaggtaagttctaccattgaggagcccaaaaaagttctttcacttgggcacctctttaagtaacaaatgtaatgccgacatttgtttgcctcaggactaacaataagatctggctatgcaaacaaaagtaaagtctaactaacttcacataatcaagaagagttgaacaaactcctcagaccaaaaggaacagttgtacatcacataagccgcaagcctatcctacaaatcctcccaattcataagcattaatcctgcttcacgatgcaggactcgccaactatcagatcaatcctcagggattattgtttaatatacaaagttagcacaaggtgcttcctttatagcccaacaattgttgtagaatcatcattgccgttgggcagatggagattgctgaacctgcactggtgggaagaacccagcacctggtggttgaaaaaatccagtcgaggtcggcgattgctgtggtgcctgtggagactgctgctgctggggctggctctggttctgagattgtgtaggcagaggcagaggtggaggcacacttagtcttggaaaacctgctgacataatgttgggcaatgggggtggaggtggcgcagagccactcaccatcccaaaaggtcccattccaaacattcctccagtattttgaacaaattgtggcataagtggtaatggaggtggaggtggtggaaatgaaccagctgcttggtttgcttgggttggtggctgtgtgcctccaagagcagctgttgctccaatctgtggttgcacctgcggcagttgcccaaagaatgggggagcactcatgtcactagcatgaatggggttgtcaagcctaggcttcttattgctctcaaagcctggaggtcctgcagaaagatctccagaagtcgaaccactattccttgcttgttcagcagcaagggaagagaaaatggaggagagcaccttctcaggagctgacaaagatgcaagcttatctgccatagctgctgcagtttttttgggctcatcaccaacagcactggatgtggcaggaagtgaggttgctggatgcagtggttgaaactggggaaatatcggcattgctgctgaattctgcatcatggcagctgtttgtcctggtggaagtgtaaccatcagtggactagaactagatcctgcaccattgttcaaggcactaccaagtcgttgttttagttgcatggcatgttcagcctttgctcgagccacctgttaattaaatcagggttagccaaaaatcaatctaaataatttcttgagtagctgctaaaccaccccttcagtggcaggaaagatgctgtggttttaactgagatggtagatagcaatgttaacaaaagccagcggagatggatactacatagggaacagaaatatgtgattggaaatttctaacttaagatgcaatgacacatgtttgcaccatggagttagcaggttagctacatagaacctaggttacaattaataacaatgcatgcgcatgggtatatcactgcaggcatatctttatattagctcgtgcaagggccaccttaaccgtatagcttatgctgtagagatagtcagacctcccaatgtgctggacctaattctcttgaaacagataaagagagaaatgtcatatataagcaaacataagttggaattgagaagcagtctaacaagtaggaaatgacatgttgccttgttatccagagtaggcctcagggttgccatggtaacttttaagaggcaggtttgtgcttgaagcaggatactagatgagccagacatcatctgtgctgcccaagctgaccatggttagtctactacttccatcatagagctgaattgtacagcagattcagcaactatccagtttagaggcttctcttcgtgtcagagcatacaatgtgcatcttatgtgttctcatttttgcttttgtatttcctagctctactcatcctgaacatgtgtgatataaattcatgaatgaatgtcgttgacaaagcaaaactctggttgtgctcacatgccatggactcatggggtcttaggctaggcatcaagaatagagtctagctcaaagcaaatacaaaagcatatggatccatgaaaatgctcagcataattttgaccctaactttccattataattgagtaataacagacatggcataagaaatagaatgatctaacatgtgattctgcagtgaaagatgaagtaatatgcataaaaaaatatatcctacaagcaactgattgcgaagaagctctgactttgcttcctgttataaagaaagaaaaaacataaagctttatgactgtaatagtatgccgtcaaggtagaacatttggaagaaaatataaaaggtgctcaagacctgttcgccgagggcttttcttagtttattgattagggttattctagccatgttgacactttcaagttgctcaatgcactgcttaaggactgtttcctgcccttgaaggtcagaaatcaacgatgatccttgctgaatacctatgaaataaaaaaggagtaaggtgcgcatgttttgatcaagaatcgaagtgaaaggctgaaagcattatagtgtcaaagcatcatttcttcatatctggtctccaactttgtaaatacagaaagtcagggtacaggtttccgattagagtgaaatgcatggtcggtccttaaaattgagcagtggtgtcacttgggtccgtaaacttgaaaattgcgcgtttaggtccatgatcttggtttaatgaagcacaccaggtccaaaccttgtttgaccagggctgaccgacgatgtggcgccccacgtaggcaacaattttgcatccagcctcatccacagcacggagtggcggtaaaattgcatttagctcctgcgagggaggagggatttggggattttggggggtttcggggtggtactgtggctgaaaggggctaactacaattttaccaccacgctgtcctgcaaaaggggggcggatgcaaaattgttgcctatgtggagcgccacgtcggcagtcagcccccagtcaaatgaggttcagacctactgtggttcgttatcatggacgtaaatgtgcaattttcaagtttacggacctaagtaataccaacgctctagtttaaagacccgccatgtattttactctttcagatcattagagctaggagcatttttaataggaaactttgcactacagtattttttactctgtaactcattaaaatatttagtcaaatttgaagtcagcaattgtcaataatcatggcctacaggcctagtgtgcactataaaggactcaaggaactatcacaatgtaaaataattaagctgctggatgtgctccacagaataaggatatgtatgctagaccaccacctatgaaaacaaatgccagaaaattgattttcttccctttatatgccaatgcatgctacaatcacatcattatagtttttttaacataattataaaattatgtacagcaattttctttgtcaacatgctagatcatatttatgtatttgagatgtttgtttagtctagaatttacatggcagatcaacaaaaaaccggaaatactatgtaaattccttttttctcaagtcaagtacatgatggaactagaagtaaaatagcgctggaacaatcatgatgcaatacaggccaaggtatcagaatgcattaagtgccaatctttcgacggtacatatccataacataacagacctattgaagtgagaaaaatgctttaccttgagtacaagcatcatctacatctttatccatcctatccaaaacactaacagcattattgcatttgtttaaagctgtgtcttcatcaaaatgttgatcaagcactgactgatatgctgttacaatcttttctggcatcccgccaacagtaagtttctacatcaaaagacaaaacaacaaaaatatctctatcaaattcatgacaatatactgcatccatccttagcacaagaaaatattttttagcaggtcaagatctggcaacttactcttgttactgtaccagaatctttccgcgcagctttggaaactgaagaggggttagggcttggatttgagctattgacattgttacccattgtatgagtgctaccaccaagaatgtcatttttcagactttcaatacgggttccaaagaccttccgctcatcccaaatatctatctgtaattttaaaaataaagttttttttttactttttgggctatggccttgtgatagagaaaatgaagtaaatagacttttccaatgtaacggaattaagaataacttactaatcttccaactactttctttccatcttctcccccattgacataaaagtctttcaataatccaggaagaaccctccaaaattcattcacaaactcccctcccttgcgtttactattttgcaggatatcatttgacaggtacaggaatgatactttcttatccttatttgcactgttatactgcttctcccatgtatcaacaacctttctggctctctttcggtgaaaaatgcaccaatttgaaagtgctgcttaagaattaaggaataaaaaaggcatgctattgtaatctagatgctattgttaaaaatatgctgtgggaatttggtatcatgactgtgtaaatgatttttacggcattgacatcaaacacaggaaagcaagtggtaagactcgttcagaagatattacatagggattcgagttgctaatatgtaagcaaacggacatgacacaaccatcacataatcccccaccccctttgtagcgtgaatttatggatgcaaatggataaatgctatatatatccttcttcaaatgccaaaaatttgcaatttgcgacttgttttttttacaaccatagggaatctgttatttgtttaattgatgacagtatatgataagccctgacctaactgcttaactgatttagaaatgaagataaatggtcataaaagaatcgaaaaggttgtttattcatttgccagtactacctccgttcaagaatataagaaattttagggttggacacggttattaagaaagtaggtagaattaaatggaggaagattgtgattggatgagaagtggaactaggtgggaaaattgaatggatgattgtgattggttggaaagagaatgttagtgaagaagttgttatatttaatcattcctttgtaattttgtattttctccctctcttccttttgtaaatcttttcttattaattatttaatatagcgcagtaggagcccctcctgctgttccacgtcaaaaaaaaaaaagaagttgttgtattttgggacaaattctgaaggctagaaattgttatattttgggacggatggagtacaacattagtgcaaccaaatattaccacattgtatttcgaacatagattaatggataccatcgtaaaaagcagttccacaaagattgtacaagaagccatcaagagaccaaaaaaagtagaactagcatatcagtaccctgatagcagcaaccaaaaggaaacaaagtatgtgatatatgattgattctacccattagtttgtaaattgaacaggaaaacagctatattcaaatccacaagagaacactactacaatgtgatacaaacctaacgctccttatcattactccctctgtttcatattataagtcgtttgacttttttcttagttaaacttctttatatttgaccaaatttatagtaaaaatgagcaacattgaaaacacctaactagtttaattaaatttaacattgagtatattgagtatattttcataatttgttgttttgtattaaaaatgttagtatatttttttataaacttggtcaaatttaaagaagtttgactaagaaaaaaagtcaaatgacttataatatgaaatggagggagtattagtcaatttcaaaatataatcatcctcaaaagacatagaaaaacataatttttcacaacaaacaaaaaattattacacatcaaacagaagaatagaagatattactaattgtaacacaacagcttaacaaatcgtgccattatttgtcatttttcaaaagataatcatcctcaaaagacagtgaaaacttattttcccaagaaacaaaaacaaaaggaaagcatgtattgatagtaagaacacatcaagccaaaattgtaatataaatttgattgccaatagcccaatacaccgtaatgctgataagaactacaaatattttagcgaggttaatttatatatacagctataattgaaaataatataggaaaatatgcccaaaagaatgatccagaagctagagaaaaaatggccacactaagttatatttgtatcatcgtacacatcaataagtattgataagtaaaacattagatgcagtctaactctagcagcaataagcacagctaggaacaggtgaaggtgaatattaaccaaacaaacagtgcaagagccaatatatggaacgccaaggagataagctgtgtcagttgtactaatccacattgcaatttagggttctattcaacttgaacagtaaatcaatcaaaactaccagacagataatataagcaaccaaagtaagtactatcctaatagcactagcataccactacgctaatagcaccaaccaaaaggaaccaaagtatgtggcaatatgatcagttatgctcattaatttgcaaattgaacaggtaaaatattccattctaatgtacaagaaacctgtataagtactaagtagaccacctagaaaatattagtaaaatgtaacacaaagcctgaatgttccttatcatcatttttcggtttctagacacagtcatcctcaataggcattgaaaaacattgtatttctcaataaacaaaagatcattacatatcaaacagaaagatactactccatcaaaaaaaacgaattccaagctacgaacctggacacacaggtgtccaggttcgtaggtaggattggtcttttttttaggacagagggggtactattcacataatacctaacagttcatgccattacttgtcatttttgtaaagataatcatcctcaaaggatggtgaaaaacatattttcccaagaaacaaaaaagaatggaaagcatgtatacagtaagaatgcatcaaacagaaattattatacaaattttcattgctgatacaccataatgctgataagaaatccaaatcttgtagccatgcacatctatatacacttatacagctataactcaaaacagtatatcaaaatatgcccaaaagaatgatccggaagctacagaaacaattgccacactaagttatatccatatgcatcaatacataaaccacgagatgctgtctaacagtaataagcacagttaggaacataagaaggtgaatactaaccaaacaaacagcgcaagaaccaatatatggaacggcaaggagatatcctaggtcagttgtactaatccacattgcaatttagggttctattcatctggaacagtaaatcaatcaaaaccacgagacagataaggtacgagcgctaccaaatttgcaagcgcacaagaaataaacaaccggaagaaaggatactctggatcctagtcgccgtgttgttgagcttgttaagcttctcaacaaacgcctgctcgctgaacgagccagagccgccgccgccgccgccgatagtttccgcctttgcctccgccttggtgtccgccatcacgaaggcgaaggctccaccaccgaactcctccccctcgcgaacaagctaatcccccgaagaaacttgtacttcttggccggccaagatcgaaccaatcctaaatccccccctaaaaaaggcgagaaaatcaggaatttggaggcgagagattgaagcttggggaggttttgggagggagagtgacgcgtaccccggtggcgagctcgtcagcttgaattcgccgccggtgaacgacgggaagggggcggcgaggccggggtgggcggggaaggggaggacgagagggtttggtttttttttcccctttccgtgctgcgtgtgttcgctgcaacctgcaagcctcttgggttcaacaagcaagggtgagggtttttcacatcagaacatgagagggtgaaaaaaaactgaagataatgttattggattggaattttatcaaagatagctataaaaataaattaaatatataatactattggttttattcatgtgagatttgaaaacgtgtatacaaatatgctatacttttttctattaatatacatacgttaaaacgtgttatttgtttagcgtacaatgcgggctatattaaatatagccataacatttatcgcttgaattatacatatcgcttttggtgatatccttacacatttaatgttatgataagcctcgttcatttattttttccaaataatactcgctacatccctccgttccaaaatataaggtatttgggctggatcggacacattctaatactataaatctgaatttaagattcatagtcatagaatgtatcacatccaatcaaaatcctttatatgttgggacggagagaatatattttagcaacatattaggttgcactttagccctaatgcttatgtataatcacatccaatctctccctcagtaatgatgtaacttgcacgtaaataggagagatcgtcctcatgaggttgttgatgtgccacaaagagagtttgaatagtccaaagtgtaacaaaacaaaaaaaatagatgatccaaagtgaaaaaaaaatcagataaaagtgctccaaagtgaaacttcgataacataggggactaaagtgaaattcactcaataaaaccatgatcacataacatgtgcattaaaaaatatctttacactttttacaaatattataatcaaatgtattagtaaaatggacgatatactcgtagctagaatagtatgaaacattttaccccgaaacatggagggcatgaaaataaattgtaaaatttaggattttgtgttacagatggctcaagacctcacgttttatgaaatttactcattttataatttgaggtactttaaatataacatatttctactatgtttttaagatggatggtcaaccgttatgctaagtgtaatatcatcgtatattaagaggatgtacataaaaaattaaagggaaagaaaagggaaaccaatggtactacagtccatttaactccattcctcatttcccaagtacagaaaactacaatttggtaccaagcggatccgaagagataaactttttatctactactaccgttttataatataagtcattctagcattttccacattcatattcatgttaatgaatttagacatatatatctatctagatttattaatatcaatgtgaatataaaaaatgctagaatgacttacattgtgaaatggaggaagtagatagatacagaaaagaaaaaaaaagaaactaaatatactcgcttgtacattgaagcgctgctagatgttgctccgtagcgctcaatgtggggagcttcaccctgacgagtcgtgaagaagcagagaagattatggttggaacgccatctccatctccatctgcaccagttgctgtttcaaggcggtacagcttctggccagcggcgaagttgccaagcagctggtaggaggtcgcggagccatccatggtgaggcagagatcgtcggtgcacgccgcgagctccttttgtgtgcggtagatgaagttgagcgccgcggcgacctcctcctcgaagcgggagaaggggctcgtggtgtcgtcgtcgtcgtcgaggcgcagcttgcggagcttgcagaggccttccccgagctccatcatggcgccacggtggttctgtgtttgtgcacgatcatgtctaatcacgaattttacagaagtgtttactgattactatgcatagttaaatgtggaaataatgagacgatgaaaatatatatacttggttgaagaggtggtggaaggcgacggcgcactggaggatggcgtggagcagcgtccgggtgggctcctcggcggtgtaccagagctcctccaccacgtcgtggcacgcgtggaactcgccgccgttgaacagcgccaccgccgcgtcgaagctcccacctatgacttccgactcctcctcctcatctccttcttcatcggcatagttctcgtagaagtcgtagtcaccccgcgctgtgaggaggcggcggcggcagcggaggtcacgacgagaggaggatcggcgctgcgggtggtggagcggtggctgtgggcggagcaagaggccgcccgccggcaacagtatccgcggtgcggtgggcgtgcgctgctgcggcagtagccgggcggcgtgcagcgaagcggcggagcggcagggcgccagcgccggcgccataggaattcaacggagattgctctgcttttgtccggtgaacgaatcgcgcgcgtgtgatgtagtagcgtaggaggacgtgtggactcaaccagaggtgagccgttgagacactcgtgcatgcagaaccaatcaatggagtgagtcaaagtgtcaaacccacaaaaatatctaactacaggcccaataagcaacagcccatctggcctagccagttttcccagcgtttcgggtttggaataagtctattctaaaccctcctgtcgggcaatttaattgacgtccctaaaccacggaacccgaaatctttctccctaaactatacgaaaccatttgaatcaaatcctataacaatatggaggattgttttagcttatgtggcaccctagtcaaaaaaaaaaagtagaacccacatgcaagtggccttcaacctccacacatccctcaattccctatccgtccacctcttccctctcttcaccagagcgcactgccagggagagagggtgatggctggtgcacccgtccgtggaggcggcagcaacggtgggaaggaaattggcgatgagggccggcctttgatgggcgaccggtgggcagtcacgccgagcgtgaagcccttccttgcctcctccaacgccgacgaagagggagatggcgttgtggtgacaacaccaacgatggtggatctgcctcctcgcccacccatgtcttagcttccattttcccgcactatcagagctcgggccgtctccgccgctagagagatagaaagatagaggtaggagagacccttgcctcatgcaacattgctgaacaaggagatggcggcggcggtagcgacggcgacgagatgatggcggatccacctccctgcccacccacatcttgcttccgtctccctgtgctgcagggagctcagtcaaatgtacgcacgtgctaggggaagcgtgtacggtccactctcgctgcactcgatggcctcaacctcgatctccgccctcaatacccccacttcctcactgtgtgtacccctgggacattgagagcaccacgacacggtgagttcaagggaaaagtaagatgccacacaccatagtctgcttcactgtcaactctctgtctattggcctacctccaccaccaccgttaccatgaaaccaagagctatatcgctcgttgacctcctagatgatatcgtcgtcgacatcctcacccggttccccgaccacttatgcctgtgccgcgccatgtgcagatcctagcgcaccctcatctccaagttgtgctgataagtgggtctggatatttgccatataagcgaaaacaaaggaaaaaaaaggtctatactgttatgggatgtaagttatatagtttaggggtaaagatttatgggtatgggaataagggatgccaatcaacttgacgtaaagttaagggatggttggacttatttctttcgcgttttccttgggtttgacaatgggctacattgcaaatactcgggccgacccacccaacaagatctgccggtaatatacatgggcttaattctcaccaacagcgacgggtgggctcgatttcgtgggccttgtatttggcccgcacacaccaacctgtcctgtcctgccgtcctgcgccgctgcgctgccaatctcttcttctcttcccgcgtctccttcgcctcttcccgccaatcgccaaatttcccccatctcacctcgctccgtagccttctatcccaaaacttccttctgctcttgctaggctagggtttcttccttcctctacctctcatccacagattacgagatcgatccagcagcaggggcaagtcagtcgagtggagagcgatggcgccgctctcgtggcgccaccacacgctgttgcaggcgctgctctcccgcgggcccctctcggagcgcgacttccacgccctcttctccgccatctccggcggcaagaaccccggtatatgcttctgcctgctccgcttgctactctcatctttctcctgctgttcgccagcgcttgtctcattactcgtagcacaggtgttcgacgtaatgcccctttaggaattactatcatctcaaatggaaacaatcttagtttgtcccaatcttctctcagtttcagataatttctgcttcatttcaccattgacgcctggttttattacctaatattgttcacaaatcataaaaatactatgcgtgattttatataatttccggcctaaggggtgttaatattcccataattgaacaaaatggtttgcgaccattcatgttctgtatcactgcttgcagccactcatcggcatctgttcaatgatacactcctcaagatcaacaaggagctcgcatacttgcagtttgagttaagagcaggcataaaccagtatgatggtactgtgtattatggagtggtcaataacattgctgatgaagagtcaaagcttggatcaaagttttctgtgccacagattgcattctacaagggattggtatgcaatcactttgccttttttttggttaatccagctcaatctagtattcgctatattcatgtaattgtactggcagttggaagcaatagttcatgaagctggaaatgatgggagcataacaaatatcgatgctcttaacacacggattgagaaccaggtatctcgtactagtaatacccagtcactatgagagcttttgtttctgtttaagcaaatgttttatatttgtattgttgcaaacttttatggtagtgtgacgaattatttggtgttctgctcccaggttgtaattgcagacgcttcacagggcagtcaatcccgtctgcctacttccattaccaacttctcattgtcccaaaaggagaaaactcttaatgaactcatacaggatcgttggctgtcatacactcccacaggaaagattggtcttggcatacgatcatttcttgatctccgaagttggttacgtagtaatgatatcccatcatgtgaggtctgcaatgaagcttgcataaaggtgcagatatgtgattacgaattacgattctacatttgcatttatcttgttacccatggtcatatactccactaatgtcattccctgtatttctattacttatttaaaacaggcatcatcttgtcctaatgagggatgcaatgtaaggattcacgtgtactgtttgaagaagaaattttctcagagaaaggtagttacctatttttaattccactttacacatatgaacaggagtggctttctaaattgtttgtgtatgtaggcctcgagagcttgtggttgtggtactgaatggcctcggttggagggtgaagatgacggtgctgaggatgttaacgaacctgaggaagatcaggtcccatcagccaaccagcattcgaggactagacgcagaggagtcaaatctgaactggtggaagaaaatgaaagagcaggcccatcagcgaggatgacaaggaggagtttgagaagctctaaagcggaagcagttgaggctgctcaagaggtgccatctgcagcaggaccttcgcagtcaaccagggcatctaagagaagaaagaactaatgagattgatttgtgcttgctagtgatatatccaggttccttttgtcatgtacagacagtagcagtaggtaatccttttgaagtggcaggcaaaattgcaacttctagttggagaggaatatatagctttaggatgctcttgttactaactcttagaacgtattagaagcttaatgctttcatttggcaaagcaagcctgcttgtgacagcccagttaactgtttgaatagctctcttgcttggtgatgctagtttcatgcatgctgtttttatcctctatgttgcttgtttctttcggccccatcttttcggttatgcttatgcttatcagccaaaaattgaattttcaaccttaaatttggagttgattttggggtttttctcatcaaagtttatttttcagcatttgcttttagatcagaacacatatataaaagttttattcacaaattatttttcgtttgcaaatatgccgtttcgcttattggggacttttgtgtctcttattaaaagggacaatttaaagctcagcacagccagcattgtgtggttgctgactggtataaacactgaatggaaggttgcctaggagtcaggaggaaaacccaaaaatagagaaaaaaaacagagtggatccggcaaaaaagagaaaaaactgagtgaggttagtttcagggttgagaatatcctgaacaagggcagccaagtcacaagtatttttgtttatatcattatatgagtgtgaagatgaagatgatcctcacccagctgacttaactatagatgatggagaacagcttgttgagtcctggacttacttgcttgacgtattctacttgttcttttcatttttctctttttgagggcgtattctgcttgctgatgcagctatggtactctattcgcgaacataggcagcttgcatgaggtacggtccaactcggagaaaagaaagaaaaatagaagaagaaaagatggctgctattattttactagatgtgtgtttcttgcatgcatcattcaggtcctgcagatttaccatattactatatagctaaccaccccgctggaaattcctagtatgttgacatgcacacagctagttgcacgaacaaactgaagttgggcagtcgccatctagacaaaatcaggggatgactgagttcaggcgaaagcaaccatggcgacaattggtgaaaacacgtacgcgctgcaattagttattgaaacgttcaactcttgatttgattgatggccccagatgagctgagccttaagaactaagatacatactttgctaaactagtatatactccgttttaaattatttatgattctagcttttatcgtaagttaaatatttgtattttttgactattaattcttaaaacttcatgtggtttagcattttagaatcaacataagaaacactttcataatatagcatccgcatgttgttaaactatccgaattttaaaaaattgatggtcaaagatacaaatgtataatttaggataaaactaaaactacatgtaatttgaatcggatggagtatatttcttgcggtttgagtaagatcataccgtttaattagatagaagagaaaaggaagaaacacccaagagcctagtatatcctaaggcacaaagctacagctataaattactcgtcatgcagacctacatttccctaagtttcattctttcccgcttacccagcacacgttcatggacagccgctccgccactagcccactatactttgcatcctaattaatcctcttgtcataattaactaaaccaggtcacgacagctcaatatcataatcattatgctactgcctacttatacatgaccagggatcttcagaaagcgttcaaggatacgatttatttcctttgaaataatgtataccccttaaaaaaattttgaaaagagatgaatgacaacagctagaacataaccttggagtaggacaatcaaacaaagtttcagactgcttgctaacgtttggtgaataaaattataaaagagacgggggcagaaaactctcagcaacctcgttggacgatttcgtttttgtcgtcagcacaattgcactgcgtcaattaatggacaaatgaagaaagcgaaggtacacggacgactaggcaagttgatagcacaccagttaaaacgaaagctaacagcacaagcacacgacttgactgacttactattaactacaggcaaggtcaccgaccaacggcaactgaaacttacttacattgttcttttctgattaactacactggccatgttcgaatcaaattttatctcggttttcattagcatatttttcaaactattgagcggtacgtttcgtgcgaaaattttctatatagaaattactttagaatatcaaatacacctatttatcaagtttataataattaaaatttaattaatcatgtgctaatggctttctcgttttacccaacttcatcttcatcactgatgcaggggaggtgccattttggtagagcaagatcaaagatatgatcaaatttacgcttattttgtacaataataacagacacttatctgtaaccacaacttcatcagttacatctgaaactgagtaaatatccgattaattcattcttcattcgcacaaacagaaaacagagaaaaccatctgtatttcaccaattacatctgcaactgcaagtatgcaaaatgctacactggtggtaatccactaatcccctcatcaacagcttgaaatgcaccccaaaattggacactaattatgaaattaattcaattcacaggtataataagtactgtaatatctctctgttcaatgcacagctgttactagctatactaggctgtagccgttaatgtactacccatccaaccatcagcggcggcgccgccgccgccggcgatcaccaccaccaccagagcggccggaccttgaccatgcaccccctgttcgccggcgccgccgccagcttgttcaccgtcacctcgcacctcgccttcacgtccaccgtccacgtccggagcaccttcccgaacctcaacctcaccggcacgatcgcgtccacagccaggggcaccgcgccggcggcctgatccgcggcgagctgcttcctctgctcctccgtgaggctcacgcctcctccggccaacgccgtcgagaacaccgtcacgttcctcggcgcctggtggaacgcgggccacgggccggcggcgagccgctcgccggagtaggagacggtcacctccccgccgccgcggtagtcgatgccggtcttcttgttggcgccgttgtccgcgcgcacggcggcgtcgatctgcggagttaacgacgacacggcgagggcgtcgaggccgcggatggagagggaggcgacggagaaggacggcgcgagggggcggaagacgaggtagacgacgccgacgaaggcggcggcgaggaggagcaggaggaggaccccgcagaaggcgccgcagcacgcgtggcggagccggcggcggcgtgcgggccgcgccgcgagcttcttgtagcggcgcgcgcggtccggcggcgggacgcggaggacctggtccttggggatttggatgatgtacgtgcccggagacggcggcggcgcgccgcggaagctgggatgcagcggcgtggtctccgtggcggcggcggcgtcgtgtcccggcggaggggaggaggacggcggcggtggagcgggcatggggtggacgcggtcggccatggggggtggttgtgaggcaaggtgttcgacgaaatgaagagtgaccgagtggcgtggcgtgcgagtgggagtggtcgcttgcttgccggatatatatgctgcccgcgtagcgtagaacgcgtgagaagagaacaaacagacaaacacgcgggaaacggtcatctgacggtattctttttattttttttcttttataaagataaatctcacgatatcctgttcatactctggtactattaaataatttcactatctttttttctattgatagttagtactctttttttatgtatgccaccgttgctttttcgtataacgtttgactatattaaaagttttagtgtaaatatgtaaaattagaagttaagatttctttggtgacaaaacaaatcataacaaatatttacataatttttttaataataagaatggtcaaacgtcatgtcaaaaatcaacgacatcagacattaaaaaaagagagagaatagtactccctacgtcctaaaatatgagtatttttaggttgtttagaaaatcttataaaggttaagtaaaaagatttcctttccattaaagtagtggtaaaatattaaattatttagattctcctcccaagcatttgattggttgaaaatgcatgaatttttatgcattggtacatagtgacgtaagcgggatgtaaaagttgccacatcagatttgtacttacgtgaagaagggaggacagaagaaaaaagaaaagcggactagatttgtagccaactacacgactggcttcaataaactatgtgacggagatggatggattatgtattattgatgtaatatatattacaattatgtagtatatgagttggtagatgatgtttcaatttttgaagctaatagttgattatattattaaacttactgcaaaggacacatatttttagtttatttagtaaagagtaagctaaaggataaatattccctctcagttgtctcattggttgattttgtgaattgcttagccccccttcctaattacctaagtgactaaaaatacttagctttccgtgtatctgaattctgaagtagtacctggaaatgcttatattgtatatgaaatttaaatagtagaaatacttatattctaaaataaagaaagtatattgtggtacaaattttaaatactaaaaatgcttagggtccttttaatttggaggaaaaacataagaactttggaggatttcaaccatatagaaaaatttcctatgaatgcttttgaaacaaaatattaaatcatatcctatcatatccttttaaattcctatgaaatggataatctcttggaaatttttctttgagtctatctctctcatccaattcctgtatttttctagctgtccaatcaacggttatttctatgcttttcctgtgttttcgatcacttgctttgcacttgcattactattagaatccagactttttttctatttctccgtttattcatttatgagattcaaaggtggagtagtattattttaagacaaggtgctactttatttacttatgtcctgcaggagttggtgtgataatttgatcaaggaaatgaatagcgtgggttcgatgatgaatgtgaatgaaagagtcaaatattatgggggtttactacggaattaggtacaagctactccgtagattgtaatcatctgaaagagaacgttccgttctagcactgatttttctcaaggtgcctcatactgtacctaatttttatatgatcctgtctgaatgtgcttgttatcttgcacttctctgcgtaagatgagatgtttatctattctagtattctactatatccaacttaagatatccgcatattcgaggaagtaattatttttcttatatgcattgctagtctaaacaatcatgtgttgtacatgtgtgaaaactgaagctttttgtgtctgtgaagaatacttccatagtaatcaattatttcctactatgtaatatactagtagttcaaaactatccacatgtgtttgcacaaaactacattaaaaaaaactcgatcttggggaaagaaaaaatagtcccttgggggacggagattaaaactcccaaccccttggcatcctttgaattgaagcttaaaaaaaatggtccatgggttggagattaaaactcattgtaacatatgaatagtgcatactttctcaagtagtttaatgtttagcacaaacttcagccacactttaaaaattttggcaatctattttacaccagaataagtttatataatccaataagtttataatattatgagacaaatctacgtatatcattttgaaaactaagcatttgacaaattattgatgtctagatttttaaaaatgcaactaaatatggtcctaaatgtcaaacatttttaatcggaagggatacatactaatataatcgtattgaacagtgaaccacaactcttgcagtaccgaataatctctgtaaactctgttaaaaaaaaacttaatcctagttactagtgccttgaaggaacaacactttaacttgtgactgttgtttgctactgtacggagtataagttacagaattgtgagtacaccatccatatcttctggaacaagcttctcatctgcctcctcgcgcccaaaacatccatccaaccgatatctcccttttcggtcgatgatcatttgctccaatattaacgcatttctgagaatgtattttgctagctccacctggcctgtgttgccacaaaatccaaatatgcacaccatcttgagatgatagtgaggctgatccacgatgtcatccaaatccaaagggcacctgttcaagctacaatacatctgcaagaaatttatgtcatcattaacaaggagcaaagctaacacgtaataattagggaaaagaagatcaaagattcatgatcgaggaagagaaggagaaggatagcctgtatatcttgtcaaaacaaatgcgggggatggaattctgagattttgttagaaaaaagaagcttttgctctgtttggatacgaatatattcaatcaaggaaacacatggctaatcggtttccaaacatattatcaccttgattcatactatttggtatcttgtacagtgcataaatatggtgatgtgatgatcagggtaaacagtgatatcgatatagcaaaagcttctacagatgtcccaaataattatgattaaaatttacaaagtccactgtcaaatggaaaaaaatgcagttgccaactaatgctgaacaatactactttcgccgggccgaacaatattactttgccaaagctatgttcgatggtctgatgatcgttaaaaaggatcaatagtctgcagcgaatgttccagtttctgggacttatgagttcatggatcatgcatagggcacattggacaagcaggtaattcctaattagattgacagtactggcttagcaggttattctgattgggtttccaaaccaatgaaataacattaaataggaaaaaagaggtaatcggtcaatgagaatacaaaaggcgaactgtaactggctagggaagaaggcaataaaagtagtgaagtacaaattgtgaattctagaatgaaattggggattcaactgttcatccattgagttggccctaagggctaatatgttgagaagagtacaacgcaaaaagacagaaataccccttaacacatacacactaatacatatattcttaacacccccactcaaatgcaatgtgtatacaataacattgcatttggagtgaaaactaaacaagagaacacaaactaaatattagcctatctccaaagtcttgatgatatcgtcgaagtgtgccaattcttggatgatggagaagaaaagatgtatcccctcctcaatgaagtggaccttggagccttcacaaactgttcttcggccctcgataccttgaagccttcacgaaccgttcttcggctcttcattgattcagagatgttgttgatgatgatgacaatagaccttcacaaattgttcttcggtcctttgactgatgatgagacattgatgttgatgaaggcccttcacaaactgttcttcggaccttcactgattgatgatgatgatgagaagctccgatgtggagatgatgaagtgacaatgaaggccagctccgacggggagctgatgatgatgaggaccagctccgacagggagatgatccatagatgggtttctagctttctgctgctttgctcacgaaggactctcccgaagcctcatgcggctgggcgacaagcagacaaccacaacggccatgctgcccagcaatggagacgagcagcgatgacctcggtgcaaggacgcccggccaaaactggagccgttgcggacgacggcggcggcttgccgccggcagctaggacacgctccgcgacctgaagaatggtggggacgagcggcgtggataagcgacgcgacgggcgtggcagcgagagtggatggtggagaagcgggcgcggcgccgcaacggacggcggctgcgaccggcgaatgggaacgcggtgacgacgacgagccgcgggcttgctgcttggagacgaagacgacgactgactgatggacgaggatgaacgacgacaacgatggctcgccggcgatttggcagctagggtttggagagaggctctgataccatgtgaattctataatgaaattggggattaaactgttcatccattgagttggccctaagggctaatatgttgagaagagtacaacgcaaaaagacagaaataccccttaacacatacacactaatacatatattcttaacacaaatgatatagctacttacatccaaataaagatcctccaaaaatggagctgctacgaaaagataagccaactggagactgaatttctatcgaatgaacctctctcaaaagttatttccaaagttacacttcaattgagtgaacttgagaggcgattgtgtaaatccagacatctggagggtgaccaggccacacataggttcaaacaacaagatgtgaaacagaaaatcaaatagaattaaatgtatatagagagtacaagaataatcagacctgagttttgacattaacttcaacgtataacgtttcaacatgaggtaatacacttggaattccagttaatatattttggagggttttctcatcaaaaagtctgatggttgatgctttgatattggagcattcattgagcgttaccaatgccagggaaccgtcgtactcaaatgttgtgagattcggagcatgtaactccattctttgtaaatgacaaccctgaattgacaaacattgcagacggcataatggttccgacacatgtaaattatgcagctggttacatgattggatgcttaaccactctagaacatggcatttcgatattaactgctctaaatgttgcaacctaacattgtcaagagcaagcagtttaaggtttgcaaatccgcagaaatctagaggtggattcaaagtaacactgtcaagccgaagagcctcaaggtaagatccattatgtttgtcgaaaatatgacaaggaaagtcatagttgttttcatgtgatttccaatctggggagaagtcaagaatgataacccttgcctttgatgcaatagcaaacgcaacccagccattgacatggttagcatgctcatttgacaaaccaaacttaacagcaaacttatttaccattgttccacaatgtttttccagaatagcatcaacccttttaatgaacttgttagcacttgatattctacagttcagatcagagcttgttccttttctcttggcattatttccaaggactgttttaataccaaagtacagattaggatggaatgtccaagcctgtctccagtttgttgacacaacactcaaccgagcgacttcctttaatgttaattttgatattacccttagtacaatatcctgacaatgcattttgaacaagcatcagaatacagcctcctagtcctagcacaaaaggagttgagagtttcatgacttcatgtcatgatatgacatacctcgggaagagactgaaaattaagcagacatggtcttgtcctctgtaaattaagctgcccccgacttatcttctgaaaattatgttgtgttcttctcctcttactaatacgttgtccgcaaattatacaattccttttggctgttgtgctcttactcctgaaaccaacaatcagcatgctctgccagtatgcaatgatacttctttcagaagttttaagtagcacacagaattgacttcttgaaactttttttttagcaaaataacacatatgtcagagggtattttgcattattattagtagtaacagtacacaaataaatgaatataagcatataatgtgatggaattctgccatgtaaggatgcctttctttagattctctatttatttattttttgcgggggcctttgtttagattccatatcgtattaaaatcacaagcaaataaagaaaaaggtgcatgagttgggagtcaccttccatggattttcgaggagacaagaacgttgtcctccattgttggacgtggaggcagtggatcagggacaagagaaaccctgaatccctccaccgcaggtccgcagcccaatccaatcagcagactcctgatcccagcaaggtagccatgaagggggatggaatgatttatgattctgagacagggagaggctatttagggctggagccgctcgatcgcgaggcgcagcatcaaggagtcgaccggaggttagggatgaaggctcatcttttatgggccttaccggtagatggccgtacggcccatatacaggcccataaatcagcccatatcgattttgactgctagtagtagtatttatttgagaggatataagaatcgtattctttttcttcaatacgaatcggtttcggatttgttgccgcaaaaatcaaaataaaacccgggtggaggaggagggagaagatgaagcaaacgagagagatcgagcttgaggccgggtggaatcgcgaggggatgtcatggcgaagcggcgggcagagtccgagcttgagctggtggaggcggaagcggaagcggaggcggaggcggaggcggagaagaatgggaggcgagcagcaggtagtcaggacggggtgaatcgcgcgttcatcctcgagtgcagcaaacatagcgatggatcgatctacagcggcgacgatttttggcacagattttacaaggtcgccgatacccgagagagtaagttttaacttttaacttcttgcaaaccctagctttttcccctctccaccatgcatcacctaccatcctctcatctccttaattagttccttttcaattttaactttgcatcatctacaatcctctcatctgcccttaattagttccctttcaatttagcttcacttggtagcacctcagatcgatgctatttaattcatgctcttttaacttcaattttatactatattgctgtgtcacctaatttgttccccaggaggcgggcagcctcttgggtgcaatcaaagaagaggtcgcaatctggaaggaagcaggagtctttaaagaatagagatgcaatcccttttattttggttttgggagggcgctccggcatactccattcagtttcgacatcttcttgttggaattctaaacttgtaaatttgtacatcgtaaggaaatttggactgaggggtctttggtcagcacggcaaaataataataataataataaaatctaatttgttcttgtgtatgctcagtactatggaactgatgtcaaattaaaccctttttttcataacatatctgtctagcttgatgtcaaatttagacctttcataacataatctagttctaagtaacactagatattccttaagtactacttcaaaaaactcttaaaggcaccatctaggatatggtatatcttgctttgggtccatgatagtgtggagtttgctgttttaaaccttattcgtatctatttgtttctttcctgctcatttcaatattggggttaacaatctaacttctaatcatccactgatgtgtatggctgttcagctcgtatggaggcaatgatgctgtcaaacccaaccaattgccggccacacatgtgggcttgcaaggcgcacagtgtgcaattcatgatgcagatattctcgctcaagctatccaatatcactgctgctgttgatggcccagttcacttgtatggatactttgctgtccgggatcatttggacccgctacgcaactacatcttcaaccgcaccagggatgaccctttcatcatggggcaagacaatggcgttgattcggataattcattgataccaatgtcaggccccaagagaggcattggaaaccaagttcgtgtgctcatcgagttcgacatgaagatcaagaacggagagacacaagacgatgattttcagctcatcgatggtgccattatctgcagcgaattcgtgcttcccgatagagtgtttacgcaacggattgagggtgattgtggtgcggtcgacattagtcgagccctttttcacgaagcagtggaggccacaatacaagttagcatatcacaagtgcatgtcaatggcttgagcttatctttatattcttataccagtcgaatccctgaaaagattcggctctttgatggtgtcatttccaagccatgtgacctgaatagggtagttgctgtggtggagaatacacctttgtttttaatcttcagggctgttcatagggatggctcggattatgatatccctaaatactgtccattggtcttcaaggttgatcagggggatggctcgtatcgtgtctctgaatattgtccattcaaagctagaagacatggatatgacatgaaagagcttaaacttggtggcgcccgtgtactgttgaaggtgtcttggtcaactttgaagtgattttgaatattcctggggtatacataatctatgctaagcagaaatagcgatatttctgtgtattgactagtaggcaaatgtttgggccttattttgagtacatatttaagttttttatttgttgtagaagttcgacaggtgaaggatgccacactcttatctgttcttatttattgcatattaatgcagattaaatttggtattgctacctgaatttaccaaatgttttggatgcaactcttgtggaattctaatgtttaacttacacaatatactcttgcaagagtgccgaagagaaaagggatcatccattaatttgttccgtcattgtgtctgcgtgtgaaatagtgatgcttatgttaggtaatactgatctgcttctggggcgcgttttgttgggaaaattgaagatatgctactcccctggaatcattttcaggacgtcactccttcagcttgactttgctaaaatggattgtttgcatgataataaataatagatgaatcttcggtgtagcatcgcattgatgaataaaacttttttttgccatctgtttgtaatgatatttttttcctctttgtattttggtcggccaagtgtccgaacagtttggcatcttgtaactaaacaagttctactccttaatacaaagacgtgtgaacctttcgcatgttacctaaaacaaaaatgagtccaccaacaacattacaaaaatgagaccaccaacagcattacagcaagcagataatgagcatgagggggtgtagaaaagaaaaaaaaagaatttatgaaagcatcgcttgattactgaattattgccaggacaaccgttgaagaagcaaaccgcagaagctgcaactccagtccagcggtttactaacaggcaacagacatccaatcatcttatgtttactgaaatagtagtaaagtggtgagggattgccaatgccaatctgccagacaataaaaactgacagggacagagactggagttactaagtgttcagctcagtttactgaaccagctatctaagagattaagcaaggctaagtcagagaggaactgtgtaatgaatgagatagcgctatctaatcagtttactgtctgctgctgctgctgctgctaggccaagacgaggagggggttgtgtctccttgcttaatgagctccaagttgatcttttgggccaagttgagtctcatggctgcgacgctctcagcacttacttgatccatcaccgactcaaaccagcagggcgccgcttcttctgtccttggatgcttcttccaccaccggcagatggccagggcaactgccaacaggtagacgccgcaatcgtacccattgctctgctgcggtgtcgggcctgagatgggcggtccctgcggtggcgccgggagcagtggccggagcgcgtcggcgaggcgggttgccgccggcagattggcgccgtccatactgtcgtggtggacgaagcggccggtgatgttgtccagcacaagaagactccagtgtgacccatcgtcggccttgtccaacctctcgctgttgttcaccgggaataacaccatcctgcgagatgccagtaacagtgcctgggctgtatcagcgacagtctcaggctcatagtcttgcaagttcgccagcagagaagccacggatggcgacaccaggagaaggctctcatcacccaactcggttgtcatgtgcgccatcacaaagttaatcacgccatctaataggaagtttggggcagcaaggctcgcgacatcggagctgaacagagttgcgtcacggtgactcattacgctctttcctcttgtcctcgtcgtcgtcgtcgtcggagacttatgcagggattgtttcttcacagtgaggccgaggaactgcaactgatgttccactgtatcacattgctgctcctgcaaagtacaaaaccatgtattaacaacctagttagtttgataagtaatcaaccgacatggagattagtgaactttcctcagtattaatcaaagagacagagatggactgcaatacatacacataacaataacagtctgcctttcttcaaaaacaaaaacagtctgcaagcgatcaaaaaggacaagtattcacattactcgcattgcgcaaaagaagataaatccaaaattttggcctcttacaattcattaggcatgatgaatttgtagttaagtaaatacaagttacaaatactatggactgtaaatttggagtataagcacagtaagaaattatgaattaggagaaacatccatttctcctacaccattccatctctctaaacttccaatgaaagtgacagtgacctattcttgtgccctctctgtcaaacatgagcagaccttcaaaatgacaaagagcaaacaaaaacactaagagaaagcaatgcgttgacctctcaaatcctcagaaatctccaaaccgagaaaacattagtcaatgtgaacaaacattggatatatgagatgactaaagaagttgggaatgggggaagcaacagacaatgatacatttgcatgattgcacgcacaacgaattgcacacatgggagatttaagacctagtacaaatctaaatgtgatctagagtgtttacgcaacggattgagggtgattgtggtgcggtcgacattagtcgagcccttttccacgaagcagtggaggccacaatacaagttagcatatcacaagtgcatggcaatggcttcagcttatctttatattcctatattggtcaaattcctgaaaagattcggctctttgatggtgtcatttccaagccatgtgacctgaataggtttgtagttgctgtggtggagaatacacctttgtttttaatcttcaaggctgttcatagggatggctcggattatgatatccctgaatactgtccattggtcttcaaggttgatcagggagatggctcgtatcgtgtctctgaaaattgtccattcaaagctagaagacatggatatgacatgaaagagcttaagcttggtggcccccgtgtactgctgaaggtgtcttggtcaactttgaagtgattttgaaaataatgatattcctgtgtgttggctagttgtcaaatgtttgaccctatgttcagtacatatttaatttttttatttgtttaacagaataacagtcgaagaatgccacgctctcatctgtaagatatggttctataaacagatgaaaaaaaaatagatttattcatcaatgcgattctacaccaaagattcatgtattttttagtatcatgcaaacaatccattttagcaaagtcaagctaaaggagtgatttcctgaaaaaggttcctggggagtagcgtatcttcaattttcccaacaaaacacgcctcagatccagatcggtatacccaacataaacatcatgcatgtaatgtaatgtaatgaactatgaattttttttaactaaggaactgtgattttcttaacgaaaccacaaacaacaagcagataagcatgaggaggtaaatctatggaagcattacttgattacttaattactgactggataactgttgaaggagcaaactgcagaagctgcaactccagtccagcggtttaccatcaggggttgccaatgccagtctggcagacaagaaaaactatgccataggcagcgacagaaagatcgtcttgactaactggatatcacaccgcaactgcaactggtgtttcatatcaatatcatctactctcatagctaacctattagcgcaaaaccgaaaccaaataagcataaacaaaagagaagaaacaagcagaaaccatatggacatccattgttccttggatatttctgacattacggacttcctgagaaaagttttttgaagaaaaacagcatgattgctgcacattttgtattaagaagaggaaaagttaaatccagacgccatagagcaagttggaacaaaggggggcaagaaacctgttcagagagctaatactggactatctatgctttacagatctctctgagaaattggctgtttggccttgttttaggcccttgtctcatcattcagtgacctgtagcatcaataacctgcacttgaatctcagaactatctgcagtctgtggatctcctgattttaacagttcatttggcagttctgaataatcttcgtttcctgccagtaatgcttcacttgatttctcttcaattgactcattacgacatgttgcgttagaagtagaagataccagtgcttcatcattgagctgtgcaaatcgtggatccgaatcttcaactgaactcccgtcaatgaaatgtgtcccagtcccagaatctggagataatggttcactcaattcatcttcaagtttaactgtcaagggttgactgatactggactttgagatggattgcactagtacttcctccatacgacacttaaacaatgagttaaattcatcaatggagtctgcttcaacaatatgtgcctcaaaattatttaccttgtaaggggaacacgatgttaattgctcaatacctgcatgacatcaacttcagttgagttatcatttccagtaggaaaattgcaatacataacttagggttaaaaaacagttttacctgcatgtactgtatccttagcttcgaaagtgctttgtctaggcttctggaaaggagatgaactgatatcatcactgaaatcagcattttggttactgctaaccattccagaatttacttctaatacacccacctctgaaattgccatgcctaatattttgatttcttcgcctatatgtgcttccagtgaaccaaataacgtgctgttgttcctttcttgcttggcatcaccgtctgactgactattatgggatttatgggcatcattttcacttatttcatctttctccagtttgaagctattgtgatgcaggctagtagagtgcctaacatataagtttccatgctttctatgccgtcttgctgaaaagtacgaaagaggagtccaagtttcttgcaatggactatcatgggccatattttggttgactgcaagatcaaatagatttttccgtggaaggagacaagacggtgctgaatcaggaacatgtggtaactcgattatttcatctgagccatttgaagaatcaaatgggttctgccttccagtggaaatggagggaacctgcacacggaagcgtgatgcctcctccattttctgtactgcatcagctgcttgcaagtccattaacctcttgtcaagttcaaatttcagaatgttctttgctctttgcagatccatcataccctccagcttgctattattgtccatatccaagtaatttagatcaataacatccttccagttagcaaaatcatctattttcccttccaattgattttcatctgtgctagcatcctcctcctcaagatcatcttcatcatcatccgaagaagtattcaagttgtctctggagaccaatgaagggtggccagtttgcaagtctattaatgggtgcaactcttcaagcattggaataatgtcagtcattgatgcatcaggagaactctcagtaagatcagattcagaatcagaacaagcatcctgtggctcctgtctcataacaggttcccaacatgaactcataaactcacctaactgatattgatattgtactttattgttatcactttcaggattgatgcttccaagttcttgcagctcatcattcttcttgctgttctccccaacgtcttcagtttccacagttacaccactgtaggcaaaacttgaaggcgccacacaaggaacagtatcagtttccactgatgtgataccttttccttcacggtgggtatcctgcaaatcataatcagaagttccatccttcgtatgtatttcctcatttagagcagtatcaactgtcatgtaggtgccatttttctcttcccagtgagtgtcatgtatattaccctcaaaatttctttccctgacatatacttcattactggtagttgttttatccaagtgctcctcgacagcaacagtctcaaccttgtcaatcgaacagtcagtaatggaaatcttggatttaaaggacaaagtttgttgattctctccaagaacaagaacagcaggttcaccataactcaaaagtgctccaagcagaagtgcagttaacaggaagactggagatgaagacagcaagaagttgaatagagaagggcaaagcctgtgtagaaacagcaacaaaacgccagcagctagtactatagggtaatcacaagcaaattgatatccaattctgacagatgaatacattagtctcttgatatgcaacacaatgtcatttgcaccaaaagccatatatatcttcttgaattttaccctcagataaaacgttggcctggaaataggaaagagagaagcaattcatcactataacattatggtgaatattcaaacaagtaaagatttatacttgaacaatagcggccgtacagctcttagcctccatggcagctgtaattgttgtactagtttgaacctcttcccaatcttaataaacttcagccgcgtatcttacgccagcccggcgaaaaaaaaaaagatttatacttgaaacacaagtttaataatgtgcaatacaatcaaactgctcaaataaggtgacattccagcttccttagttagagatctatagaaattgcatgttcaaaaaaaaaaatcatctgcaatggtttaacattcaacaggtaggtggaaaagcaccatctctttaaatgttcagtcagttatcacaatgaagatctctgaattcaacagtatttttgggctataattgtatactatcaacccataaaagagaggaaagtaacaaagaaataaacaaaataatctaatcagaccaaaatcaaagcgaatttacagatcatttagaaaaagattggacgatcagattcacacaagaagctaaattaggagccacctatgaccacacaagaggctaatagtggagcttagcacaagaccagattagcagtagaacgcaaaaatgcacagaatgccaagctcacctgtagcgacaacaccgagaagccaaagccctcagtagcctgaagcaagtgttggtagaagagtggaaaagggaagggggcaataggaaggcaacctcagcaacaagaagcaatggaagaccaaataaaggagataggaagctgcagtgctgtgcttgcgccctttttttctaggattctttgctttggagtaccgccatgagagagaagttttgtagggaaagtggagagcaatcttggtatctttagctgtcactctcacttttaagtttcacctcattcgttgcacacagtcttcactccctctagaatctggctattttaccagacctgtcaaagctattactgtgcctgaaacaagttagatgtcagtatttccccatcggtggaaatgcttggatagcagtcactgaaatcgtagaagctccctctgtacccgtagaagctcatccatcttgttttcagcttccaagctgaatttacaggcgcaagcttagctcttcctttgaacatgttctcataagcacgggacaagtacaatgatagcacataatgtgctcaacttttttctgtggggagaaagcctgtatggatcaatgcatgcgactgctataattttcttaaaaaaagcacaagtgaatagtgataaagaaagaaaaagggacaacacaactcagctcattttagtgatcagctgtacaataaagaaagcacgtttatggaccacaaaagttgtaagtaaacaatttgtcgtacatctgtactatgtgggttcactttgtggactccaaacattgacacaccttatgcaggtcaaagaaacagattttacctccatatgtaacagtctcatttgcgcattttgccagtgttactgaacccaatcttgctgccatggaaacacctgcgaaattgtgaccaaaacctgtaaattcggcagtgaattcatgcgatttcagtcgggtggcactaggagaatctgacgagccaaagcatcatgtcaaaaaaaaaaaactgaaccaaagcagcagcacatggcggagcgagggactcactgagtcactggagccaccgaattttggaactttaccggaactgaatctagtgccctcctcagtgtcctaatttcctcaataaatcccacgagcaactcaagtgcggaacgcctattgtcaaatctatggtacattggaaccgagaggcggaggaagaggaggagaaagaagagtctttacctgatgcgcggcaggggcactccaatggaagcaaccagcagaggggcggaaatctcgggtcgaggagaggggagaatcgagatgaaacttctccttgacctcctcgcattacgtttccgttgaatccatccacgtgcggcgtccacctccgtggctccgcccgcaccgtcttcgccgccggagttgcgccggccgccggagttgagagcgaaggcggcggcgccgccgctcgcttgttgggtagccagtttgggtcgggcccacagcatatgacccgtttcgcaaagttggcccgtttaaacattcagattaaggcccaaaagcccataaatatgggtcgggctgcccagattttgaaggcccaaaaaaagaagtgatacgaaggagtgtctctaatctgtgccgcatattcttaatcggacgtctcacggagatcctaaggagttcggagttttcttctccgaacccctctgtttatcaattccatcatgtttgatcgccgccacaagacgtctccgctttgagaggatttcacaggcacccgaggattctgaattctgatttctatcgtgctacttgcgaactatatatatccgcgctctgccttctgaattcgatgttctggatcttgtttcttgcaggtcaggtggcagtgacagtttattacagacatatccattgatattcagaaatattcagactctggaagaaatttggagtctcggaccatgaaagtcacttggaacggctgcaacttgtagtgcccgattagcttatggtcagacacaatttgccggtgctgtgtgtgcttcatgagctagactaagcaggtgtgtggaaattgaaagtggactactcctgttacgcagtggatcagtaagcctaacaaggacaatcaactagacttcttatgtatggtctctctcatctcatctgctattcagttggggggaccaattcattcatagcttcagtaccaatgtgattcagaacttgctctgtatcctgacagaaacacaaacagcaagggatggaacaagtacagtcacacactactgttcataacagaaacaggtagagtgattgcattacgttttggcaaagcaacgcgaaaacggaatgcatcttgaagcaaattgtccacgtaatgctagctgctaattaatgatcatgcatgtgtgccatcttgaatcatggagaagtgaaagagacatccgaaccaatcgatcaaaacaggcaggaaccggccatttgactcacgtattagttgactctcttcacttgagacagtagcgtgttgtatggtgagctcaggaagctgacggcctaacaaagacatttttttacttgacttcaccagttgatacacgtacgtacgtggctccgtttttgcttcagatttcagcaggtgcagcactgcagtgcagaccatttgtcctcgcacttcctcgcactacacgttcgagatgtagtatactactaccaactgttgaatttcctctctgaatactgtatgctagactagagtcaggttcttccataattttgatcaatgattccagccagtattccaagttgcctgaacctcaattttgattagcattacatcatcatcattctagacagtcaagacagtactgatgtagcagaaagaacttttaaagtttcagaaaatgcatgcctccagtcaaattttcagaaaaagaaggatcaatctagacagacaagacagaaagaactctttaggctctgttcgttatgaggagataggggagattgattatcgttttccacgtgcacgcttttcaaactactaaacggtgcgttttttgcaaaaaatttctataggaaagttgctttaaaaatcatattaatccatttttgaaatttaaaatagttaatactcaattaatcatgagttaatgactcacctcgttttgcgtatctccccaatctcctcaatccccttctcctcaaacacaccttaatcagctgactgatgtagcactagagcgtcatcaccattctaaaggtcggcaccatgaaattttctctggttttgactgtttgactccaaaagcaaaaggggctcattgatcgatcgcgttcttaatttccttgtccattggattactgaagaaacggcaacatatatgatcgaccaaacacccgtctgacatgtataacagtgaaagtccagccacaatctcttgcatgcatttggagcatgccactgtttcagcacaaccgaatgattcagaacatacactagctgtggcatatttgctactagtaagactatgctatcgaaattaaattatagtgtttgcaacaactctgcccaaggaagtggccaggaagaacacaacttgaaattaagctagcgattacaaatcgataaatccaagcagaattaaagaaaaaaggatgaaggagaagaacgctgtaattaacggtaatgcatgacttaagcagtccaaaacgatttgaggatactactcacatgtgtgcgtgacttgacgatgtaggagtagtattgtccaacagcacgagctattcaaaactcaaaagaggagtcaagcaagccgcaaagccaacagcctgcaagtacctgacattgacctggtgatgaaaagtctcagcttacacccaaccattttcacatttgccaacaacataaacaacgcaaagaaatgagcttgctaaaccttcctttgttggtttctgtacaagaaaaatgatggattaatgttacataatttgatttcgaaatattgctgaaactgaaagcgtccatttcattctttttctgcgcttactctgattcatgccaggtcaagatttaattaggttaattgcatgtatgagatgtactagttagtactggccgttatatataaacacggtcaaaattaacctaattaattaaacagttgaattgggaaaatatatataatgtaatgaatcaatgtttgaattgaacgaaatatcatatcaccatgtactctgtacgtagtttagaacaggggcacgcgattctgatctgacgacacatcaaaactatgggcacgagcgtgcgttagtcagttagttagcgttgagaaaattagttgaaatctctagcactagcttcttagcttgcatgcacgcgagatcacacctagtttaattggtcaattttgattcgcaaattctgtacgtctacgtgtacgtacgtacgtaagcacatgttcttaatttgtttgtattgtcgttcaatggtacatgtgtattctccaatcaaattgacctcatatatgcacattgtacgcagttgatgatccgtccatattgtactatctgaggagcgattagatcgtgtttgaaattcctgaaacgattagtataggactagctaggatttcagttcattaataattagtaattattaagttaggtacaaataagcatgtacgtagtactatatttgtaggcaactaaggacacatatcatcgatcactctctcttttcactcgttaattagctggtgatatcagagctgaatgcaatcatatcgttgttgtcatgttgtggattagtccaacaacataccaaactcttgtaatatgatcacttgtggttgaagcaaaattaaatcacgtttcaacacctaatgaggcaaccaaaagattgttttgcttcagaaacaaataatttgatgccaaatccccatctatatatgaatttcatttttaaaagtttgtctttctacgagtaatatatatattgattcttaaacttgggtggagttgtcacttaggtcaactaaaattaaaatttcaaaattgcacgtttaaatgcatcagcttggtttaatgaaccacaacaagtccaaacctcgtttgacgggaactcactgttgacatggcgctccacgcaaacaacaattttgcattcgctctcctccgtgtcatagcgtggccccctccacatatagtactaccccaaagcaccccaaaccctctaaatctctacctccatcaccttctccccgatggttagagttttgacggcgagggtaatgtcgcccacccacttgccactctcccttgcaaccttcgcttcgggggagaatgggagggatttggggggattccgtgtaggggtctaaaagcaaaattaccgtcacgccatgacatggaggagggtggatgcaaaattattgcctacatggagtgctacatcatcgatcaacttggttcaaacggggtttggattgttgtggttcattaaaccaagatggtggaattgaacatacaatttttatgtttaggcacctctgctcaattttaaatactggccatgtatctctcttttcctaaataaggttaaaccctaataattttaaggaaaagtaaggttatatatactttttttttcaaaactcttacaaaggaagatctcaaccatctgatctagccgattggtagttaataaaagtcaaaatgaagtcacaatttgccacgtagtttttataaagagtttgcaagtttttttttttacatgtatcattttcatgtaagaaagagtaaagacagatgagtttttttttcatgataatcatttttttctctctaattactattattttctaaatctatttgcatatgaaactttgatgacataatttatcattatatttatattaatttattgaacactgatattggtatccaaaccatacctaaaagattcatttcttaagaagaaaaatatcaaggggttatttctaaatttatttgaaaaataaataaaaataacaaaaaaagttgtccatatataggccaccccctcgtctcccctgaagtgtccgtccatccccagtcaagttcgccgcgcgcaacactcgcagcagagcatccacccatcgtcgatgctcaccgccgccatgcacatgctcgactcctccacctcctcctccccttggcttcctcccgacctcatgcctcccccgccgccgccgccgcccgccgccgccactctccaccaccacttccgcgccgccgccgccgcccccggccgccgccgcatcgccaagcgccgaccgcgcccgtcgcggcgccttcccaccacctacatcagcgccgacccggcaaacttccgccgcatggtgcaccaggtcaccggcgccgacgacctccctccccctcctccatcgctctctctacagcagacgacggagctcctcctcccggccgtgcacgccgctccagcgggctcgcccggcgctgcaggcgcgctgatgcttcccacgctcgacacctcggcgttcctgctcggccgccgcgcggagccggcggccgcggcgccgccgtgcgacgagtcggtggcgttggtaagaggaggagcgggtaattacggcagcaacaacaatagcattagcagcagtagcagcagcggcaactgtggtggtggcttccccaccttggactcatgggatctcctgtaaatctagatcatatattgtcgatttctatcgatttctgattcttcatggctgtaattaactaagacgagatcaatgaacaggttggagcatctatctacctgattctctgttcgtgtccttgttaattttaagcttatgcctcgtatacacatggatgattttttttatcagtagtgttattttattgatcttacttaatttagagttccttttcttttaattattaagtgcgactgttaagttcgttttgatcttccttctgctgattccagcatcactgcatcagcctcaaggttcttaatttatgcaggatttttgttcttgtgaaactcttttgctttgtttgattagttggctcttgcttttctattgattttgagtctttgatgaatcctccttccaacagtagagctgctccagcaccatctcactgaacatgtggtttctgatcatttggtgaacaaaatgtaacaaaagatgtttttttatattagtacattttagagaggtgcttagtgcattaattcagctttagctatataattaattaattaatgcaccaaaccactgtggggggcagtagcatgtaaatgctgcttagacagtaagatacgttaggatgaagctaacagttcaattggagcagagcagggttgagaatcagtacttggaaaagattgattgtgagatacaacaataataatatcgtaatcatcgagccaggtttttttagaaaaataaagtattgcaatcatatatgcacacgcatactaagactgagtttagatccaaaagtttttcttcaaacttctaacttttttatcacatcaaaacttttttacatggctgtgtttagtttctgaaatcggggagaagtttggggaaagttggtagtttggaaaaaaaattttgagagtttatgtgtaggaaagttttggatgtgatggaaagttgaaagtttaggggaagtttggtgtgaactaaacaggaccatacataaattttcaacttttctgtcacatcgttcaaatttcaaccaaactttcaattttgacgtgaactaaacacaacttaaggttcagcggaagagtaactttttttaaaaaaacctaaggcggaactttgttccacttttatatttagaagaagataattgacccagtttataaaaaaaatcggacccgaaaactacacaactgtcacggttaattacagaaaaaccagctaaaaaccaccgttacacaactaactttacattgatctaccagtaacatcgttagtagaagtgatattaacataattgtactattaataattgatgtgatagtataaatagatataattcattgtaaagagtactataaaacaccgcagggcggaaaatgaaaggaaaaaaaaagaaacaaattgggtgtggaatcaacatgcatgcttaatgggaagaaaaaacaaatatgaagtgtatttgttaaacacatatgtaggcttgatctagagctgagctgtttggtgcttacaagtaactacctctagattgcccctaaaatacaatgcaaaaagggaagttgacaaggaaaggactatatcaacggagaggaagaatcagaggcacgagctgttgactactgagtctgcgtgtgatttctttctcctcaatttgcagtgtacgtgtgctgtgccatcaacaagtgtggctctggctagcacttagcagcccctggtcctgatgagatgatggtcaggcagtcggtccaaaccgccaaaagtctgggtccgttcctggacgatgttaacacataggagtacaatacaaaccaacggctgtcctaattacttatcgatgtcgtttaccgtactactaataacttactaataatagtagaattagcatattttttttaaaattaacaaggaggagaattcatggtccagcactccagcatgccgctgttagtcaaaattcgcggctcctcttatgggttcgtagttcatattttcgtacgtactaccccttcccaaaatatgtgtaaatatgtgtagccatgagtaaccgtgcctaacgtttcatcatccgtcttatttaaaatatttttaaaaaaaatcacacataaaataatatttatgttttatcatctaataaaaattttaggacgaatggagtatatggctacgcagtgagagcgacaaagggatggatgttggccgccggccggccacgcaggaggggacaccaccattgcacttgcaacgatcgatgcaattgactgcttggtttgcctcctctccggtctccgctgccgtcctcatcaatcacttctcatttgtttgtttggacccagcatcccttacctctacactgcatgtgattcctcacagcccacctgacctgacctccctcccggccccaatgcttacaccatcattgcgtcatgctcatgtcataaatgaacatttttacacatcgctgcaacatcttcagaaaacggaaggcaatactgtgttgttcatgctaaacacatcactgtcggctcagctggatcaacagcgacccttgcttacacaacggagacaggaaggatgcaagcccaagcgaaaacaggcaccgactgtgtttgccgcagacagataagcagggtcagctggcgcacagcaccactgatcacgccgcgttggcaggatgaaacagtacaccactgcttcagataatgacagtttgaacctactcacttgacctctacatataacaatgtacaagatctcaacaccatgcgtttgcaggctcaggcatgccatcacggtgatatggttacttactttgccgccttcagtacagcaataccagtaaggaacacgccctagatatttcactaccaaagaatttctacacctcaactgttaggggcacaaaagagagttatgctcgccgggcatggaggtggagctcatactttagtaaactgcagctgggaaacagaggcaggctaaactgatggcgaagagtttgaagacggcgatggaactggaaaccagtgttttgatgcttgaaatgccaatggagataccctccctttttccaaaaaaaaaaaaaaaaaaaaaaaaaaaaaaaaaactgcagctgcgacaagccactacgtacacttctccatgtcgccaactataaatccgaatctgcctaaacctagaacgaatgcaaagagcaaaaattagtactgataaatgataaatctaatcaatgagtgagtgagaaatgctggaacatttaaacacaacaagaaaatcagattctaatccaggctgggggtttattgatttattttgctactagctatgtagaattacaagaaagaacagtctcatttgactttatccatttcttttgcctccagagacactactggttgttcctcatgagtaacaaaagaacaaacggcacctttagcaccaatcaacatcattttaaattgcaaaaggtacaaaaaggtggtttgtgtggctttggggaagtcaagctacaacaattccataacaagtccacatggttgttttcaggggtggcagcaaataagtccgggaataagagacactggcaaagagttattgtgcaaggttacaagaacaagtcaaagtgtctcacatggctggtgaaattgaaaacaacaggaaataaaagtatgctcagagatgttcataatgcctacaactacgtgtaatgaaatgtagttgatatcacctatatataaataaggaaataagttatatatatgcactatcaccaacgtacccttgttggaaaagttattatatcagacacccgcctcaacaaattaatatgagagcctgaagtaaggatatcatataacatatccatatatatataccatcccagattacctatttcacagtaacttctttgtgagctttaaatgatagaatcacgttccacgcaagggctacaaaattagcagcaagaacctggaaaaattagcagtatactaggtgagaacaacattcagtcatgctaaagcagacagaaagaagcaaattcagctccagagtacagtattgcactctaaaatatttcatgaaatgaaaatgtgaaagatttcaaagacctgaaatttttgtgggacaaagtaaaaattcaagaactgaaaaggtatccacaattgccaatttgcaatcactgatgataaccactcctgtaaaattacaactgaaaattagctagcagtaaatgagtgcacacacatattatcagggagatgagagaatcaatcagaagaggttcatgtcacctgcttgagctttggaactacaagagaaggctttccctccaaggtgacgagtaaactcataaacactccaatgaaaatgggagagaaaatgaactgaaaggaggagataaaaaaatatcaaaaaataaatacataaatgcataaaagagctagaacagaacaagcagcaacactctctctttgggggcagaagggaaaggaaaaggatatgcatatacctgatcaagtaagaggcgagcaattgcacctgacgcaccattgatcatcactaatttactcaagtacaagtacctgcatgtggcaacaagtaatgaaacaaacagcactgggcagagaacacatgctatcctctataaacattggttgttcagcataaataagattaccagacatgcaatgttggccccaccaggacgagtcccaaaaatgtgaatacaaacgttctcttcaaatctagctttggcactttatcaattgcgagctggagcagtaccaaacaatggcaacagtaaatatctcgtaagaaaccttaacaagataccacaataacaagaacaggtgaaatatcaaatattttgcccaatccatggatgcaacccagttggaatagacattgttttttaataatggaataggacactgttgctggagtaaagtccgttgaggaatcaaataatatgagttacagattagcataggctaaagaccgacacagttgagtaaagacaatatattcagattatggttgacacaggattggataaaaagatatggacctgaaatttgataagaccgtaacagcctagccagttaagagtttcacatcatgtcatatttagaaaacaaggaaactaaaagagtgcagctagggcagaaaagaaccataactcagtaaattgatttccaagtggtattagcaatggataacatttcaatgttgttttgaaggaaaattggtatgatttgaccatttgatgctaatgcccatctaagcacgcctggctatgtgctattgcagagtaataggaagccctctacaacaagagagggagactactggttcattgttcgtcaaccaattaagtagtactaagtaggctgcaatgtatggatgtgaaaatgcggcaaatagaaaacaactgcaagtcacctggcagatgaggtctccggtcagggttaggacggcagaggtaacagccttagtggtgatgggatgcttatcaagagccagcaggtacctgcaaatcatggcgcatttcagtaattttgcatttagataagagtattgcaaaaagcgaggcacaagaccatgtcagtgcttggccgcaggaggcaccgggaatcaggaagaggcggaattggatttaccaagccagcaggagacgccaatccatttctccttttgctccaccaccaccacctcctcctccggcggcgactccggcggcggaggcggaatcgcagcaggaggcggcatggagcttcgagaggcggacgcccttgcgcgggtggacgacggcggttgtcgccgggagcgaggcggggcggggagggagggcgaggcggcgggagtggaggagcggcggcgcggtgggcctcggagtcggaggggtggagcggtgcacgaggaggagcgggagggtggaggccatcgccatgggtggtgcttgcactgatgctgcaactgcaatggtgtgaggaggagcttgggttttgggtcgcactggactagggttctactagtagttgcaattttggggagaaaatgatgaggtagacgaagatgctagcaatggatgatgggctttgcatatttgggctctcggcttccttgttgggctcttggcccacctacatttatctatctatctattatattatattattaaaacagctttaaaagaggcaccacgtttgctgtgggggataaaaattctcacattaatcggagaaaaaggaaaaaaaagaaaaggagagtccaagtagaaatacaatataaaaatagatgaaattcggaattaaaaataattaatattgaaagaagtttccatataagtacccaatacgagaataatcaaaattcgaaataaaaataaaataaaatccaaaattagaaaagaaaaggataatccaggtaggaatataattttaaaatagctgaaattcggaattaaaaataagaaatattaaaagaagagtctatataagaacacaatacgagattaatcaaaattcagaataaaaataaagtaaaatctaaaattagaaaagaaaatgagagttcaagtagaaatacaatttaaaaatagctgaaattcgaaattaaaaataagcaatattgaaagaagtttccatacaagaacccaatacgagattaatcaaaattcaaaataaaaataaaataaatctaaaattagaaaaataaaatgatagtccaagtaggaatacaattttaagatagctgaaattcggaattaaaaataaaaaatattaaaagaagagtccatataagaatccaatacgtaatcaaaattcggagtaaaaataaaaataaagtccgaaattagaaaaaaaaaagaagagttcaagtaggaatacaatttaaaattagctacaattcggaattgaaaataagcaatattgaaagaagaattcatataagaatccaatacgagattaattaaaattcagaataaaaaataaaataatattcaaaattagagaaaattaaaagagagttcaagtaggaataaaattttgaaacaactgaaattaaaaataaaaaataaaaatattaaaagaacacgatacggtattaattaaaatttggaaaaaaattctgaaattataaaaagaaaaataagatttcaattaggaatataatttataaataactcatttgggataaaaataacgactattgagagaaaagaccatctaaaacacatgaccaaataaattaagtaacatgcttataaaggagtagagtggtggcggttgatacgatatataaaaactgttaataaaacaccaaatagaatcctaatgacaattaaaaggagggacgacaggcaggccgtcaaacaaacaagcaggcagttgccgggacttctataaagttaaaaaaaaccattgataatcaacgacaataaaaagaagaaggagcgagcggggtgtatagagtatagttgcagagccgccgatggttgacgggtcttctagaaaataaaaaatgaatttcaacgatagttatgttcgatttttagaatcacaatgacaataaagagtaggcggcaaacgggtcatagaggagcatagtgatattgtttgacgggacttctaaaaattataaaaaatggaacccaacaagacaataaactctaaaaactataaggtctaatttttaaaggttcggaacttctaaaaagtaaaaaaaaccaatgataatcatgttcaattttaaaatctcaatggcaataaagaagggagggagcgggcgagccgtaaaggagtacaatggcaaagccgctaacggtttggcgagacttcttgaaaagtaggaagtaaaaatgaacccaaacgataattatgttcgaattttaaatctcaatgacaataaagagaagagacggtggacgggccgtagaggagtataatggcaacgtttgacgagacatctagaaattataaaaacgaaacccaacgtgactataaactttaaaaactataagatctaatttttaaaggttacaagaagaatgaatagaaatagcggtagatcaagcaagtaaataaagaaggagatgacataaggggtagtagctggtgtgacttttaaaaactactccatccgtttcaaaatgtttgacaccgttgattttttagaacgtgtttgaccattcgtcttattcaaaaaatttaagtaattatttattattttcatatcatttgattcattgttaaatatacttttatatacacatatagttttacatatttcataaatttttttaataagacgaacggttaaacatttgctaaaaagttaatggtgtcaaatattttaaaacggatggagtatataattagaaacatatagatgataaggtttggtctttcgaaatcttaagaaaatgaggtagctatttaataaattttaagtaaaatcatagtaaaaaatatatgttttgtttaggtgctagtttaggtctaacctaactgtgcccatctcgccggcgccgcctccattcttctcatcctctccactgcggcgcggcggcgcggcctcttagcgccatttcctcctccacttggaagcagcagaagcggaagcccgtcgcccgcctggctcgagctcaaggccatggagtagtaagtaccaatcccttgctgtccattgctacctacctgtattttagtttgcccctgtatttctgtctctgtacatgtctgattgattgattagcgaagattttcatgtgttctgtcccagtgatgagcagtttagtaatctgagcacttgattcagttcagttggtgctccctccactgcaatatgctgtgaggttgaaggaaccgatcgatcgataattccatgtgcactgttgagaataggcattctgagggacagacatgattcagtttagtttgcttcttcgtattttagattagtgttttaatcttccttttcatttcagtgtgattcttggtgttaaatacttttgctggtggaatggagttggagcctcagtccaggctttggttttccctgatcagatccagtcctaattgcttgtttgtttatcagttatgatcagtcacttgctctgacgattcggagggaggatgaatagcggatcacaaaacgagatgattgattcatgtgagatccaagcacccatcttgagctgtattttctttagagttcttgacggtctggaatcctaatgtgttctctttccatggaaaatttttgggcatttcagtttcagagcggcaaggagccaaggatgcagcagcactagggtcctagtccaaattgtcagctgggggatcaatggcaatggcggagacggtgaggctgcccgaacagcagcgtcgcaggcctctcaccattgccagcctccctgaagaaattatgtcggagattctgctcctgctgccgccaaaatccatcctccagtgccgtgccgtctgcaaggcctggcgggacgtcacctccgaccgcgccttcctcctcacccaccaccgccgccagcctccacagcgcctcctcaccttcatccgcgacgtgggcagtcaccacgatgacctggatatcctggactactgtgttgaagccgttgacttccgcacacaccagttccagtctctggcccggttcactggccaagattacgactgctcactcgaagacagcccattcaccgtccacgcttcttgcgatggtctcctgctcatgtcctacaacaactatttgcatctctgcaaccccactacacgtcaatggctttgggtctcccccccggcgcttcaacatgacaaggtcgtggggctctatgcacatggacatccttccgaataccgagtattgtactatcgagaatttggtttgggacgtacattctacatcaccactgttggctccaggaaggagaggcgcatttggccacattcatcatcagaatccctgagaaagtggttgacaaaagggacagaggatactgaattcaacaagcctttcctgtttcatggaaacctgcactggttgccacagtcaggtcgacaaaacaagatagtggtgttcgatacactggatgaggcgtttcggtggttgcatgtacctttcaagatgcacaatgtgtcctcattactcgagattgagggtagccttgccatgtcaaacagccatattggatcatcaaaggtggatctttggcttctgcaagattataagcatatggtatgggtccacaagtatcgaattgaattgccagtgatagagattcgccgtttagtagaagatgatgtttggtttcttcatattgtttcccaagagggtgatgtcttggttgatggatcttattggcagtttcactacgacatgaagggtaatttgctggagaaatttcaatgtagtggccgcatgctgaacattactccacatattctccaagaaagtctcgttccacacgaagtgttccaaattctagataatgaaagtagacatgcaccacatttcttcagggggttgtagagcatactttctgtactgtgaggctatttcacacttttgggcgtctattcattggatactgcaattttagcgatggaacttaattttgtagtgaatggtcaatgatctgttgttgcaaagggcagcattcactctgatcagtatttctgtacctccacatgttcatctttaacatcgagggtatcatttcagtactgtacgtgggaaatttaaatgcctgagactgttttttcctggtttgtggaagtctgagactgaacagttgattatgctcgttgtttatttcaacatcgcaagatggttacttccttcgtttcacaatgtaagccattctagcatttctcacattcatattgatgttaataaatctaaatagatatatatgtctagattcattaacatcagtatgaaagtgaaaaatactaaaatgacttgcattgtgaaacggagggagtactttttattggcttcttgcaacttaattttgccactctggtattgaaaggtcattgtctacttgtgttggtgatgcgtatgtctgatgagatccttagtgccatttattttgagtttgttgtgtcttgctggaattgttgggttacattccctgtttgaacagtgactctggaattgttgggttacattccctgtttgaacagtgactctggaattgttgggttacattcccagtttcaacagtgactagtcatgaactggatatcctagtcggtaaggaggtcttatagtgactcaacttgaatttatgactgcaccttcactgggctgctggaatttcctcaacctttgtgcttgttgcaggaaccgaattaccagattgatgttatctacggagtgatggaatccaagtatccaacaggaacaggtcctattaccatcaggacccagaattataacatgcataataaacacgaaacaggagaggaggcagtatagtcaagcagtataattatattcttgagattgattaattatcggcaactagctggcttaattacttgcactcatccaagtccatacaaaagatatacagtaccatttcagctttttagcccatcattcgcttcaactcaaccggcaactgggcttaatttacggcccaaagactggtccaatcaaaagtgaactatgacgaatgggaataagtatatttttcatccctcatctcttgcccctggtcgaatcgcctccttcaatagcaaaaccgggtataatgactccctcatctttgaaaaccggtgcaaatcgactcttttggtggtttcagaagcggttttatcctacgtgacacttgtgggacccacatatcggtgaaaaaataaaaaaataaacaaccccacatgtcagtcatcctaatctcaaccttttttttttctcaccactctctctttcgtgttctctctctcttgtcggtggagaagaagctcgactactacagcggagaggggcgcccgccgcaacagcaggagggggggaggaggggcgcgacacagagcaagcagtttccgaggaggaggacgcgaaaccgcgtgagcacatggcaggggagggaccgatgggtgggaggacgcggtcgccaccgcaacgtccttctctgctccttggctcgtctccacggcgtcattccgtgcggggaggagctccaatgtgatgggttgctggtgctgtggggacgacagggtggagtctatttgtgcatagagtctatttcaagaagaagaaccggaggaggaagaggtagaagcatgagagggccgacttgttccacgacgttatcgcgcccacgctgcagccgatcacgcacgtggagaggacctgggcggctacggcgtgtgcggagaagagaacaccaaccggctgcgcgtgagggaaggagccgcctgccgtggcgcgcgtagacaaaggagctcgccgaccactactccgccggcaaatagagaacgggagaggtgaggaaaaaaaggatgagatgttttttttttcattttgctcttactgatatgtgggtcccataagagccacgtaggataaaaccgcttgcaaaaccattgaaggagtttatttgcaccggttttcaaagataagggagatgttatacccggctttacgattaagggagacgattcaacaaagggtaagagatgagggaggcaaaataggcttattccatgacgaatgcttctctccccgtagcagcccaggtgcacatgggcccagcaaccgcagccgcggaggcagcactcgcccgccgcgccgccgacccgctgcccgcgctccgccgccgcgacgcgctcccgctcccggcgcgcctcttcgcgcagctccacgctctcgtcctcaccgccggcctcgcgcgccattcccccaacttctccctcctcctccgcctcgcctcccctctcctccccgtctcccaccgcctccgcctcctcctctcctccccgctcccgcccaccaccttcctcgccaactccctcctcctcgcctcctcctcctcccgctgcctcccctccgcgctctccctctacgccctcctcttcctctcctcctcgccgccgctcctccgccccaacgccttcacctacccgccgctgttccgcgccgcgcctccggccctcgccctcgcgctcgccacccattcggtcaaattcctcggcgcccatgctgcctcctgcgaccgcgtcctcggtgccgcgctgctcggcgtcttcgcgcgctgcggcaggatcgcctcatgccgccgggtgttcgaccggatcgcgcaccccgacctgccggcctggaacgcgctgctctccgcctacgcgcgtcttcgtgccagggacgtggcctgcgccacctctgcggcggatgcaatcctcgagctgtttgtgcggatgctatccttagccattgaacccaacgagatcacgctcgtcgccgtcatcggcgcgtgcggcgagcttggcgctgtcagccacggggtgtgggcgcacacctatgccgtgaagcgccggctcgccgtcaactgcatcgtggccacggcgcttgtggagatgtatgccgggtgcgggaggctggacctggccgagcaggtctttgcagccgcttcggacagggacacgcgctgctacaatgcgatgctccatggcttggcagtccatggccatggccgtgctgccctctccctgttggacagaatgcacggtgcgggcgtgccggtggatggcgtcactgtgctatccgtgatgtgtgcttgtgcccatgctggattggtggatgaaggtctggactacttcgacagaatggagatcgaattcgggattgagccaaggattgagcattacggatgcatgattgacatgctgagccgggctggtcgacttaacaatgccgagaagctgatccacgaaatgctcatcgtgccaaatgccgcgatatacaggtctctgatccgggcctgtggcattcatggcaagctggagctcggtgagaagatgatcgcagaattgatgcgacttgaaccggatgacagtggaaaccatgtcctgatttcaaacttctatgcgagaacgaaccgatgggaggatgccaagaaggcgaggaaggagatgaagtccatgggcattgacaagaaccctggatcaagccttgtagacatcaatggagttctccatgagttcttggtgggtgacaagacacaccctgcctcaaaggagatatacaccatggttgaggagatagaaaccaggttaatcgagtgcggacgccggtcgagcacctcgtctgcgttgtttgatgtcgaggaggaggacaaggcggatacactgtcctaccacagcgagaggctcgccattgcctttgctctgatcgcttccaatccaggagctcccattaggatcatcaagaatctccgggtgtgtgccgattgccatgagagcgcaaagcttgtatctcgggtgtatggtagagagattgtcatgagggaccgtacccggttccatcacttcagagacggggtgtgttcttgtggagatttctggtaaatactcgttgtgttgtattgtacattatacagtgtaatgtgctgtagatttctctcataattctgtggtaatgggatgtgctgtactggtctcacacatttgctcgagatcacaggctgtgtttagttccacgctaaaattgaaagtttgaagaaattagaacgatgtgacagaaaagttggaagtttgaagaaaaaagttggaatctaaatagggccacagttcattcggttgtagtttgcatggttcaatatcagtttttttttacaatcattttattgatgacggatcaagtgttacatggcaagtggtcaaagaactgaaatgaaattccgaaacttggccgtcgtagttcaatatcagttgtcagaattcaaacagttgtagtttgttataacttgcgcaattcgtgcatatgtggctagatagttcatatgaaaaagaattatttcggggcatatgtggtctattctttctctagatagttcgtatgaaaaggaaggaaaaagtataaattacccctcctccccccccccccccgaactatgacggtcgtccgaattaccccccgaaccacaaaaccggacattcttcaccatcaactatgcaaacggggcgaattacccccctcgacccaatccgcggtggttttagtctcgtggcgtacgcgtggcagtccagtcagcattttatttattaaaaaaatatgggacccacctgtcatactcctattacactattcctttctctctcttctctcactctcaacatctctctctcactcttcccctctctctctcctctcactgtgaactatgcaagcggcgggcggaggaggcgaggcgaggcgaggcgtggcggcggcggcggccaggtgagcgcggcggcgggcggacgcagagctagtggccgtgccaccggcggtgatgggtggacgcggaggcggactaggcggccggcggcggaggcgaggcgcccgggcggctggtggcggaggcggcggacctggcggccggtggcggaggataaggcggacctggcggccggcggcggaggcgccctagcggagctcgctcgaacggtcgatgacggaggcggaggcggaggcggagcatgcgtc

SEQ ID NO: 4992 - DNA, 55796 bp, Oryza sativa
tatatgaatgtgggaaatgctagaatgacttacattgtggaacggagggagtaattattaattttcaagtttggaactaaatgaatacgatataaaattgagggtccagaacacattcaacttcgtattattaattttaaatttccaatttctgtgaaaactataactaaaaacatccatggtattttcaatggcatgttttatttaatataaattcttattaagatcttcaatcatgataatatgacccatctaattattaatggcaaaatctttctagcatacaggatcatatatatgaggagacaaacataaatgcatgttatatcagcatgagtttgtctatgatgcatgttcatccattttagcttttatgagtgctccaagaatattaggtcttttgaccactccaactaaaaggaagccataggcaggacaccggcactccaatgcaatagacgtagacatatagtgatgactatattattctgcaaaggttttcactctttcatcaaattggatggatatgaagaattaagaaaaggaaaaagtacgaattaccccccctgaactatcgtggtcgaacgaattaccgccataaactcaaataccagatattttacaccctcaattattcataccggacgaatttaccccctaacactgttttaagttgttttgaccaggagtttgcacatgtggcatcaacgtgtcaatccagtccgcaaaaataataacaaaaaaaattgtagggcccacctgtcatctatttcttctctccctcaatctctcctctccccgtctgtttcccactctattcagctcggatgggcggcggccggacggaggaagcgggagaggtggggctcaggatgggggcggtggccagtggcggaggcaaagaggcggcactcgggatcggggcggcggtcggtggcggaggcagagctcgggatgagggtggcggctagtggcagaggcgggcggaggcagctagaggtgggactcgggatgggggtggaggcggtaggaggtgggatgggggcgggcggtggggctcgtgtccctctctttcctctcggttcaaccccctctcttcggcggttggaaaaggggcgacgaccggtggtggaggcgggtatcgggatgagagcggcggctggggtgaggctaggaacagggtggcttcgagctcgctatggaggcggcgaggtcaacggcgagctccatgacctaagctccgccgcccctactgtccccgccttgccgagccgagcaacgcgaggcgcgagtaagaagaggagcgagagggagattgaagaagaagaggtgtgaggacctccgccgccggctacccaagcgagctccgtccgcctccgtctgagcttctcgcgaaaggccaaaggggagaagaaggcatcagcgaccggatttgagggaagcggctcgctccgcctccgcctctaccgccagccacccaagctcctctcccctgctctctcatccttctctcctcgaggtatgaagacgccctcccatcatcgacaacagtggagcagcgccctcccagcgactccaccgcctccagcatcattctcggtgtactcctccgccaaccgcagacgccgccgccagtcggccgcccgagctctttcctcctccgcttccaccgccggccgcccgagttctctcccatctccaccgccagctgcccaagcaagctctacctttgctgtcggccgctcaagcgagagagagagagagagagagagcagggggattggggagggatttggttgagggagagggatggcaggtgggtctagagagtttttttattttctttgctgaccggattgccacgttggtgccacgtgtgcaagctcaagttaaaaaccgcttaaaacagtgctcaggggggttatttgttcggtttgcataattgggggtgaaggatgtctggttttatagttcaggggggtaattcgatcgaccacgatagttcggggggggggaggggtaattcgtaccttttccttaatgtgttcatgtgttttttccttgatgacaagatctattcatttagaagccaacaactacatcgactctagattgttactttgaatttcattgtttgtttactttctacgttgtctaaacctaacaaggatcagttcattataacatatgcttgcataacattagataagtcagatggaccattggatcttttcatcttaaccttgttgttcgcttgcaatgatcagtcaggtttcctacaatgttaaaacaaaatagttcaacacttgttcttgctatgttcaaaattatgaggtagaggctactgatcacagatataaacattactttgcgtcaatttcagtctattactcaagatgcacaagcatgtctaaacaaactctctttgtaccataattttcaaaatcaactggaacaaaaagcgagaggtgagagcatgcatagcttaggagagagggtggtaatggttgaagatctcatccatgcacgtccatccattttacctttggtggccgctccaagaaacttcgggcagcatgcaacacaccatgcttaccatctctatgcaataggtgtaggtagtagtcaacacaacttaatttggcagatactatatctacgatacggttcatctaccttgttctcacctgaatatgattgatgacatattttgtttttttttttgccaagcttttgaaagtctagtgacacactacacgcgtgacttggtcgatactaataataactgaggtacgcaatcatgcatatatatatatttcttggtttggaactaaaaacaagtggagtactagagacaagcctttagtggcctcatcatctatcgtttagtgattgaagtggtctctttatcactgtacataatggcagcaagcttaagcatatatatactctcgtaaccatggtgcccatgaaagaaaatggcttaaagaaagaatggaagaaaaatggctcctagatggctagccatttcaagcgaacaattgaacatacacaaagccagcacaacaaactttttaaatttcaagttttgtatgcatgacttccatattgtgttggacttatgagtgatcagtgcaacctgctcgtgtggaagcatctttattgaatgttgatccttaatgaagtttaggttcaatttagaacgaaaaacacttacgagttgtgtattcttaggttcattatgggactctatgcagataagtatttagggagtagacacatactcacatcacaaaatagtaagcacgttactagatgcatacacaccatcatactctagttatgtgaagcaagcaatcaaacgttcataaaccaaagtaatcaaggctcgaatttagatgtcatatgtgccattgggttgtattcttttcttaagggttcaaatttggaaacacgtacgttcaatgcatatgcgttgtttcgattttagttcaaattgcagggaaacaaaatgtgtgccaactgtcttcttggttgattatgttatgccactcttttcttggttgtgcatggacaactaagcaattacttaaatcaaactatatgtgtcatacttttgttgttatgtaattaatgagcaaatatattattttaattattcaattccaagcatcacacctataaatgtccattcttaattcaaaatccagactcataaataatgatggaagacactattactttaacgagtagaatgcactgctctatgtggaaaccttaggtgtaatcaataaatcactaaacaatactaacgcattgtttttttacacacaactaaactcccaattcatgttgaatagtccactaactttgtgtagaaaagtctaaaaatatagggaaataacaaaagtcaaatcccacatgaaagtaacgcatagagcaataaaactaaaacttgggtcaagcattgaagagggagccaaaaaaaaggggaaaccgcccactttccctcttcccaaagccaagcgaaccatgctatttaatccactacactatttgtgagccttttacaactatgctcccactccgctccactccactggttttttccattccctttgtccccttttcagatctccctttccctctccaagaaaagaaaccatcaaagaagacacaacgagataggggggagtggctactatcaatctccatgggcgcctatgaggccaccaaggtggtttttgcccggttgcaagcgcttgagcccaatcttgctccaaacatcattggcatgctcctcaccaaggataacaatgagatggacatgattcgtctcgcatgtggccctgacaacctcctccaatctatcattgccaaggtgcgcaccgacctcacaaacaagccttcccctcctatggcctcctggggcttcccgtccgatataggtgaggaagcatctttctccgttgacaaggtggggtgtgatggaggtgaagagttctcctctaaggagtatgattggaggttacccatcggtggcaatcaccatcggagctttttgtcaagcaccgtcgacacccttgggtggaagccatgtctatactcccaaaggttccatcttcaaccctataatatcacatttcttagatccacacactaatctctattgtaccagcggagtgaccacccatcttggtagcgacgacatgcaagagtactcttctcgaccacctcagatagaccaaagtgacctaaccaacaactgcagtgcacgacagatctacttgaccttcccgcctgattccatttttagcaaagaggacgtctgcaactactttaggtatcacatgttccaccatagtgcccctattgatgtgtcttgtttcaatattggagcatttcataatttaatgaatgcaatctgttttggcttgtttgtgtcatgtggggacaaccagcatgtatgggatggtgcaagatgtgcgtatcccataccaggagaagtgcatgtttggtttcgtcaccttcgcctaccaaaagacagtgaagctaattcttgccaagggcaacccacattacatctgtgatgcacgtgttcttgtcaagccatacaaggagaaggacaaggtccccaacaagttcaggcatgttaatcattgcctaattccacttcgtatttttgcacatatattaccttttgtgagtacttctattgattttcttaaaaattgcataaagtctattgattttattaaaattgcagaaagtttcagcaaagtgactcttctagctacatgaatcacaatagattgctttattctagggggccctttgacctgcgacgacaccaaataggtgaacagtgatatctatgtggtgcttgtgttttgatctcttttttttaacaatttacaaggagtgttacattgtgttagggccgagaattttgtatagggacattgctagtcatgaggcatcttttaggatgaagcaagatgaacaacaacatgcgaccgagctgcaacgctgttgcttaatgaggcttccgcttctcaatcttcaggattggggccatcatctcagctctcccatgggttcacatgtgcttctaggacaagttgataacaaatataatattaatgagaatgacaatcccactcatttggaggatgtcacatttcgaggtctagttcttggtcgttgtaatgtcttgtctattaattatgttttttcggaaagtttattaattatgttgtactaaggttgtgacttcttgttttatttatagacaataagctgaagaatgagtttgctatgagggaaattgcctctactgcaatctccacagcagccaagcgcacggtcatctctacggaagaggggaagagagaatatggtcccaaggcagcaacacctaatgatgcttgtggattcctggaaaggtaagatgatgatagaaaaaggtttgctagatggacactaaaacgtaggatatttattttggaaaaaggacagaatataccattaaacttgttacctcttttatttgctatatttttccttttttttcacatgtatgttatataattctctctgacttaaacaattcttgctttagaagcaaatacaaaagaagataaggagtagacaattaataatgttgatcaaatgtttttcttgattagaaggaaccaatgggaaaagaaatgcaaaggcgaggataggataaagcagttaagaaactaattagcacaataaatgcctattattaagtagtttttgtgcaagtcatgctagttgccgaaggactttctggtattgatatgtttgttgatgtttgtttttctggtattgacatgtttgttgatgtttgttttgtagtggaatggagtacaatttgcctcatagccccttctcatctcccaccaaggcttccaatgttgcagcaacagctcacactagtaacatcagcagcagtagtagccctcataaggtggcctcatctctattccccccaacatgcacccttgagctgccccctacaactcatgcttccttcaagcgccaaggtaaaatcccaaaccaaatctcttccctaaatcactgtacatttgcaattccatgttagcatgtaattccatgttgcatttgcaattactgcagttatataagatagactattttgttgtatgtcttcagattctccccttgctgaggagtagttggtctatgagactacacatagtaaaggagagggggcttcatctttgctgagtaagtatcagtaattccaacctttttggagtgaaacaggaatcaactagtcaatattatgtactatatataatctgcctcctgtcaagtcttgatgatcgtgttattggtttctttgtgttgtgtacagggaaagcattaacagatcatacataacgagaggaatgccgacaaagaaaggaaataaatttagcttgttttagctctagttcttgggtatatggtattactatagtaccagtcttttagctcagtgtcaagacaaagtatcaacttgtatgctcttttaaagtatgagtcaatataataaaaatatatcgtagctcatgtagtagtaacaaatactagcagtctagcagtgtgaagtggaactgctacatatacaaacattgaagagagcagtatatcagcatctgctactaaccaactgcttctatttagataaaaatgcttcgcgaattgcttgatacctgggccgtagcttgtccagaggcagcagatgttccttcacgagtggcaagcccagaaaaccctccatccatgcagacagccaagggaacttgtcgctggtgatcagcctgacaccggtgatgtcctcatatatcggaatcacatacgacagggagcccagagacaagtcgacgaacccgatcctctctccaccaaagaatttcttctcatcgagcaccttttccagaaccagcagctgctccatggcagcttcgtatgcatcctcctgctccttgccttgtgtggtgaaccacttccaaattggaggtgacagctgcaattgtggataaatgattacttaaaagtttagacttgagaaaataaacaaaaaaaattgctgaccttgtccagcccaaatttggaccagaaacgtgccatggcacattcatagggatcttcaggcaagatacggtatctcaaatccttccagacatcatcgatgaactccagtatgacgtctgattcagcaatcggcttgccttgatagatcagcacggggaccttcttatgcacggggttgcactccagaagcaagttgctcttgttcctcagatcctcctcgatgtagtcatactccacgcctttgatccttagtgcccacatcactttgacaccttaagggcttgaccatatgcctaacagcttcaccttctcagctccatcttctagttcttggtgatccatggttgggactgcagagcaatgttgtgagtgagggtttcagtttgaacaatttggtactagataccttcactggtagtttggtactagtggttttcttgtggaggagatctgattagtttcagagtgtagcaatcagtcaactttggtggcttgacttactctgtctgcatcctgtttagttccattccatcaaaacctgaataagacaataggtgtaaattccatcacaaccttcagatatttatttagaaatctagaatgaataaacttcagttctttacagggagcagtgatatagtgcacttcgaagtggatgttcagttcagttcgttgctttccccacatgaatatgatgtcgtcaatccaaccatctagttgagatttccaacctttcaatcgatcaaagctccactcaattactagtacatctcaacaaattggatttatggaccaagaacattacataaaaagtcatatacatgaatgctccagcgaaatgctaaattcccatgtgcacagtaataatgcctaataaaattacacactacaccgaacaagaggttactactcgtgtgcgctgatgcgaggcagattagctgcaagtaagcacaggcacagctgcgaaattaatttatgcaagctaatcgattggtttggttttctactaattacctcgagcgagctcgaggtggaagatgtcgtcgtcgcgcgggcgcgtgcttgcccacgctggcggcctagctccctggactccttcggttgagcgcagcgtcgcctcccttcccccagtcgtgcgccgccgccgccgtctccgcaaccaccaccaggcgccggcgccgatgccgatggatatcttgggccaatcaatcccgaccatcgcctccctctttgggcttactttacatgggctttgtgatgggcctggcccacaaaattacccccatcactatcagtctctccttccccttcctcacacgaatcgaatcggactcgggagcccttccgccgccgccgccgccccgatgttgggacacctccggcgatcctcccaacgactgcccgtagccaacctcgccgtatactcgtaagagctatcctttgcccaaaccactttctcttttttataccccctctttctccttccaactcaagtcacccttgctactactggactgctgcttgattgcttgtgttcttgcgccatttaccaacccagataatgtcaggatgcagccttgttttgactgtaggcacaccccaagtcggctcaacattctattcgttttagtgttgtgcactagcagtgagcaatatttagtcttttgtttttaattttgtctttccatgtaattcttgaagctgtgtgaagactttaagcaaccaacctactgattggagattgctagcactagtttaaaagtgtatgatagataacaaaacttgttattgatccaacatgcattcttaaatcaggagcttttagcgttgttgttcttgttactgagagtagtttttaacgaggttgcttcttgctagtcaaaagtgactaatgttacttatgttactgttctctacattgtgcaggatccagagttcacatattgaggtactctcctttgtcctttccttcaccacaacattttacaccccttttacaaattcaccgttccattcatgcccctgcttttagttcatagccggctggtgtagaaaccattctaccaggaatttctctgtagatacaagtaataaagtttccaacgatcgggggtatcaatcaagggagttgaaaccaagccttgtgaaggtacgtacacaaagcttaaactgtatacttatctttgtgtgtctttcatttttcaagccacaaggtttgaaccttaaagttgttcccttagtatcttagactagtgtgccaaattagtgtagttacctattccagtcatacttataggaggattatctatttcttcacagttaatctatatccctgttaccatggcactgtcccttgtttatgtttccggttactccccgaaggcttaagattcaacccatttcatttttctaatccaaccagtttcactaaattttctgttgtaggatggttttgtttttgcctgtgttgtgactcttatcttttgagactgctggatgtttaccttcacagtcctagagttatagaagattggtgattgattattaaagaaattggctttgcattgcaggatgatgttgcaatcatcaaacacatacaaaacagtacaaaggaattgaaacaagggccagttgggaaaaatctatcatcggcagagaaaaggaaatttcttgtcaacactgtatgcacagctagttttcgtattgtctagtttactatttgacagcatgaagtctctatgataattaggttttgtttataatcggcagagaaaaggaaatatcttgtcaacactgtatgcacagctagttttcgtattgtctagtttactatttgacagcatgaagtctctatgataattaggttttgtttataattgcttcctggtagagaccaatcaataatttttataacttgtagctgcttgacctggaagattcaaaagaaggtgtttacagcactctggatgcttgggttgcctttgaacaggagtttcctgtggcctcgttaaagcaagcacttgtagctcttgaaaaggaggaacagtggcatagaatcgtccaggttttggatattataatttacttgattttaattgtgttttatcgtttgtaaacccaaaattaaataattggctaactacatggttaggtgataaaatggatgctgagtaaaggacaagggaagactatcagaacatatgagcaattagtgtgtgcgcttgagaaggacaacagagcagatgaagcttgcagaatctgggagttgaagatagcccatgatctacaatcagttccatggcggttttgccgtcttatgttgggtatttactacagaaataataggctagatacgcttgtcaaggtatggatcttaagtctttgtccatcaagtactgtttttcttatattttaagctaatgatcctcagtagaagttgatgggtcttgagtgatcaatgatgccgcttagtctcttacagattctatattatgataaaacccacttatgtgtatttcatttccctgtttttgcttatgatttcagctcttcaagaatcttgaagcatgtggtcgtaaacctccaagcaaagatattgtacggaaagttgaagacacatatgaaatgcttggtctagtagaggagaaaaaggaattgcttgagaaatacaaggaattgtttgacaagccatcaagtaatgatagaaagaaagggcggcagttcaaaaaggctgagaagaacacgaaaaccggctagacatgtagtgatgcctgcacctctaaaatctacagcatcgagcttccaggatggcataagcttagagcttcacagtgcaggttggaaacatctgaatatctgccagtctcttgcccttgagtttcacaatgcaagtatgtatcccccggaaaaaaaaaatagagtatgtacggtagtacagttgttggaatataaagctgtgatcattgtttcctacaactgtcgcttcaagcattgttgtcattccttttgcctccgtccagatttgtttctgacagtgtatccatactcagatcagagcctgatgtgatgcagcaagcaatggtatttgctatgccctctgaatgttaatacatcccgtattttttaactgatgcttccaacaaaacactgctctgaatgttaatacatcccgtgttttttaactgatgcttccaacaaaacactgctcgtgttcaatccttggcacatttgttattccgtcttcctctgtccagatgtgttactgagcgagcatccagaattacatgagaacctgatgtgatgaagcgagcaaattgttggtatttggcgtgccgtctgaacatgttctcttgttatttgatgcaaccattggcacatcggttaatgggccaacccaagaaatatatatactactccctactccctccgtttcaaaatgtttgacactgttgactttatagtacgtgtttgaccattcatcttattcatatcatttgatttattgttaaatatactttgatgtacacatatagttttacatatttcacaatttttttaataagacgaacagtcaaatatgtgctaaaaagtcaatggtgtcaaacattttgaaacggagggagtagctcgctgagccagccgattgatctgtcaatctctatgacaggattagttgagatggaatcgtattcgctgttgtctcctatttcctttgtgtacaagttgtgcaatctacggtgtatataatccgattcaggaggtgtgcggctaatataatccgatacgatttcgaattcacgacccaagagtttgtatataatcggatcgaggtgtgtacatctgatttgtgttgaagatccaagagtagctagcaacctgatccagaggaagacgaagaacatggcgatgacggaggaggagatgccggcggcgaagaagatgaagatgacaaaggaggaggtgttgctggcgtatctgtcgcgcgaggaggaggatgggaagaagaggaagaaggtggtgaggaggctggggaaggaggaggtggagaggctgctgtcggtgacggtgacggtgaccgtgccgaccctcagcgaggaggcgatggaggaggacgatgaggacgacgaggaggatgtgcgggagagggagatgctgctccgagccgaccggacgctgagggaggccgtcatgagcatgcgcaaggaccaggacctcatccgctccctgttcgaggccaagggctacgtcgacgtcctggacgaggtctccgacgacgacgacgacatggagatggagccgttgtaacataacttcacctgtaatctgaaatataccggaataaaacacataccagctatttcttttgattacggatttaatttttaagtagttaatatgatattgatttactagaccgtcatatcagtgtcacgtaggacgatggagccatcatgtaaactgctaagggattcgatttacactagttttaatagtcgatggatactcttctgtggttgagggatgaaaatgaaagttaagtttttcctaacgcaaacagcgctgattttttttatgtaagcacatgcatacaacctagtaatcctatctttctataaagttaaggccctctacatcctaaagctcaacatgcaaagatgctacgtcatccgctaacatttactacatctcaaatctcatgcaagcatgctaatttattaagttttagagctttaaaatgcaagcatgttaattaaattatcatcccacataattcacataatatttcaatatatctctccatcactttttataatatcctatatgcctatatagttcatctcacttaaattttagagctttaaaaaattcaagcatgttaaatcatcattccacataattctcaaaatatttcaatatctctctccaagtctccatcattttgtataatatctatgtacctatgcatgttatttctctcttctgtcattaagctatatcatctcaattgtttttagccctcaaatgattaatctatggttggaattatctctcttattttcttctctcataaaaccacatcatattacttttaaaattaggtcattattctatataccatttaaattatgataaaccatatcaacttatgcaagtttctatcatctaactatattacacattatttatatttcttaacatcataccaaactcccacagcaacacgcggggtttcacctagttacaaaaatgagcatgcaacaaccacatatataggcaagacgctcaatgaagcacggtgcatccattgatccagttgatcaacaaactattggcccgctgaaaacgttagcgcaacgaaccgcgtccaattggttaattagatgcatcattacgcgagcaaacatgtttaagcatggtttgattgtgttgttttcgttttacaacttattgtagcatatgtatttcttacattattttctaaaacagaaaacattatttcttaatgtaaacgaaaacattatttcttaatgtaatccgagtattgctattggctgaaagagaaaaggagaattaatactatcaggctgctcgcactttaaaaaccacaaaacaccccgcaaaaaaaccgcaaaacaaatagctcatgaacttttgttagaaccggatattgacagtggtcacgtgggtaggttggttagaattagaattccaaacaatacgtgctgtaattactgggctgcgcgcatgtgtcagcgagacacggaccggtttgcaggaggacccaggccgagtccgagtccgatccattcgtggtgggctggaccgagtcggaggccgggatgcgaaaggcattaaaggcggaggcggtgtcgaactcgaacccaaggcccaagatacaaagaagaagaagagagcgagaggagaagtaaacccaatatgtagctccaaggatggcgtgtaggatcgaatcacaagaattaaaccaactagatgggggtgaatggttggtatacccaaaaaccaaaaacttttagcggaaataaaagttaccctcgaaatcgacggaagtcggtctgaccgcccgtatgtcgccggtctgaccgccgcttgccgccggtctaaccgctgaaacccggtaaacacaaatcgaagaacttttaaagtggatgacgactttattgattctctctatgtttacaacgtgcaccaacagcactccttacaaaaatttcgactaaacttgaaaccctaactcaaaactcaactcaattgctctcaaaagcgataccgggaagcctcacgctccccctctatttatacatgaggtaggcagcctaaagccacgaaccaaactcatactaagaggcctaaacaacttaggaaaccctctagtacaagaaagaaactttacataaccaatcgtaccaaatttgaactccttccaaattcgactccgtatcccatacgcacataataactccatcgtatgccatatgaaatctccatcaaccacgtgcatcaactctagcctaagtatcccgcatgatctctgatcaccacggacgtcgtcttatctccaagccgactccctatcaatcaccgcaaatactctcccgaggcatcgagtcacctacacatgaaataaataaaaaaaccatattctgagaccaagttatctccaacttgactcattagtagcagacaacagtattacatacgtatagtattcatcgagaagtcataatcatgaaataatcacggatatccaaacaaacaacccgaaaccgaaaccgacacagtgtcggccggtcagaccgtgggctggccggtccgaccgctcgatcaccgccggtctgaccggcatacacagcccggtctgaccggtcacatgaaataataaaatcctgcgattacctgtgaatccaatcatctccaaaaccacttcgtgaataaattccaaataacaaaaccaataatctccaatgtctaattgttcatcacagaataataatcaaaaatacctttgattttatatggcgatgatgagggggtgcgccgatggggagaagcggcggccccatttcgagctggtgtcggcggcgaagaagaagaagacgacgacgacagaggatgatcatgaggaggtgttgctggcgtatcggccgcgcgagaaggaggacgggaagaagaggaagaaggtggtgaggaggctggggaaggaggaggtggagaggctgctgtcgttgaagctggccgtgccgaccctcagcgaggaggtggtgatgcctatgcctgacgacgacgaggatgatgtgtggcagaaggaggtgctgctccgagccaaccggttgctgagggagagcgccatcaggatgcgcaagaaccaggagcttatccgctccctcttcgaggccaagggctatgtcgacgtagaggatgaggtctccgacaacgagatggacatggacatgcagcttgtctaacataacttcacttcacctgtaataatctgaaatatatatatactgcaatctggaatacatacgggaaagttctcttaattgttgtgttgggccctctagtgcaataagaatcatgatgtggtcgacttttgtacccatgaaggctcttgaagatgcaagtttctgctttcgaaaccccgaaagatgacgatcaaacactatatgtaccgtgcatgtctgcccgggaccgggaggctaaagtgtgtaaactactcctagctagctagctagacgcgtttaactggagttccttgaaatatcatctctgatttaatttgttcgtacagagaattgccaaattcttaaccaagtgatctgctcatttctcactgccaattgatctgctttgcaagtttgagttttcttaggtgtgatgtgtgaagaggatctgcttgctgtatacagttttttttctctttttcacggagagttaataggtcccttaaaggcggaagaggatcctctcatttacttccctatgacttttaagtggcacaagttagtggaaagtaagttagagaatcttaatcccttaacagccatgacctcgaaagagaccattaattaattgagttccactacgatactctctactagtattacggtactctctactggtattacgaagcaatctaaaccgtttgtcccatttgattaaagggttcagatttatttataatatcaccttaggtaatggtaaaccggtagtagaaacgtgaaggagcattattataaaaaaaaacggagagatgcaatcgtcattttagcagtgactaaatcttttttttcttctttagctttttttatgaatatgggcaatgccaatgtaatggatggccatatatcaatctagacgggaaaaaacatatgacaaagctatccctaattattatattaataaattattgatttacccttaataataaggcaaaattggttatatgcctaataatattgatagtattataccactaggagagagtataggagcgctctaattaattatcatgttccatgtagtacgtcaatacaattagctagactggtagagaattactacagttgtttcaattcagtaacacgtacttgaggacagcacaaattaattaatttcgatcgctgcagttcactgttgaaaagttaagaatgtactgaccatggccatgagcagaacaaataatagtctctttggcctaacaattactaccaatctctaatctctcttttagtactactagtagcacagtctacacagaggaagtgagattcagaagagcaggagtaaatgtactaagtatttactccatccatccatccgtcccaaaatataagacttataattaattttcttacatagtcttatataatatactttaaccattaatacatttcatgttaggtttctgacaaatatgaaattagcctcgtatgaaaaatcttcaaaatataaatatagtgatataacgtacatatataatacttaacataaataaatatagcctaattttattttttttaagaaaagggagcgctctgtaatttgggaggagtatttatttagacaaaggaggaagtagtacatcacatcaattaagcaatagagcagggagataaaatagttagtatgtttgattaacaatggggaataaattcatttgaggtctcttaattttacacttaatccgattttcatccttgaacttcaaaaccagatataaccagtccttgaactttcaaaaccggtgcaaacgagatccctcggtggttttggcttacgtggctggtttaactaggtcttcgtcccacgtggtattgatgtagtgcttacgtgccaattccatcctagaaaagtaataaaaaccgtggtcccacatatcaattaaacacaaaaattaataaaaaaaaatggtggaacccacgtggatcctacatgttattctctctccctcttcttcctcatcctcactcctcttttcttcccagccatggaactagctcaccttcctccccattctcgcgtgcccgcggcgggcggcccgacaacatgaaggttgtggccgtcctcgggtgcttctcctcgcgctgtggcaccgcctcacggtcgtcgccgctgccgttgtcgtcgtccccccagtccccgccgccactgaggacgacgacgacgccgccgctgataacgacgcggggtcatctgggatgacgcagccacatggaccagcacgaagttaacgaggtctccatctcctccctttggacgcatggcaacaagaggagaggggagaggggagaaggaggcgtcgtcgtccttgggctggcctccgattgctcagcgtcgtccgcgccgccaacgttgttgtcgttgtcctcagccgccttgcctctcgcctgtgctccgcctgccgcccgccctagcctttgcctgctctggccctcttcttgcaggagagagaaaggggatagggagagaacaccgcggcgcgggcctgggcgctggaggtgcacgcgctgtggaaaggacctgacgtgacgctgtgggtggcgccggccgttgcggccgccccgcctcctccctcccttccctaaccccacacactgtcctcctcgcctcatccctctccggccgccgctcgccctaccctgcccgatccgccccgcccatagcccgctccagccaccgctcgcccatgctctgccagccggccacaagcagggggagaaagaggatagagagatactaagagagagagacgaggggagagggaagaagggaggtgtaacaccctgaaaattcgaccgacaaaattaaaactctaaaaatgcgggctttcaaaaactttttaaaccaattgcatcatgccgactttattcgcctgtttcattggattttgatgtcggagtctattaatcgcgaataatgaataactagctaggaacaaaccataaaagaaaatctagttgactaaataaataattaaaatataaattaaaataaaggttaggtgggtttggaaataaataaaatattatcgcaaccagattagcaataattaaattttagtacgatggaataaccctaattaaaataaactatataaacagaatatgagtgatattaaattaaggaggattttagttaggataacacaaatgtgggatgtacttcatttatacaagatttagaaattatgaaatcaaatttactttgaaaataacctaaaatcgggaataataggaaagtgcactattcattgcccgcaaggtgttcgatgtggtccctagcctttccccttctctcccacctctcccctagcccagccccctcctctgccccgcgcgccgcgcgcccggccgccccgagccccgtgccgtcgcatcgccgtcgcgtcgcccgttgccaccgcgtcgccgtcccatcgcgccgcgcaccgactcgtcgccactgccgagccgtcgccgtcgtcgcctcgcaccccgtgccacgccgctcccccgagccccgtgccgccgctgttaccgcgccgcgccgcccgttccatcgccgcgcgccgtcaccatccggtcgtcgcgtcgcctcgcgcctcgcgcccgcgcgccgctcgcccgttccatcaccgcgacgcgagcctgccgcctcgcgccccgcgccgctgctgtgagccgtcaccgcgcgtcgacgtcgctgcgcgaccgtcccatcgctgcgcgcgtcccatcgtcgctccgagccgcgcgccgccgctgccgagccgttcccatcgccgtcccctcgcctctgccgcgccgcaccaatgtcgccgtcgccaccgccgcaggtcgccgtcgtctcgcgcctcgtgccgcccgccgtcgcgtcgccgcaaccgtcgcgtcgcctcgcgccgcgtgcccccacctcgcgccccgtatcgccgtcgcgtctctcttctcccttcccccccccccccttagctcttcccctcccctatataagcctcactatttccccctcttcccctccatctccacccctctcctctacccacactaccgcgccgccgcctccacgccgccgcgccaccgcaccgccgttatcgcaccgccgccatcgtgccgccgcgccgccgccctcgtgctgtcgtgccgccgcgttcatgcccccgtgccgccgccccagtgtgccgcaccgtgcgccgtcgtcgccgccgccgccgtcgccgtcgccgccgtcggtgagccgctgccccccccccctctttcttttgtcgccgagccgagagagaaagagagaggccgagggaggaaaaggagaggaaggaaggaggaagccgggagggaggaaagaaaggaaaaagagaaaaagagaaaagagaaaagaaaagaaaaaggaggaggaaagaaaagaaaaggaaaagagagaaaagagaaaaaggaaaagaaaatttaagagatttagaatatttaacatattagaaattaattataggattaataagaatatcgttagatgaactcctactatttaaaataccaaaagtactaagatttgattatagaattaattatttacgaattaaaacaattagatgaatcttaatagattattatagattatttttagtaatgtctataggagatcaattcgcggtaataatttagatcaattcgcggtaattattatagattattttgggtaatccctataagtaatcgattcatggtagaaattcggatgtaatcgctaggaattttagacgtatattatattaatcgtttagtcatagactaaattaaattgtataatatttctaggatttcgtccaatatttaactcgtaatagaaatttctaacctattatatacaatgctcggggaaagtaaattattgacaacgaaataattatacccgcaaagtagtttaaatcgaaattgggtttgccgtagtttgcagatagtaaagttaataaaaaggaatcgactttcgcattcgactttcatttggatttatttggatttttatttgaattctaaccgaattcaaatcaatttttgcacgtaactatagagcccgagggagttgcggatccaagcgaaggccaagacccgcaagactttgagcaaggcaagtcatcactattccttgaacatgttgatcccaattgcgaaattgttttgtttacaaatagaattgcatgcaatgatgaacatcccacttgtgattatgccatgccttgattattgtttacccttaaatctttgtaaccatgtttacgtatgagtccctagtcaactatgacaattgcttagaaatgctattctagaattatgcatactcatatttatcaaatgctatatgcttgggcaattacctttgggaaggtaattgagatgcggcatgtggagacatgagcgccacattgccatgatgttgatgacatgatttgtgaaaggaaaaaataaaattaaacaactgttttcgactggggcggacggaggatttgggtggtatctggaaaaggctagtaccgtccccggtcaattaaggaccgagccatgaagttaagcatgaaacgacccccgtacaaccgtacttctcgaatgggtatagacctagcggattagatagccgagcggagacagtatccctgcatagatggttcacccctgagtgaggcaggtgcgctacgatgggacagccgttgaggtagggccaagaggcgtgccctacatcggtgtcgccattggtaggactgccatgagtgtgtgagagagagaacttaacttgaaccataatttaatatgtgtgtgagacttccctttcccgggagcgccagaactcctctcactgctagaaacatggacgcctagagtgcatgaggatttaagttcatggagcgggtactgccaatgcgaggttatcgaaaagctttgccgtgacgcgtctcatgtgttgggacgaggctcatgtgttgggcagtcgcggagtacgggtaaagtgtacatccactgcagtgtgagtaaaccaaatctattcgaatagccgtgctcgcggttattgagcaccgggacatgtattacacttggctagactctaaattcttaacttgtgtgggatgggatattgcatggtgatttttatgctgatggagccacttcctgagaggagggaaggtggacgtcctcagaaaaccatgacgactcaatggcgggaagctatccttgggatcacaatggatggtggacagaaccgtcgttgtttaatgtgaacactggaactaaaatttgatcagtctatgataggtcttaggcttgtgaaaatatttgcaaaacgcagctttatgcaaaagaacctaaaaccattccttgaataccctctatcatatgcattgttgttgtggtggcttgctgagtacggttggtactcacccttgctatttatatatcttttaggagagtgttgaagagaagcccttgtcggtacgcttgcgtatcccacaagatgatcggagtgcggtcttgttctaggtctcgttccccagtcgactgcctgtggcatgttaaccgggcccttatattattttgtcttccgctgttgttctctgatagttgttggcctacctggccctaatgtaagtgtttaactcttttagcctaaattcattcgtgatatgttgtgatccaactatgtatgtgtgtaccaactactgatccagggattggtacggataaacacagaagatttccgattttcaaaatcgggggtctacaggaggatagaggctgacatgtgggtccacggtttttattatttttccaggatcgaatgccatgtaagtgccacgtcaatgtcacgtgggacaaagacctagttaaaggagccacatatgcgccacgtcagcccaaactgcctggggatctcgtttgcaccggttttgacagttcagggacctggttgtatctgatttttgggttgaagaacgaaaaatcggattcggtgtaaagttaagggacctcaaatgaacttatttccaacaaatggtgagggtgtgggattgcagaagtagaagtaggaagatccatccgggtatggtctagtgggctggacttgtccgagtcagattacatccgagttagaggattccaaaaattaagcccagcccagaggtggtgatagagtcgagtcgaaccaaccaaaagaaagaagaagaagcaaagccccaaaatcgctagcaatggagatggagttagatggggagagtacatgcgctgctccatgcgagaagaagcggctgattaattccaagctatttcgagtggggtacggtctcagcgacgaagaagatgaagacggatgaggtgttgctgccttgctggcctatacattgctcggcgaagggaagaagaagaagaagaagaagaagaagaagaagaagaagaaggtggtgaagaggctggggaaggaggaggtggagaggctgctttcgtacacggtggtcgtgccgaccgtgagcaataaggtgctgggcagcgagacggtgcctgcacgacacaaggagatcctgctccaagctgtcgactccatcaagaactctgctgtcaccatactagggatggacaaaaagctcgggctcgtgagctcggctcgggcttggctcgagctcgttaagctcggctcggctcgaagactaaacgagccgagcccgagcttcctccacagctcgtttgcaaatcgagccaagcctgagctagctcgcaagccgctcggtaggctcgtcaagtctgtggaaaacatgagtacatgacctgacctggcccattaacaagttgtatcagtctggctcatgagaaacagagaaccctaccctaccctaaccgctcgccgaccctccccattctccatcccacgcaggcgcaggcacgccgccgctcgcgcgcacgactggcatctggtggcgactggcgagaggagttgccggacaccgcctccgtctccctcccctgcgccaccgacccgctgtctccctccccagtccctagtcgtccctcggtgccgccggcccgccgcctccctcccctgcgccaccggcccgccgcatccctcccctgtgcggctgcgccggctccggcctccctccccagcgacgcttgatgatcgacggctcgacgctctgtgccgccgcagcgccgcctccctcccctgcgctgcctccggcctccctccccggtgccgctcgagctcgacgccccctgcgccgccgaccctacttgctgcttacatcacaagccggctcgagcttttatacgagccaagccgagctacactttttgctcgttccatttatcaagccgagccgagccaaagcctgtttttgaccaagctttctcgcttggctcgtttccacccctacacctaggggtgggcaaaaaaagaccgaaccgaaaaaccgaaccgaactaactgagaccgaaaaattcggtcacaaattcggtcatcagttgtaactaaccgaattttacacggtcttttcggtcatctcgttcagttaaccgaaataaccgaattgaccgaatcactatgaaagcccaatacagcccaatagcccattagctacagaaaaccttaacattccatcccgtccccacctccttcccactctgcccggtcctcccacaaccccacttgcgcgttgtgctgcctcttcctcgcgtttctcctcctcctctccgcctcttcgatctctgctttctcctcctcgcaccacgccgctccgcgttccccacccaccgcgccgccttcaccgcgcctccgccatctcctcgcgccacgcctctccgccttctcttcgcgccgcgcagcaccgccgccttctccccacgcgtctgcgcgcccgctccttccgctcttccgccacttccttcgaggctgatgggagacgcgagatggatgggatctggactttctggtggagtggttgagatcgacgggatccatggctggattgatttgcttgatttgattttttttccatgaatcatgctctacttgctacttgttggtggcatcatcatattttactcattcatcccagttgctttctcatcgatcttgtacagaggactcaaaaaattttttgcaattaatttttgtgctaagtttggtctataactgagaccgaaccgaactagccgaagaccgaaatgctcggtcttgagttttcttgaagaccgatcggtcttgtgattctaaagaccaaatttttcaaacaccaaataaccgaaccgaatttttcggttagactgaatgaccacccataccaccatacgccagaggcatgatgtcatccgcgcccaattcgaggccaagggctacgtcgacgtcctggcgaggcctccgacgactctgacactgaccaggagatgcatccgctgtaattactatagacgctgacaaactccactttacttgagcaagtttaatagtatagccaactattagctctaaatcatatatagccaatttatacaatagttgcttactatattattaatacctgaccctgtctatcatacacacattatgttttagagttcgtgctgtagctggctatagatctgtagcccgttgcttttttctctttttctttatctttttaaaatatgtttatagctggcttatagtctgttattgtacctgttcaaattcactagtatattactatagacgctcttgacgatgctggttacataatgtctcgttgatctgcatgtacatttgactggattactgaattcaacttgttaagtggaattaaaaaagttacgaggcctggtttaggtagcaattgaaaggtgacgagataaagcagcggcatactattatatgtgctttcatgatgctcttctcttcttttcttcctttctttcttttttccccatccatgacaaagtgcggccatctcaaatcctggaataaaacatatcctggaaatcatggaaacaaggcttttaagttgttgtgttgggccctgcagggcaacaagaaccatatggatatgttggtcgactagttgattttgtacccaggaaggctcttgaagctgcaaatttctgcttttgaaaccctgcagaaagatgatgatcagacactgtttgcaaagccgcaatataggaaccttaatttaacaccttttgcactgtggccgctcgggaggctaaagagtgaggtcctagctgcctaaactaggaacattccatatctgcataattgaagcttggtgattttccttcctagccaaaagtgattccctctcagcctgtcgagttcgtgggcatcgcatcgcatcgatctccctctggatctgggacgtgtttgtttcgactgcctccagatcacatctcttgtttgttcgtacagagaatatattttgcctgattcttacaccaactaggcactagtttccctttggtagtttaagctgaatgtttttgcaaatttgacgctgctcaagtgtgaaagaggcccctggttgctgtaagcaggtcaatttttaactgctatatatcgccatgaaagaggcgaggtagtgcagcaataggtagctatcaaattacgactaaatcaataaagtagattagcacatgattaattaaaaatcagctgcttgtttgcttcagactgaaaaatagattttttttaaatatatatatatatagttttcattaaaaaaccacagtctaatgatttggaaagcttgtaaatgaaaaatgagaaagtaactttttctataagctgaaaaaacggtgccctgagccgatattggtttcagtcctgtaatatgcagtgcaaaacagattaattaagaatttaagatctatcactgcagtgcatttttttaaatgcaaggaatatgtcatggccatgatcaaaacaaagtctagtctctttgatctctctattggtaccaaagcgcaatgagatccagaagagcaggagtaaaggagaggttagctggtctggtctggtccaaatgagactgtcctagtagagacatgatcgcgcatttctttctttatgtgattcctgtgcgtcccaagggccaacattaattctgatcgttcattttgcacccgacaataatctagtactaccagcatagagtacttaattagttgtagcagcaaaaaaagttcactatattactacctctaatcccaaaataagttaacttagtatgaaatgtgagttaacctaatacgagattctagattcttagtaattttaagatggaaggagtacatcattcacaagttcatggaggtgctccctccggttccatattaattgacgttttagataaggttgagatcaaacttttataactttgactatcaataactttaaaaatatttagtttaaaggaactagaacaatatatatatatttgtctttcaaagcactataataaaaaaagtaaacatgtatttatttattatatatattataatagaaaaataaggtcaaaaatatattttgtagaccgtgtcgttgtccaaaatgtcaattaaaatgaaactagagggagtagtctttagtgaagagcagagagagcacatatagggccatgtttagttcacccccaactaccccaaacttccaactttccatcacatcacatcacatcaaaaactttcctacacacataaactttcaacttttttttttcaaactcccaacttttcccaaacttccaacttttttttcaaactcccaactctccccaaacttctaacttttttcaggaactaaacacaccctagattgtttttgaggttggagttgtattttgtttgaattaacatgctgattatatacatttgcgatcgtgtgagtaatccaacacagtccaagccaacccagccagagggagtattgaagtattttatacatgtgaacacgtgtgtgtagcgcagatctacggacagtatatttgttggattatctatgtactgtagcatgcaatagaaaagcgcctttgttatttaaatggtgatgaaatcatggcacgaatcacgcaaagtggtttgattgacaattggagtagtaggttaagaggaagttcagtagtatagccaactactggcttcaattcatctatagtcaatctaatagctcatttatataatagttacatactacactattaatatctcggattccacctatcattcacacactgtatcttggaatcagtgctacagctagctacaaatttgtagcctgctgccattctctctccttatttatcttcttaaaatatgtttgcagctgacttatagcctgctattatatctgctctaatgccaacaggtagctgctaccgaccgactgactgagagctgactcaaattaaccttgaaccaagcaaagtaaatcaaccaggggttaatttagtttagtttattactatagattgctgacgaatctatctggaatagtacaaagtttttggatgtgcgtgcgcaagcccatatttgtttggtcgatgatgagaagaagaaagcatgtgcacatgaggatcagcatgttgatgctgtgggcgtgcaacgcatggcagcgagtaaaatgaccgagattgaaattgcagtgaaatatactaggatttattggtttcaccaggagtagtagtagtagtaggaaaaccgataaatccttccttgggttgatggatgggcgacgagctggcacatggagggaggagggcctacgttcgtacggtggggactagtcctttgggcgcctgcagtttcacgagacgagtcccggggctcccgactccattttcccagctgatggtcgaactgttaaagcaagtttaatactcccactggtacagaatataatcatttttagtgctagacacggttattaaaaaaatagatagaattaaataggggaggattattattggatgagaagtgaaggtaggtgaaaaatttgaatggtgaagggttatgattagttaaaaaaaaagaatattggtgtaaaagttattatattttgggacggagggagtagtagtttaatattataacccactactagctccaatacatctatagctaatttaatagccaattcatataatagttgcttactatattattaatatattgtcccacctgtcatacacacaattgcgtcttggaatccgcgctgcaactggctacattatctgtagcccgctgctcttttctctcatcttttatctcattaaaatatgtttatagctggctaatagtctactattgtacctactcttaatccctctatctgttagtagatactccatccatcccataaaagaccaacctaatatcacatccggtactagattggtcttttatggggacggagggagtagagttaaataacttttactccttataaccgatccaggtataatgttggttttggagtatttaagatgtgctgctgcaaatggtgaatggtgtgtattactaagggcacccacaatagttatctataggctctatacaagagattcatgtcagcatatttttctacttggaataaattaaatgaagagagagagagcaaagctatctactaacctggagatagtctatagagaaaaacgaggcaatggattagagagctatagatacccatgtagatatactattgagttggtttactattaatctagtttattgctgagatatacatattttatatggagagcaccttattttattattgcgagtgctctaatagcttgattagcttagcttaagtagacaagccactttagaggaacaatgaagatcagtgagacaacgaaggagaggggagtcaggggacacgagatttcgatttcattggagagaaagagacatacaacgtccaaagcaaagcaaaaaggagaaacaaacaaaagcaaaaaagaagaaactagagagagagagagagagagagagagagttgtggaatccaaccaaccaatatgcgccgctcctcttcactctccaagcagagcacaagaacgcgctttgctcaataacacactcccctagctccccgaggatgcctgcccctgcctagcttaatgtggaactaactaggagtattaattaattccttccactaatcacccatcagcgccaaccggcggccacggccaccgtccgctccgacgacgacgacaagttgccactgctcactgctcactgctctggaaggtggtgaagcaggtgtcgctcggcttcactatgaagggccaccaccaccaccattccttgccgccgtcgccgccgcccaagcgccggtgtaccgccctggccgcggccgtccctgcgctcgtcgtctgctccatcctcctgcccctcgtcttcctcctgggtctccaccgccccggtacgcgcgcctgcctcctcgcctcggatctgttctgtaccttacctacatgctgctcacctcacctcctgcttgtcttttttttcttaactgtcagcagggcatggatcggaggagcgcgccgcggttgtcatcagcactgtacgatttcatcaacacattttttccccctccttctgaatttcatacatgctacatttcgaaattacttatttttttctcattcttctgacgcgcgtgtgtccttttaattaggaaatggggtttagcaagcacaagcatctggatgggaggatgaagcacaagctactcaaggtaatgctgcttgctgattctgcccattggctgactcataactcttagtcgcccagctttactgaaagcataagagtgcatacgaagtttgaaaagaaacaaaaaaaaaacttgctggggattccagcgaactgggaagaattttcccatttgatattctgtcctgccaattggaagatttgtgtgactctggagtaagaactgaccttctgaacataaattcccaaattttcaggcgggttttatgggtaggtttctgtagtataaggaaaaaaaaaaacaagacggcatcggttcatgcactctgcatgtgtgtgcagtgtgcttgctgactctttactgccttctgccttgctttgcaggggtattcactctacactgtaagccagggctttgttgctattctggtattaccaccccaaaattgttctttgccaatgacactgacaaatggacttggactgttgctgctgtgagcaacatttctgatgaactgcacatctttccattttaactggtcttatttcttttatgtttttcttttgggccttacattgttgccttgctttcctcctaactgctgttgtcacacctaattttcaattaacatgctgttgtgaaaaatatatctactaatttaccctgcggtacttgcatgtaaatgtatatgtcctgtgactcatgtaactgaaaactgctctacagcactgcagcagactcccaagtggggcttcggtcgaatactatcgcagtatgccactacggctatagtatatttgctattcgtgcctggtatcgtcatgttgggggtgtaacatatggattagcagttttgtactaaatgtattgtattacaaattaataccaagtagatgaatcagctcgtatgcgatatggtttacactgctgcctaaacttattttgaatgtgcactgctattgaaatgaatcacccatgccattttgatatttgcttggttacaataatctttaagagcttgctccactgacctctcaaatgattcctattattttggctaatctcctttttgtggaaccaggatgtttctagaaagaaaattcctggatctgatgggattttgggtgagaaatctggtagtagatcaaagtccaagaatgtttctaccaaatcaaaagaaaagctcaagggtgttttctctttagttcagctaaaaaatgagaccagaaaaaacaaaggtaagaaatgtcagatcagattttgcagtgtgttactgcatttactttgtaaaacaagaactgcaagataccaccagcatccattttatagtatccaatgttatttcagaacttcatacacaaagaagataccagttaaaggacttatcctggagatcaaaggtaagaaatagtttctatatttatttgcaatcttgaggattttaatatatgtgcatttcatcggtttggagtaaccaacggattattcttgtctgtgagcacagttagttataatgtttgttcttcttgctatgataagttgattagtaatggtattttacagtcaacaggatcttcaggaagacagatagtgaatgtgaaatatttgagtaggaacatttttttgatttccagtgtggcatcagtaataatgtacacatttgtgttgattaaaagtacaataattttgtactatacagttgacttgtccttttggccatatttcacaccttaaaaattgcttcttagatatctcactgttgccagtactttcaatcagttaagaatgcacatacttgacatagtttgcagcacagtatagaactgaattttcctctgaaacttagttggttgccccttttttttctgctgttactaagtttattatatggctcagaaccactgagtaattttatattactctgcaaatcttgtacacatgtgtttggtgcgtctgtttgttaatgctttcgcaaatcacaactgcattatggacataatgatacattagaaaaggctttttcaaatttcatattttttccttgatataaatgaatttaaagacaatagtagcacaataacctgataggtgtttgtgtaggatggatgccctttccttttctgccacaagactctgaatctgttctgtgacaggatactactattgataagaaagagaaccaagaagtcgagcatgaggagaaccccaaatcctgtgaacttgaatatggtatctactgtctctggtctgttgaatataaggaagtgatgaaagattttattgtgaagaggcttaaggatcaactttttatggcaagagctcactatcctagtattgcaaagctgaagaaccaggaaacattcacacgtgaactgaaacaaaacatccaagagcatgaacgcatgctcagtgacaccattgcagatgctgatcttccaccattgtgagtccaatcttagtaatcaaatctatatcttctgctttgtttgtaaaaaaaaaaaacttatacaattaaacttcataacaaattatatgagaattagcaatgtcaggactgcttcttttgttataatatttgaccttatttacattctttttatactttttcagttttgcaaagaagctagagaaaatggagcacacaattgaaagagccaagtcttgtgaagtcggctgcacaagtgttgaacggaaacttaggcagctacttgatataactgaagatgaagcttatttccatacaaggcagagtgcatttctctatcatcttggggtacaaactatgccaaaaactcaccattgcttgaacatgagattgactgtagaatatttcaaatcaacgtctattcatacggtccagtcaaacaagcagaaacttgaagaccccaccttccatcactatgtgatattctccaagaatgtgcttgcagtttcgactacaattaattcaacagttatgaactccaaggtatttccaactgattgaaaacattatgaccaatgagtaatccatctcagttctaacttgcatcctcttgacacatttcaggattcgggtagcattgttttccatttgttcaccgattcacaaaatttttatgcgatgaagcattggtttgacagaaatatgtatttggaagcaactgtacatgtaactgacattgaggatcaccagaagctctctaaggatgttgattttcatgatatgaaactgttacgacctgctgaggaattccgtgtcacgtttcgtaatcattctcaatctttccagaagcaaatgaaaactgagtacatttctacttttggccattcacatttcctcctgcctgaccttcttcctagcttgaatagagttgtagttctagatgatgatttgattgtccagaaagacttgtcatctctgtggaacctcaatatgggtggtaaagtggtgggagctattcagttctgtgaagttaaattaggacaattgaaggcttacaccgaggaacgtaattttgacaacaattcatgtgtgtggttatctggtctgaatgttgttgaactgaaaaaatggagggatctccacattaccagtcggtatgaacaattgcttcaaaaggttagtactcctatccctaagatcttacattcgattgtaacttttatcatagagaatatctgaattcctttctagtagccctagttatccttccataacttcatttattaattgtgtcccaatgagagcagtattctcatgcactgcctttgtctttgtagttgcaaaaggacagtgtgacatcatttccacttaaagtacttcccataagcttacttgtctttcaagatttgatatatcctttggaagattcatgggtccaatcaggtcttggacatgattatggagttagtcaaaccgatataaaaaggtctgttactctacactacaatggtgtcatgaaaccttggcttgatttgggcatacatgattataagggctactggaggaagtatatgaccaacggggaaaggtttatgacagaatgcaatatacattaataacagtaacatgagattcaccacattctacatttctgggattttggagcaacagaactttcgggaacaaagagggttagagtgagataaaatctgatgcagcattataatgaattgagtatagtaagggtggcatggtggcactacattaattccaaaatggagataggatgaaatgtttttgtgccagattttaagcaatacttcatagtagctaaagatggtagcaggccaccagcatgatacctttgaagtagatccctggttaacaatggtgtatgttgattccttcaccttttacacgatttggatggatcttcttcacatttaccactttaggattgcaaaagtgcagttccctggtggtcatttttttcgtataaattctttcatgtgtatctttgctcgttgtataagagctatactgtataacttgggtgttgactggcatggcatgtacagatgtagaatgccttaacccgaaagcattgggtgattctttctttcttcttcaaggctgagatgtaccatgtcacaccaatgtcaagtttcgagatctttgcattttgtacatcggaaggattcttgtatcatcagtttgataaaagatacatagagctaaagcagacgtcgaaacattgcaaaaccagaatagcgtgattgcatactgcaggttcattacctttacattttgtcttcagccctgtgttcattgccatggtttcctaactcatctccctcgttttccacgtgcatgcttttcaaactgataaacggtacatgttttgtaaaaaattaatatagggaagttgcttaaaaaaatcatattagtccatttttccagtttttatagataatatttaattaatcatgtgttaatctatcgttctgttttccgtgcggaggggagaggttaccaacctctccaaaaagaacacagcaggacgtcctgtaaaggtcactcattcacatttatcaacttgatatgttgggtcatcattgattagcaaaatataacattagtaaggttttattcagtctgacaaccaaagcaatagcatgaaagaattttggttttgatgccaaaataatgtgccctaccaaatttttagcaatttgaattgtactttggctagtttttggtttgctaaaaaaataccaataataacacacatatagattgacaaaaaaaaattggcactaccaaaatttttctaggttttggtattttccatattaattttggcatggtagcaacggaaaaaactgaaaaaaaaagaagaccagggcacacactacaagattcatcccggtctcccgccgtatagtaggtgaggtgaaatatatgtagtataatacagatacatcgatggttgaggggatcgtcaatagctaatgacactcgatggttcagatcgttaataattaatgacagtttgcagcatcatactccctctgtcccaaaataagtgtagttttacactattcacgtttaacgttcgaccgttcgtcttatttgaaattttttttatgattagtatttttattgctattagatgataaaacataaatagtactttatgtgtgactaaatatttttaaattttccacaaaattttcaaataagacggacggtcaaacattgggcacgaatatccacggctgcacttattttgggacggaggtagtactactaaggagtacatcagtttcaactagaggttgttggagtcaacgtagcccttggtccgcagctggtcgagagtgttggcctgcatctggcggatgagttgagagctggtgttgagagcctgcacgacgttggcgagggcttggtcgatctccttcagctccggggaatcgtcacggatcaccggaagaggaaccggtgccctcggcaccatcgacagcaggtgctgcacccgttccatcggcatcctcttcttcttcacagcctcctccttcttcatcctcttggcctccttctcctccgacggcgtggagcacctcttcagctcatttgtcatcgccacacgatttccgtcgccacccatcaatcttcttctctttcctttaattcctctcgatcgagcacgcagatatcaatcgatttgattaatttccttacgattttcgggatcgatttcctcgttgcggcggctctagggtatcttgctgcccttctcgatcgagcggatataaaccctaccaccgggccaccggcctgttagcaaccaaatcaccaaacaacaagaatttcaccacgaacaactattcagtcaacagtgctgtttttggaggtggaaaatggggaaatacagggggctagaaggttctggaagctagggaatgggaggtggaggagggaatagatactcgacgaggatccagcctggacccaatccgccaccgccgccgattgccaagccgcctaggttggtcgtcgtcctgccttttctgttcgtccttgaatgagcagcagttattgctttatgtattgctcttcctaggtttgcttgggctgggatttgcgtagtggaccagctgtggtgcagcccaacaaggtgtctaacaatcctctctccttgaattcggcttgtccccaagctgatgaattaaaacctcccggatcccatggttgctccaaatatttggtgttagacaatggaacatcattgaagaagaatagagcaggtagctttagcctcaataacttcttactccatgcgaagtcctcctgtgtgatgcgtgacaatggcactgttatgaattgcttgccaacagtgattcccaacaatttgatatgctgcaaacaatgacaacctcgttagatcaactgcagagtccacccatgttcatgattatgtccatttattggcatgccgatttcatcagtcgagcatatgcattgctcaatagattctaatgtatttaccacctctgtagaaactaactcaaaagtatatttctcatcacgaattgaattagcatcttcttccatgtctttcacccttttgcagcctttttcatcagcaatcaaatatagcaaatctctttcagcattcaaaccaatgtaatttgattccaaacatgactcagattctgatatcaccatgcaaattattctcatattccatttctccactctagtttggtagtagttgagcaacatccccctaagatcaacagatgataaccaaacatataatgatttaggatcacaaataactagattgctttccttgctagcaagtgttgtcaaactgacctggaaagttagatcccaaaacttctgcattttctgctcaaagcaagtgcaagtttcagtagtcatcattttcttttgctcattccaaggaattatacttgcagcagaatcagtagtgcaacatttcccttctctagcttctagcaaaccaactaatggcagccaaggtggcatgccaaatagtctcagcttgtcacatgttttcctttgaaggaaatgatcatagaaccaaattgcccagtactgctcagctccacaaccatcactcttgcaagaagtaagtgactccaacttaagtagcagttgtcctttctttccatttcaacaaaagatagccccgaaagtaaatattcaagttcaccaacagcatacataccttccttgctagtggctgctataaggttgatcaaaaaggacaactcacttttcactccaacattgagtctcagctcattgctccacaaaatatacttccaatgaaaataatgttgtgggaaccaatcatccatccatattaatattttgtgaaggtggacctttccatcacctggatcccacactagtggccccaacatgacatgtataatgttcagcgggtttaccaatgaaaattgcttgcccacaaagagttgaaaccatttcgcttcggttggagggggccaaggtggcagtatatgtacttcagaacagctgcagttgaatgccagccatgacattaactgtgactcccatataatgaactcttgatcccttgatgttatgggtggccatggatcaacttcaaagtgttgcaacagcagttgccatggaactaacaaatgtcctccagctgattccactaacattggggtgcttaagaaggacaaataagacacaacctgagagttgttagacccagaacatttcgccgaatacctagtgggcatcaatgtgtaccgcttgatgtcggtgatcatccttggtgagaaggcactcaatgatgcaatggatgctggaacggtctcaagtacaaccgacttggtcaggaacacgatgtcgcctttgttggcgtcccacttgacatcgaagcccaacatcgaacacttgccgtgcgtatccttggaatagtcagtggtggcaattttggtggtgctagttgcaccatcatcagctaccaacttcatggaggccatgggagtggtggcacatttgtccaccgcaaccacggtgagattggctcaatgtcgggactagagcatttcgtcgagcatgtggtgggcgtcacctttgactgctctttcttaactgacgctggcaagtcttttgcctccttcccaacttccggtgtgcatgcttcaaccacatctatgagagaccgtatatcagctctagttctccgatcagcctcctctcgcctcagctcgtactcctccatccgcctcaacagcaaatccaatttgtcttctattgccatggcaccctacttgaagagaactttctcaactagaccaagagctagatggggggaaccaggctggctctgataccaaattgtttttttttactaactcaccgggggggggagagattccccacctgaattgtcattgcataatagattgaaaggttttgttacaacagattcagagtttgaagtgcggaagagaaaagatgtttccagacatctattacatgtcgatcttgcacagctagtgtttctgcccaaagggttgcttcacttatcgctcggtgtaaacaagcagctaaagatggttgctgccctctgaagaccacatcatgcctatggttccaaagcgcccaaaagcataagatgtagaagacatggaggtgtttcgacggcagtaacggtgaattgctcagccgatgaaagagttgcacatcttggatagctggctgaattcgcacttttgaccagaagtttatcgcaaacgggcaagtcaggaataagtggtttgttgtttcgtccccgctactacagattgcacatgaagctgattgaacaattttcttttttgatagattcatccttgtcgacagtctgtttcggaccagtagccaagcgaacaattttaccttcaaaggcgcccgacagttccagattatcttccaatttggcgatggcatttgtacagggaatcttgcatcatagatttctttggttgtgagagaggtcgatcggttgttttgccagacatcgttgtcattggtcagagtaaggtctgccaccattgcctgaaggctgtgaagttccgcatttgcagcctctgaaagtcttgggacaaacattatcattaagcctcttgaaagaacatcttttacagtagcatgacaatctgttgtgtgagaataaagagccgggaagagatttgctaactgaagaatcccaagccaacagtcatgccataatgaagttctagagccatttccaatctttaccgtcatcagcttttgaagctccggcaagaatttctgtaacgaagtccagtgttgtcctaaaggaagggatttcagtagagattgcccatcaaattctttccaaatccagttcgcccaggaagattctgaggagaagaggctgaataaccgcttcaggagaagagcctcattttgaacttttaagttttttactccaattccacccagttcctttggagagcaaaccacatcccaggcaaccaagcaacgcgctctagaacaaacatcctcccccgtacagaggaatgcccgccttcgcttatcaatttcctcaatcaccgaaggtggcagcttgaaagcagacattgcatagacaggaaggctattgaggaccgcattgattgaaacgagacgctctgcctgaggagcgaagcttcccaacctgctaagaacccatccaccttgtttagaagaggctgagatcacccgtagacaacttgtgcacagttagcgggagacctaggtaagacattggccagttttcacgcttgcactgtagcagttccgacaaagtcgcttctttcagcagatcaacatgaagagagatcatagtacttttcgcaaagttgatatgcaaaccagttgctttggagaaactgaggatggaagattttagggctcggacatcatcttcttctgctctataaataatcagcgtgtcgtctgcatattgaatagttgcgtaggggcgatcatggtatattggatgtcttaagcttgcatttctttcaagcagtcgctggagcacatctgctaccaagataaaaaggtatggagaaagagggtctccttgacgaaggccccttcgacaattaatccaactccctgggattccattaattagaaccaaagattttgaggaggtgagcaacttgttaatccacccgatccaattgtccgggaaacctctgaccgctagtatttttagcaggctttcccaatttactgaatcgaaagcctttgcaaagtcgagcttgatgattaaagtttggcatcctcgcttgtggcaagcttgaatcagttctgtcgcaaagattagattttcaaaaatgcaccgaccttttagaaagccagtttgatccatgtgaatcatttttgtcaaagcaatttgtaacctaaaagccagcacctttgatagaattttgacagagcaattctgtaaagagatcggcctgtacccatccactgtgttttctttacctggcttttggataagaacaatgaaggctctgttaattctttccagttgaatagcgccctgggagaagcctgatgctagatttaggatagcctccctgatgtcgttccaagccgcctgatatatagaagctaggaccaaaaccgtctggtccaggggcactgtaagaattcatgcccttgatagctagcagcacctcctcttgtgtaatcggcaaaccttgagtagccagcatgttagagtcgcattcctccgacaagtagagcgctgaaagatcaacatcccacaccggctgagactcaccccccaaaagattttggtagtaggagtgcattaggcgcgctttgccattgtgatccgccacctctgtaccgttgtgcttgattgatttaatccttgatttcctgaaattttttgatgcatgagccttaaagaacgcagagttatccagacccaactttattcttctgactttccccctctgcttccaatatgagagtctgctctgaaccaactgtgccagtttattctgcactagatttcttaaacattgctcaccttgagataaaggcctgaattcttcgagaatgtccagtagatcaattgtgaatttacaattttcatcgagataaccgtgtttccggtgatccttcatccattgtttgatttgtgacctggtgtgtttgaggtttgataccaaattgttagtaaccaaatcaccaaacaacaagaatttcaccatgaacaactattcagtcaacagtgctgtttttggaggtggaagatggagaaatacagggggctagaaggttctggaagctagggaatgggaggtggaggagggaatagatactcgacgaggatccagcctggacccaagccgccactgtcgccgatcgccaagccgcctaggttggtcgccgtcctgccttttctgttcgtccttgaatgagcagcagctattgctttatgtattgctcttcctgggtttgcttgcgctgggatttgtacagtggaccagctgtggtgcagcccaacaaggtgtctaacacggccttccaggtcgagtccgactacgccgttgcatcactatacacgggcaatacaagtccgaggcagagtctaattgcatcgaccaatttcaggttcggagaattaaacaccgcccgatatccgtataatccagccgttccagcgaggttgggaaattcgattctgaatccctgatatttttcataggacgtcggagaaagaaataaactccgaacccccttggccttgggtgagctcaaactcctccagtacagcgttagcgtcgcttctctacaaccactacaccccaagtggatgcagctgcctgaaagggtccttctaatgccttacctctgcttctttgacagtccaagagaaatgcaacatgaaaaatccaaacttgcgcaggaaaatataatgaacaaacactgtctagctgtaactggtctgatctgaactggcatgcagcaaattaatttgcaatgcatctcttgccacaaagcaccagcaacactcaaaatcactcaatcagggaggataaaaaggacaactcttggccaaaactatcaaactataggaacaccagcaatcagttgccattgtatttcaggggttcggagaattcaactccaaacccccacctcccgattccagtatttgagggattcggagaattaaaccccgaccactacgtaccgctccagcatggtgggaaaattcgactacgaaccgcctgataattttaagggggtcggaaaattgaactctgaacctcctcgatcggcatcgccgtcgctagctcagcacaccagatgctgacgaaaaaaatgcagtggtgtaaattaactgacacggatcggacgagaagacgccgacgctgcccctcgctcaaattcaagcaggtgttgcgcaaatgaaaccttacagaaggcaaagtatactataagctatgtgtacatgtgctgttaatttaggtggtaacgagaaattcgatcatatgatttccggattacatcattatactggtgtgaatatatattatcgtttctctgtatattttgacagacgtaggaggatttgtaggcaccagcaagaaatcaaacgatcaaacaagactcaagcaatctagtatgttaaatgatggaaatcatgctccaacgacaattggaatttccaggaatctaatctaatctagtgaaacaagactcatgcaaagaatctagtaaacaggctgctgcaactagttacgatcacatgatagtaggagagaaaaaactaaggtaaaaaaaattaaagcattcattaatttgaaataaaatagccttgcttagatagttaggttgatactagctagttgaaattggggaaattaatcggcgaccaaggcgtggacgtagccctttgtccggaggtcctcgcgggcgttggcctgcatctggcggatgacttgagaattggtgttgacacggttaatggccctgatgaggagtcggtccatcctgttgcgcaacgagttgggattgccgtcagagtctgcagagaccaccggaagaggaatcggctccatggtcacgaacgatagcagatgctccacctgttcctccggcaccatcgtctgagtctccttcatcctcttagcctccttctcctccgacggcgtcgccttgcagcacctctttagctcatggctcccctttgagcaacccgtcatcatcgtaaaaaaaacgctggatatgaaagaaagggctttcatatcgatatgcattaagagaggagtgagtgtgttcgctgggaatcgaactcaggccgtagggcgcaccaccgcagaccctagcgcagttctctacccgtcatcatcatcggacgatgatttcctgtatatatgatttcgagctggttgggtattggaatcgatttgtgaattgctggacacgagctgagctagcgatgctggtctgcatttatatatgcatcactttacctgggcgaggcaaaacaagtaggattcgatcgagtccaattgcatcacccggccggatcggcgttcggtctcttaatcggatcggacgcaccgcaatatatgggctatggcaagtgtaatactagtacgtatttttggtcgtcgtcgtcgtaataaaatctgtttacagatataatacagatgctactaatcagtaataaaatctgtttccacaccaccgaattaagaagcaaatatcatcgtaatgtcatgctcatctacattatattaatacagttaggagagatgctgatgcttgaattgaggcacgcagagcagggcctagctaggctgttgaggccagcatgtcgtcgtcggcggcggcgtatttggtgacccagcagtcgacggagcccttggtgcggagctcctcgcgggccctggcctggtcctggaggatgatttgggtgttggagttgaggagcagcacggtgttggcgagtatatatgtcctcgaactggttgatctcggggtcatcggatcgtggctttcgatctcgaggaaacgtcctcggcacgaacgacagcagctgctccacctttttcgtcgtcatcctctccttcaccttcaccatcaccgtcctcttcttcatcttcttggccgcctcctcctccgcgttcaagcacctcttcagccccagcctcgccccatcagatcactaaattctcactagaacggataccatcatctcaatcgggcggcaacccctatctcaatcgggcacggtgtccgtcacaggctaaaagtcactgatgtgaaaagttatctcaatcgggcaaacggccgtcacggatgaacctatcttaatcgggccctaattaaagcccattactgatagctttgacccagacaacatgtcaaactatagcccgtcatggatgacctatctcaatcgggcctaaactatagcccatcacagatgacccttatctgtgacgagcattaactatagccctgtcacagatgagtcatctcaatcgggcctaagttaacagatgagtcatcccaatcgggcctaagttaatgcccgtcactgatgagtataaatctcaatcgggcctaagttaacagatgagtcatcccaatcgggcctaagtttaacagatgagtcatcccaatcgggcctaagttaatgcccgtcactgatgagtataaatctcaatcgggcctaagttaacagatgagtcatcccaatcgggcctaagttaatgcccgtcactgatgagtataatcctaaaaaatataaattttatttctagctagccttgccatgccatcccgccccactcatgctaatccttttttttttttgtccttgctcatgtgcacgaagttcacttcccgatcggtcacccatcctaaaattgctccaggcccagtacgcttaatcggtcacccatcctaagatcggcttccagaagagtagttgtagcttcttggtatcagtgttctattaatcctattaagccctaggccgggatatgtcacaccccaacatcccccattcatatacattcattcacatacacaaccatcaaaaatcataaacaacaaaattgtatgactcatcgagatctacaactgtatcggtcctttgtacaaataagtttatttgaacaattcaaattttgaattttcaaaatttgacaacttcgaagaaaaattagggttaataaatgattttaaatggaaaagtcaccgaaaccaaagttgtagagctcatcgaggtgcaaaatttttattttggtcatttctccatctgactctatttaaacaatttgaaatttaaaattcaaagtttgagaaattcaaatagaattttttgttagggaacgacttcaactgaaaaagttatcaacaacaaagttgaataactcatcaagatctataacttttattttggtcatttttctatataacattttttgaaccgtttgaatttgaatttaaaaatatgataacttcaaacaatattttcaaatactaaatgatttcaactgaaaaagttatcaacaacaaagtttaataactcatcaagatctataacttttattttggtcatttcttcatctgataaaatgttaggaacattgttcataaattttacatatatgtgtatagtttataaatccagataaaagatatgtcaattttgtgaacaatgttactatcacttatacaactttattgttgatgacttttccatttgatattatttactacccgtaaaattattttgactcgtaaaatgaattattatactgcaagttaattattttgctatagttcaacttacaaatataaacatttcatatgaaaaatagaaaaatactcatcggtgacgggctttaattaatgcccgatagagattaagtgattaattcatgtcaaccggggattagtatatagcccgtcactgatgagttatctgtgacgggccttaagttggtgcacgtcactgatgatggtcatctgtgacgggccccaacttaaggcccgtttgagatatggaatgttatctcaatcgggtctaaagttggtgcccgtcacggatgatggtcatcagtgacgggccctaacttcaagcccgtttaagatatggaatgttatctcaatcgggtctaaactacggcccgtcactgatatgtgttatccgtgacgggcttaagttttatgtctatctaatgtctgtgcgaccatatctcaatcaggctaaaatgcccgattgagatgactttcttgtgacggcccgctatttccagacatgttagagcccgtcacagatagaagggtctgtaatagtgtctccagccatatcgctcgacacctcgatctcaatttgatttgcggaggggtggttctagctagggattaccggcggctaggcttctctctctattttatctcgtgagtacgcgttccgacttccgaatcagaaacatattagaacacacgttcataattatgttgggccgcacaagggccgagcaagataacattggtagcccatatcaattagtattactctctattaacttctttttttttattttggtcggatcaaattaatcgccacttgaatcaccgtaattttgacaatttgatccttttaaaaacttatttgaaaattagtccgtgtcaaaaaattattgaaaaataggtcaaaacctcagcgccataaattttggcgctaaagcctatctgagttggacaccacgtcattggtggggcgctgagctcccatccatctaaaatgttacataagtgagcaccttaacagtattgtttgcttgctgtagtggatggattgttaggtttgtactcaataggtgacgggttctagcccttctacctgcaccgttttttccttcgtaatttaatttcctttttatttttgaattgaaatatcgagaagaagtgtatattagaaaactcaaatcatctctcttaagaagatatcctcttatttaaaaataaaaggatatcttctcgagggacaaaaatccatttccatatattagcatatatgcttgcaaatgaagagatccctgtgtgtatagtgtaaagtgttatgtcacgtatccaaactcaaatcatctctcttaagaagatatcctcttatttaaatttaagaggatatcttctcgaaggataaaaatccacttccatatattagcatgtatgcttgcaaatgaagaggcctctgtgtgtatagtgtaaagtgttatgtaacgtatccaaccatgcaggtaattaagcaaaaggattgattaatttatccaaatgtacaagcgtcctcgttccctactactacctctatattttaatgtatgacgccgttcatttttttccaacatttgaccattcgtcttattaaaaaaaatttatgtaattatcatttattttattgtaatttgatttatcatcaaatgttctttaagcatgacataaatattttcatatttaaaaaaaaattaaataaaataaataattaaacattggtcgaaaaattaactgcgtcatacattaaaaatacatacggagggagtacttaatttcctagctagcggcggggagatctcgcatccccggccggccccgtagagagtgttaatttcctactacgtacgtgtgccccttgttaatttacgtacatgaaacacgagaaattcgctcttaatttctggattactacaatatatatacgggatcctaatctcactggtgtaaattaagaaagccttttaattatttggagcgacatatatcaaatccctcgtttacgcatacatgcatggatacatgctatatatatttcctaagttaattccttgattgcatgcatgtgcatcactcgatctgtatcagtatatattgaaacgcgcgctgattggctccatcattagctccattattcctatctagctagtacatttctcctaagagtacccgcaatggtaaagtaaggtgctatctataaaacatgtacatctcagcaatagactcgattaatagtaaaccaccttaatagtatgtctacattggtatctatagctctctcatgcattgcctcgtttttctctatagactatctctaagttagtagatagttttgctctctctcttcatttaatacattctaagtaggaaaatatgctgacatggatctcttatagagagcctatagataaccattgtgggtgccctaagatacatatcaagatatgggcgacagcttgtcttgtcagaggaacaccgacgacgacgccgctccgccgccgccgctggtgcccgtcggcggccagcagcaggcggagtacatgagtaatcagcaggtgaggacgaggagagagagaggccagccaagcagcagcagcagcagcagcagcagaaaccggggcgtgggcgtggcagatgaatatcaaacacgacgcggccggtgttgatgataatgttggctttcccatcagttcacagccccctacgctgcgtcctcacaattttatgagattttgcgctacctgcaaccgcacacttagtccacagatgaacgtctacatcttcaggtacctagtagctaattaatttgttgatgacaattgacaaaccttatattctttttctttcataaatgataataactttgtatacatgcacgggttagttaattgattttctaatctccatacataattaacttgtacacatgctactaattatgatcacttttacttatttaggtgaaatcaatttatataacttttcatccgcggttcttttcatccgtggttggtagtgcattttgtttttatagatagggaagatttttatttgtttgacatgcacgtgtgaattcttttttaaaaaaaaacaagaaagaaattattgttgaacaattgtaatatatattgtacaatgagctaggtggattgaaaacttcacctccttttatgcctctcttttttaattttaaggtgttgtaacaggggagagagcgctttctgcagcccggaatgtcggcaagtacaaatggacgcctatgctcgcatacaggatataattaattcttgaacttgtgcaaggggtgatcatcatattcaataacgaagacagaataatgcaatttaatttccaagccatatttagagaaactgatacccttatttgtaatatgcatgtatccatcccttcttaaagttctagaaggatatccatgaatgttcaagcctttacgatctcatcgtctaagctatatggttagtgaatgcttcatgcaatcagtgtacatctgtcttacctatctactccgaagtgtgctgtctatatgcatgtaatgctactcttatttatatgatatggttgttgtttaaatgtgttctttcactatgtttaaatttgagacctttttgacgtacttgattacctctagattcaaataaaatatcattgccccaatatcaatcgacctaatttgcattctatagatgtgtatgaatcgtataaaaaatcacaaatataatgtgtaagaactttatcaaaagaaactacgattatatatgcaagccaccggatgaagtgaaagaaattgttggggtatggtcttaattataataccaaactgtaagcatttgcgttaaatttttgtatagaatatgtgagctagtcaccatacgacacctttgaagtaggctgcagtttaccagttaccagggtgttatgttgattacttcacctgttcaactgcacttttgggtttgcaaaggtgcagctccttgcaagttgtcattttattcatccaattctttaccaattgcaatcctggctatttttcggtgcgttgacatctttataggcagaaaaacgatgtttgttttgctctttggcatcaaattaaatggtatctttatgtcctgcatattccaatatgtttttgtttgcaaggaatttaagcactcagatggcaacactgcttgtgccttgtcccctttcactataagcagggcattgtggcttttggattgctctaagaacacatcttgtgtaaaaatttcatacggtagataagaacgcataaatctgaaagctcacatttatctccagtaaggatcaagctaaatctgtaagtggtttctgatttctgtgaatataaatcgtttccatttatctacagtaattatgcaagcttttgttaggttgatgttgttttttttataaatgccccttcaatgactggatcatgtgtatttttctatcgattctacaagtaaagagtacattatcaagtaacaacagtagagaaaatccaatccaggtgttacaagtcatgaaacttaggaccatggggataatgaccttccagaggacacttgcaatgcttctgcaactcaaggtacttttccatatcaaaactattcttggcacaaagctttctgtgtcttgacaaatacagcctttccatgaagtcctcatatgttggatcccttgaggtaatgaggaaatatgcgtaaccaacgagtaggccagatgcagttgtgaagaaggcaattggctccatcacatcccatgaaaattcccagaaagtaaggcggaagaagagcccaacttggcacatgaagaaacctagtccagaccacaggatgcgccgaacttgcttgtgtgccagcttgtcgatctcttccttcttctcctggagcttcttcagctcttcttttcttgaatcgttctccggtgagagtgcaagcggaacagctcttctaacaagctcaaccacctaaaaattgtcaaaaaagaaaaaaaaaggcttcagtttaatagcacaagtgtcaccgagttctaaaaattgatcaggcaactaggcaatttgggagaaatgtcaccttctcggggtggaggtaggccttgtcgcggaacagcagcacgacgccggcctcatccatggcccgggcgagcgcctccgcgtcacgccgcgtgcgcgccgcgccggcctcgacgcaggcgtccaggagctccccgtacccgaccacctcctcccgcccgtccctcagccgccgcttgagcgcctccacgcccaccagccgcaccagcctccgcgcctccgccgccgtcacctccgcctcggcctccgcgggccgcgacgacggcggatgcggaggcggggagaagaggcgcacgtggcggagcgcgcaggccgcccctgtggcggttgccggagagggaggaggatgcgcggcgcggcggcggaggaggtgggaggcggccgcgcgccacatggttggttgccgaatgaggccggccgccggcgacggcgtggtagtagacttgtatactagcaaatgggccggaagtggactggactggacagagacccttcctctcgttttcctttccttttcagtttttatttcctttttctacgtgctagtaaaatcttgaccttttcttttctttttttcctttttttttttggaggatgtcgccatcgccaacgtgctgtgatctttacttcggaaagtgatgacttgggatcatggacaagaatcaacaaaaggatgtgccgttacttgtgtgctgttgtgatgttgtccattcttgcgaggttgcacagagaattccaatttgcaaatacatcaccaactgaatttatggggatgcaaaagatttttctttgatgaaagcatgcaccttgtgctgacaaccaagtcggtcatccttttgcatcctcatgccttatgcagttgtgctcttactcagtgtatttagggcatgtttagaagggctttcacttctaaatataactattgaaagtggagtttggagtagaactatggagcatccacaccgcctcactagttatttttttacgatcactctagtggtctagcccctttttcttttagactttagccttagaaaaaaagtgaagctagaatctgatcaaaacacaaccttatccttgtcaaacttaattcgcgtctttagaaaaagtaaagcaggagcttaagcccaatcaaataaatccttgttcttgtcaaacattatttgttgcagttatgcagtattgttagcgaattccacagacactgtacgtatttttcctgctaccgctgatcagctaacagttgtatccaatgtaacttccatttttacgctttcatagttaggccttacaccatgtcaaatcgaatgtttaaacacatgtatgaaatattaaatataagctaaaaaataactaattgcacagattgcgactaatttgcgagacgaatcttttaagcctaattacgtcatgatttgacaatgtagtgctataggacggattaattaggcttaataaatccgtctcgcagtttacatactgaatctataatttattatgttattagtctacgtttaatacttcaaatgtgtgtccatatatctgatgtgacacgccaaaaatttataccctggattaaacacccccttagggtgtgttagttcacgccaaaattgaaagtttggtttgaaattggaacgatgtgacggaaaagttgtaaatttatgtgtgtagaaaaattttgatgtgatgaaaaaattaaaagtttgaagaaaaagtttggaactaaactcagccttaccgtgaaattctagcatgaatgaatgtcaggttaccagatcagcggataacagagtacgggaaggcatggcaggagagactgcagtgtacagtaagcagtactccgtactggtctccggcgagtgaggcaggggtaggcaaggtttactaccaaaatgaataccttcacccaactcctcttaattctgctcatcatttcctccaattaatattgctaccaagtcacagacagacagacagaaacaagaaagccgagttccatcctccactcatccccgtctgctaataggattaaacttgatcaggcaatgtaattgtaaccccttccagcattcaggccagcagttcaaggaccaatgtcattaaaaatcagaccatgagctttgttgactgaaaactgtaaaaaatgaggcgagtttcagtctgcagttggtgctgtccctgcaactgattgtagagctcgtttgttaagcccgtccgtcaaatagacagcttcagatcaaagtatgcagagcaatttctgaggcatttggtcttgtcatcgcggagtggtagcaacaaacaggtcgtccggcggggccatcgttcacttcagtcagaaatgctgaattgattttatctgacgctgaagcttaggagacgatctttaccagtgctagcacattaacagcgatccgaaaaatcaggatcacaatcatcattaatggcgatccaaacaagataagctaggggggctttctgaaaaatgttgtcgattgcggcctcgtagccattggatgctttctctgtggccaccgtctcctctaccaatccaaaccctcgagagagacctcgccgccgctgtggtggtcgtcgtccatggctgtcgcgagcccaccgccacatcccatcttgtgccactgccgcccaggcgcccatcccatccggatgcaatggcgaattggcgatggctgaacaggcgacgcccgatggccatgagatgcgatgtgtgcgtgtcagcttcttcttgctcttgtgcatgtaaacccagcccaggaagggatcgtcagctcagcaatggcgaaactgtaagtctgcagtagctgttcttgtttcattttttttcgggagaatagctactttagtccctaaagtttgtctgtaggatcagtttagtccctaaccttttaaatggtccaaagaaattcttaacctttgtcataaagcctagaatagtcattgggtccaccaaaatcatcatatggatatgccatgtcatcattcatacaaaatctaagatgaacagtccaatttacccttacatatatcatagaaaaataaatataatggtgaattagacataaccataggaaaaaaataattcttttttcacccttttgaggtatatttttgctcttacatatactatatatttttttaaaattttccttttgttttttattttcctatgcgtaagggtaaattggataaatcatatagattttgcataggaaggtgacatggcatgtccatgtggcgattttggtgagaccaaggactatgggctggtttggtttcaggcctaaattagacttaacaatatttggtaatttcaatagtgtttagcgtctatttggtttgaagacaaattttggcatgcctaagaaaaataggccatttcaatagtgaacttagactattttggcttcaatccaaacacaactttaccttaccaaaattagtcatgccaaaacttgctaaaatttggcattgacaaaatttggtaaggcctatttaggtcacaaaccaaac

SEQ ID NO: 4993 - DNA, 3872 bp, Oryza sativa
cgatctccgtcttggattccgcttcggttttatcttcatctccgatacttgaattaccaaatttggttgttaacagttttacactttacaaagtttgtacaacgttaactacataatgtgagtactctaatttgtccggtacccattggtaccacaacactctacgtgttgaatgcggtctagaagttacaacgtaacctttacattactcaaagcctagctttgcactggaacgacaagtgtgaatgacctagagctattaggtggctggcccacgccttaaacctaacgatatgacgtcaaacacatatgtttccccatgagggactataccattatattggataaacatagttgcctggattacccttagcgggcaaatagttagctcctcttaatcaccactaaaactaattcatactactccggcctaccaaaatataaggttagaccctaaataacttaatcaactaagtctatcccataactagcacatgtggatgtacggtaaacaatagtgggtgacacaaagttcggttcttaatcgactcaggcgaacactcctgctatcagtgcacaactaacaccatttctgcatcacttatcgtccaagtctaaattcactatttgttcttaaggcaattattgcgacgagcaaaactgagtttaaaaataattgcaaagctcgcaacatgatttacttgaagtatcattattccacattagtagaatacatgaatcaatgtttaaggtcgtttttacgagtagtacagtactgtcggtagagaccatgtgaaagcactcaaattactaattgtactgctgcagtaaagcataaacactgttatggagtttgggcttgcgcaaattacaattacagtacactcttctgagaaaacagaaattgattctacctgaacaaggcacatcaggtttgtccagggcatactaccttagggccctttcaatcaaagaaattatgaaggaatttcataggatttcataggattgaaatcctatagaaaattttcctatacggccctttgattcaaaggattaaagttttccaaatcctacaaaattctgatggaatgactttttgcgtataggttttggaggaaacttagtaagaggtccaacctcttggtaaaaatcctttgagtctatctctcttatccgattcctgtgtttccctatggtccaatcaaacgatcatttctatgttttttctgtattttgtaatcctctgttttacccttacattcctatcagaatattatgtttttcctatttctccttttttttcattcctatggttaaaaagagcccttagcttgttcgcttgctgaagctttgacccggagatatcgatttcttaactgtatgcacattttttttaaagaatagagaatcaaatattgaaggaattcctgaaaggagattggatgtatgacattggctcaaagagtcgatgtcagaatgatagatcgagacaattaatattaaattcaagcaaggaaacttttacccaaatagtatcaattaagtggtcagccaaaggagaaatgtactagctagcaaaaataaaagaacaaaatctaattaattagttaaatccgaagtgcacgtcagattcagacaagaaatctcttgcgctttttggcatatctttcttggcgtctgatattaagttttgtgcatctggtttgcaccgtgaacacgtcggcgctcagttgaaatttgcaacatgcatgcatatccaactgtttgctagctagaacaggagatgccacataagagcacgatgtgatgccacgtaggtaataactggtcaccatcttgactgacttgaaacaattttggcagaaaagggtgcatcgagaaaatctttgaaaataataaagtgcacgatatttgacagtcctagtacttcgtaataaggccccgttagataatgatgaagaaaaagactagggctatgtttagttcatgctgaaatttggaaatttggttgaaattggtacgatgtgatagaaaagttatgtgtgtataaaagatttgatgtaatggaaaattgaaagtttggaaaaaaaaactttggaactaaacagggcctaggtacgaatacctaaaacaacaaagccaaaccaatgattaattaagttttttttacgaaatacaccatttaacagtttaaaaaacatactggtaaaatttatatcctaataaaaacgaacggggcctaagaccacaaatcacatttgtgcacagttgattagcatcacaaatcagttccatgagaaggagagaacatataaatactattgtacctccaccctaaaattttagttgtaatttttagctatgaatacggacaagtgaactaaaaattgttatattttataattttgagacgggtatagcaccagttataaacatttggcatttagactaaatttggttctaattttgaaacatttgaagtttaaatgtttgaccgaatcgcgtataagtaaatgtgaaacttacagccaaatatcatctcgagttcctacaattatgacacgacgagagtacagtaatattagtaaatgttggctaaaattatcctgttcatgatcgataatattgaactaccgaaaatctgaccatttacccttataaaaacatattattgtaagattagacccgttaaatgttttaaaaaataagccctgattttagcaccatccattctagcgcagaggtctaacacgttatagcaatccacaccgccgctatccacaacaccacttaccccaccgcgatggcaaatgagatttgaggtgacacactgagttaacgagaaggttagcaccattgcccttagccctgacctctaatgccttaaagtagtggatccactacttaaagagtcagtgggtgagagcatctataatgtgccataaaatggatcataaggccacacatgcacaccaacaccagatatggtgagagtggttatagggtatggtgggcctaatcttaaattaggaattttacatctagatgtgtaacccatcttcatatatattcttgtcttaagcattgtggcaatgataccttatttttacataggatatggtgggatcatacatttttccagtccaaaacattactgccatgaagcaagactacattactggagaactgatcattactcggatgccaaaagatcatatttgtcttggttcgaatagaaaggttcaacagctgtcaggcccccaacgatctaccacccgagactaaagatcaatttttaaagcccgattggtgatatcaaccgagactaaaagatgatctttagccccaggaaaaaaattgatttttaagtccgggttgatgctagatggagtatctttagtcccgggataaaaaaaaaatcgatctttagtgtgtagcaggtggaatggtaacgtgcgtgagggctgaggtgagagatcttgagtttaaatctcacatcccacacatttttttaacttggtatgcatatttagtccctgttagacatctttagtctcggatcatgtgtcccggttgcacaaccgggactaaagttcctttctccatcagtgcagcaactacacaaagattgctcgacagatagtaaggatctgtttagcacagctccagctccacctctcctaggtccagccaaacagtttcagctccacttgaaatggtagtggagctgggtgaagcgttctcacaaaatgaactagagagttgtagctgggtttaggcagctccacaactccactccagacttagggcccgtttggtagagctgcagctcctaaatttaactccagggtaccgagctcgaattcgcc

SEQ ID NO: 4994 - DNA, 31457 bp, Oryza sativa
agctagctcagtcgatttattctgtcttaattcaggcctttacgagttacgatcaatcaatcgatcgatcattgaggtgtcgccagccgcgccgccgtgccattccagttccagctgcagctccacctcgccggactcgacgccggcgagcctcagcaccaggccctgcgccgccttcccctccgacgccgaccacacaacggagctcccgctccttgggaccacggcggtgccgtcctctttactgtcaacgccggagggggtacggcggcggctgctcgccgcggccgcctccaccagcggccggagctcgaagaacgccgcgcccatggggtcgtcgacgaacgggtcacggtcgtagacctcctgtaagcaagcaagcggagattaattgatctctagcctagctaggagaacacaatggagtacatcgatcgatcgatggaggattggaaggtacgaacgagagtgacgaggagatggttgagatcttgaacgatgagcgtcaggtcctcgttccacactggattggtgtttttcctcactgtacgagttctcacctcctgcagtcaggtttccattgtcagtgacttaaataaatcttgaaacaaatctaacggtttaaaattatatgaaagttacatacatgttacattatattatagatatatgtaagttacagtgcaattacattacgattatactataattatatcagtcaaatttttaggagaaaatttgtcaacaaatatatagcaaaattaatgtataaacgatacgctcaatccaaaacatacaatgccataatcacttgttacatatggcacatttttttttaacgaccaacaccagaccgaagattctattgacaaattagaaaaaatatatatataactaaagccttggaagctataaaaaaaaagaaccaagaaaaaatcatccaactaggcaactgcacccatgagccaaccacctactgatcacgacagctccacacaactgaaacctagcacaacctggcccccggccgctatacaagagcggtcgccttctggcctacaactaagccagaactataaagatccgctcatccctcgtactaattcagcacactatgaacttacgattgaatcgatcctttgttcacaaaattcttttcttttttaatccttcataaataaaattgtaaatatcatttttttatattttattttaataatcctgttgtttctcgtaaaaaattatgattgaatcttgatttgctatgatttttaattaattaaattaaatggttgagaacttcgttcctcgttggcaaggatgttgtaagaattttcgaagtactcatgacactgctctttccaagatatgactgttgttacgcgtatagctaaacaatatgactgcattttcgtatttctctacgtaccgaattgcacgccaaacaggtagtttgtcaccaactattagtttttgcccccaaaccaactcgatgtcgtaatcttgaggcaatggttatgtaactgtttactaattttggatgaagattcacaaacagaattcaataattgtgtactccttatcttgggttggtaggtgtcttcttttttgtgtgagaaactttttattttgtatgctactctataataattagttgtaactcattgagcaaataccaggattttctattccattatctaaaaaaccaactcgatgtacgtcaatgccgcatcatttgtgattacccatatactccagtaactaatctttcaattcccaactcgtgtagcagttatcttgattgttgtcagtacattcacatcgatgtgtcatgagataataatgcaactaattaagcatttgaagcaaccaatatgaatgcatgcattggcagcgaaaactacatattttagctctgaccgagtcacgaccgcaccattcggcagcttaagttggtccaaatcaatcgatgaacaccataaattgttatgataaagcctctacctaagagcatttgcaatggtccaacttgaataatagcccctgtaccgaggccactccagggagtggtgatttaatttccagggactcggtttggtcaaaccgaatagatgaggtccctcttcaacatatgctgggggcattccagtccatacgaaaatacagtgcacaaaaaacggctacagacgcgattccagcgtataacgtggcatggaaggtgtttcatcgaaattgtaatggcatgtttgtgaatagtcgaatagtaatgttattttttaaatccagtaaatctttaatggcacgtatacgtatgcacatctcgcaaatcaattcctttcacttagctaatgttataccccagaggtttcagatgatccatttgaacatatttcagttaatttggtacaaattcgttcgaaatacggagcaatttttaataatcttatggcatgttcaaattgtagccaaaataaaccttaccaaattttagcaataccatttttttaatttggtaatattgtcaagttttgacaggattttctatgtatttactagagtttggtaaaaaactaaattgatgcagtatttagcaagattaccaaattttagtaaggtttgttttaattacaatctgaacaggccttcaataataactcggcaatagtacgtactagcaagcttaattagcaggtcgaaagagtgaaagagatcacctggttgccgagcttgaggacgacgtagggatcgctgctgaagacatcacggacggcaagattggtccctcgcaccaccttcaccttcaccaccccgacgatcacactgctgctgccgcactcctttgccatcgatatctatcttgctgagcttgagtaagacagttcagagttgtgtcctctcaaattagtcttgctcctctactcctactatatactccctccgaccaaaaaaaagataaaccctgggttttcgtatccaacttttgattgtccgttttatatgaatttttttataattagtattttcattgttgttagatgataaaacatgattaatactttatgcgtgacttgtattttttaatttttttttcatatttttttttaaataagacggacagtcaaacgttggacacggaaatccagggtttattttttttttttgacggagggagtactatgtacttatgcctctatatacatctttgtttgtgcaagtccgcaaggcttatatataattaattgttccacgtaagcatgcatgcttcacgcttggattaattaaaggggactaattgataatgtgacgatcagcaaactgatcatgacactggagaagaccttatcacttgaaattttacacatttaatacagactcaggaccaaatgtgtaaaatttcaagcacatgatgatcaaatgatcaagaaccagttcatagatctggagaatgataaaccatcgtaagagcaggtacaatagcaaactataagccagctgcaaacatattttaaggagataaataaaaagagagaagagcagcggactacaaatttatagccagttgtagcacggactctaagacacgctgtgtgtatgataagtgggaccaggtattaatagtgtagtatgtaactattgtatgaatgagttattagattagctatagatgaattagagttagtagtcggctatactattaaacttgctctaagcaaacatggacataaaaaaattaggagatgacataacgaagcttaacccaataaccagtcagaaatcatggtggtgtcgaagacgccgtggtccggttgtcagtggcatccatcattaattgattggtcaggcatactgacgccgtgttctggttgtcagtggggatgatcctcctgccctgagaggaaaagaaaccagcaaaatgacaggtgcacagttcaaatttctaatgccaaaacaagaattgagatccctaaagtttgaaattattgcagctaatacaatactccacagagagagatctaaagttcttcaccatatttcgtacaaattaaaagccaaaactctaatgcatggcccccctaatatcactacaccagcaaaatggactgcagcacaagcacgtatggataaaaccacaagagtaaaatacaccagcggtccttaaacttgtcaggaggtttcacttaggtccacgaacttgcaaagtgcatatcaaggtctctaaacttggtttattgtattatcccgatccaaagccgcgtttgactgtggtcttgtctacgtggcacgccacgtggacaatgacatggaatttttttttcttccttcttccttcttttttttatttcttccttcttttttctcggtggtgagaggcggcacgaggggaggggttgtcgcagtggtgaaaaaagaaggaagaagggagaatttttttaaaaaaattccatgtcatcgttcatgtggcgtgccacgtaggcaagaccacggtcaaacacggctttggaccgggatgatacataaaccaagtttagggacctcgatgtgcactatgcaagttcgtggacctaagtgaaacctgctgacaaatttaaggaccgcaggtgcattttactcaaaccacaattatggatttgaaagaaatgtatagtgcagctatatgaccaaaggaacataagtaattaacgccagcacttacatgcttacaatatggcaaaagaacataagtaaaccctcaatccaagagcctcataaattggacctcaaataaaaggcaaatgtctcattgcaagataatctatgagaagaacagagaggaacctaaaacatggcaaaaaaaattgctacgtgatgttttttttttcctccatctgaagacttactgctaagaagaactttaggcctagataaggacagataaggacattatgatctgctcctccgtttcaggttataagacgttttgataaactgttacaagtttgactaagtttatagacaaatatagtaatatttataatactaaattagtttcatcaaatcaataattgaatatattttcataataaatttgtgttgggttgaaaatgttattacttttttctataaacttggtcaaacttaaagcaatttgactttgaccaaagtcaaaatgtcttataacctgaaacgaagggagtatctatctattataatattttactaagactgacttgaaagaaggcaccacgttcattttgaaaaccagaaattgtcacataattatttggagaaaaagaaaaatatcttaagtgttagatcatggtgggttcggattataaaagtgtagatcaattgatattgttctatataaaatacaattatatctgcagaaatagaatttaagagttgtatatgaaatctagagcttataaaaatagaacctaagaatcatatatgaaattcaaatataatttcacatataatggtacctatataaataaaattttggagttacatattaaatcttactctatgtgaattatctagcaacgggcaaaactgcagttttgcgcaaggcaatccccctagtttaacatgaaaaatagctatgaaagctcaatagagattaacgaaaaccattgcctctttattaatatcacaaattgcaagttttagttctagatatcatttgtgaactacctagattacatagtcaaactatgatgctagaaccatacaaaattgtcatccaataataaaccatggaaagtatgtatctccgcctagtgcactgcccacttccgtcactttgactagcaccatcgttcagcctgcccttcacatgatatttgcacctctctccgccaccaatagctccctcctctttttttttttttgacaaagagagttttatcgatcttagataattacatcaagaggatacaatcattctaagaccaccctcggtctctgcatagctctctcctcttggggaaggcgattgaggaaaactcattgaagaagttcatatcatttgggacaaccttcttcttgtgaaaatggaggactgacatcaaatctggtgcacatatactgctctctctgtggcaagcattggtggcacgcctagtagtagttagcggtcgaccggatggtagatgccggagagaagtttggaagttccaaccacaactagccacaaccgtgatgaaggaggtggacattgaaaagtccttcaatttgaacaagaaagggaaacaagattaagccaaccacggaacaagcccgaccgcggttgctcctccctcctaatcggtgactaatagccgtcagaactggaggaggaaagggtcagccgagagaaagcatgagtcgtttttgagtcacctcatcaacacggagatagggggaataaaaaaactgaaactttaaatacaaatttaaggaggaaaaaaagaaatatcaataagaagtaaagtggattaccgagaatagggtaaaattatccaaaaaatttagggtttaaatgcgccaagcgatcagttcgaggaagtacctgaaataattttctttattttatggagagatcataaaaatattatagtccctgtacaaaatttgtagacggagagtagtatgtaacatagttttaaataaaagttgtttcacatggttcgaaattatcataatctacgataataccaaacagaaattaagaatataaccatggtttacatcctctactgatttcacagaaagcacacccttcagggaaaaaaaaagaaaggttaggaaaggaaacgagacagatatggtctgacgcacttgatacgtgagccggttgccaaagcttgaacatcccttttggtcgagtcctctgatcctctcacgcaacagtgatgaacagtgcgtgcaagcgatcgatcgttgtcaaacatgtgcaacacacacaaatgcacatagcacactgattgtccaacgagacgaatatatataaaatgtggtggtgatatacgaggacaaactacaaaggcatatatattaacatgcgacattaattagtggtagcataataacatcaacattgttattgtttgtgctaagcccgcgagcttattaggacgcttttatgtgtggccgggcccgatttggtgattgtttttgtagtactgggccgagctgtctgtaccgagattttcctttgcgtttcacgacgccaccaagcgtcgtcaccgggcgcggcatgggaacggggcatgggacagcagcggccgacaacgcaggccggcagccgggtgcgcggcgcgcacaccgaaaccacctaacccacatttggccgcaagtggttccttcgatactcccataatataaaagattttaactttttcttacactatttaactattcgtcttataaaaaaatagaattattatttattttatttgtgacttactttattatttaaagtattttaaacacaactttttgttttttatatttgcacaaattttttttaataagacgagtagtcaaatagtgcaagaaaaaatcaaaattctttatattatatgatggagcgaatagatatagcttttttaagatgttttggtctatctatcggtacaaatttagacgcatatacgatgaagtactcatgcataaatctctacgtctgttctctatctctactattataaaaattgaagatgtttttgtcagtattttaatacgtcaaccgtatttgagtcggtttttaaattcgttcgcttttgaaaatacatatccgtgtttgagttgaattttaacttcgtttacttttaaaaatgcaaaagaagtcgtataagaaatctctgtaataaaactcgcatgctaacttgagatgaaagtcgtacgcctaattacagctcatgattttctaaaaaaatatctaagcgaattccgacgatgaatttcatttagctaaaccgtataaatataataaaattaaaatataattcacatgtttcaacgcacaggcattttttctacttacttaaaaagtataaaatatttccgtcgtccataataaaaagagagcggaaaaaaagtcacgcaaaaaataagggatttgctatagagcagcatgctgtttttttttatcagccgaatgttggctagacagtccaaataataaaacaccatcgaaaaaaaaggcgaaacaaaagttcggtaaaaatacaaggaaaaaaaacgccgtccaaaagaacagcaaaaaaagtacgattcgtaatcatcgcaaaaataacagtggcggaaaaaagccatgaaaaaacaaaacaacgcatatgtaaagaaaataaaaaaacagcgaaaaaaacgtctcattggtaggcaacgaaaaataagccggaaaaaaagaatcccaaaaaatgcagaaaaaaatcattcgatttctacaccacgggaaaaaataccgtgtcacaataaaaaaaatccagcaaaaacaaaaagacgtgtccataaaaaaatttaaaaaggatgaaaaaatatttgtcaaacaatgggatattgtttcaccaaaaatatgtttcattgttctactcattacatgaaatgttccagaagatgcaacatttaataatatacagaccgcaacaccatcaatgaatatatgaaactttgagtcataatgaatgaaacatagaaaaaatatcatatgcaacatgtattatattttacaaatacctaatactttttataccacgtctgaaatatcacgctataagcattgaaacatcacaaattaccaactaaaacattcttaaaacatgctatgtgatatttacaaataaactagtgaaacattacgaaatacttattgaaacatctaaataaaataattgaaacataaacaaagatttattgctacaaaaaatgttttgattggaatatagtcatatcgtatcttgttataaagatttaactacaataaatataatagtgtaatcgaatcacagttttaatatatggttatttggaaaaaaacatttgaagcttgttaaatagctacatgcatgaacaataagtagtatgtcagctgactgatgaaagagagaaatgcattggttgttgaaaaagaaacgacatgtatgttggttgtaatttggggcaagtgttatacggtgcgtctggtccgatctttttagctggatcggacgttcgaccgtaagcattttcctatgattccatgagaaaaagtttggcacaacgtaacgcgagaaacaaaaatccggttccacgcaacgagaaaaaagagcaatccgattcgaggaaaaaaaatggcaagaaaaaacgcagcctaaaaaaaggttcgcgaaaaaaaatcatttcgctcaacgtttaaaatctgattccaggaaaaaaaagtcgtcccggaaaaaaacctcttcgacaccccgcaatgttctatatatcctatctctatgaagagcgaaatttgttttcttcgttcatcaatttcttcttcgtatcggtttttcggtgatgtgctttttgggttttttcacgcacgcattgacgtacttcccgagtcccgcgggagtcctccgtgcgttactaaatcagtttgggtcaagtttttctgcacgtatatatccaattcgtgatcacaatttgatttgataagtttcaagaattttttttgtccattggtagagacaacatccatccaaagatcgaccgcatcggtgctgatcaaatagctaggatgcccacagcccacaaaactttccttgagctgagtctgccaaataaaagcctcatcgtgacctaaactcctctcgccacctagctcattgctcccaccaagcagccaaagctaatcaccgcgagcccgtgatgtactctcgagtctcgactatcatatcgtccatacgataatcgaggcgagagaaagtttctatgcatctatccataagatttaaattggttcaaccaaactactctctgtactcgttaagaaaatcatttagaataatatttaagttaaaccttaggaatataaatcataaataactctcaagttattgtgtttgaaaatataaaaattatatgaatatatttgtcttgaaaaatactttcataaaagtatacatatatcatttttcaataaatatttttatagaaacaagaaatcaaagttgtgttttggagaccgtgtcgctgttcaaaacgacttcctttacgctctctgcgtcgtccaaatagtgtcaagtcttaatttcaaatccaacctatgacaaaggtctataatttcaaaaaaaaaatcaatagctctaactcttgtttcggatcggttatcgatttatttgactatagatatttcatgtgtagtttgacgtaagtagctaaatgagtgaggtgtagttactaatttaagtctctccagtcctctcacttaattttatcgtagtcttatttgcctttcacgtttctctagctagatatgatatattgtaacttttccagtagcaacgcacgaacactttgctagtctatttaaaatctgaaatgtctcctaataacagagcaagtgatactcatgccgtactacacactagtacacatacacaaaatatttttccgtgcggtcaaaatgcatttttccgtacggaggtcccgcctagctgcacctaggtgtctgcgaaaatccatattttcgcgtgcgggtggcccaaccgcacgggataatccatcttcccgtgcagtcgggttaagtggaccgtacaagatgatcgattatcccctacggtcaaattataccgcctgcacgcaaaaaaacgaaaaaaaataaaatccaaaaaatccaaaaccctaacgaccctaaccctagaatcgccggctgctgccgcatgtggccaccgtcgtccttgtcatcgccgtcattgtgccaccgccgctcccgaccgcgccgcttccgagccatccgatcccgaccgccaccgcgatcggccgccgtcactgctcccgggcgcctcctcctcctcgtcattggcgtggcgcagatccggccggtcgctcgccgtgccgcctcccgcctgcttccgttcgccgcctcgttggcggcagcagcgagccgggcgcctcccacaccccgtgcgctcggtggggaggggaggggaggggaggagaggagaggaaaagaagggagagatgagtgattgagggagaataaaaggaaaaaggaagagagaaggtgaaaattttgaagtgagtgagagggaaaagagggagaggtattttcgtgtgcggtccacttaagaggcccacacgattttcacgtgcgggcctattaaggatctgcacgcgaaaatgggaggccgatttttcgtagatgcacgcgaaaacggtccgtctgggaaaatgggagttttcaggaaaatctgttttctaggagtgacaataacgtgaaatactactacctctgtttcatttataagactttctagtattgcccatattcatatggatgtttttttttcagggacattcatatagatgttgcatacctagattcattaacatcatgctagaaagtattgtaacctgaaacggagggagtagtaaaatatttcagatcttggaatcgaaaagccaacgtgctccattaacatgttgctactcctaattaagttttttataggacttatcctattagtttgatgataaccttccatcaaaacaaatctaatactacaaaatataacgtatctagtgctaaaaatctgtataagaactctgttcagatccgtgataccttttaaatctcgtactaactttgactagtaatatgcccgtgctatacgctacgggactattctatttatctttattaacatttaaaatttcatgttagcaattttttttatgatatgtacaattaagctttaattcaatgcatgccttaatcaaatatatttcacaaaaagtacaataatatgatattatataggcacaataaatctggaccagaattgattacataatcacttagtatacaatatagagggcaatatacgtttaaaagtatgtttaaaaagtaaatgagttatttcattaatttgttgcgggtgtaaacaagtacaaaaacaaagcatttgatgcctatgtagaataaggaataattaagaatttgccactcttacgagtggtgataaagtatttgtcactggacccgcatgtcattgacatatgagggcccacatgtcaaagaacacgagtggcaaataattaattgccacatcttaaaagtggcaaaaagttaaacgtgagcaatgctagaaagttttataacctgaggtagtacttgagtaactgtagatatgcaccaattttttaatgatccatttgaacatagatttttttttttgcaaaattctatgttctaagattcacatggtagaaaaaaaagggaaatgggtaaaacggaagatttgaagtggcatgcttctccaatcatacgggaataaaaacacaagaaacaggataggaacactttgatagtaccataagaaaaagaaatgaaagtttagcaagagatcataccccttgttatttttcctataaaagcaaagcgcaggaatacaatcctattatttttttctatcttttcatatgaataaaaggggagatatagggaaaatttcatacgaacttaaattgtgtgaaaatcatttaccgacccaactggcgcgtctattttgtagtgtccaatagagattatcaatcagcaagcggtacaaaaatttagtacaagtttctacaatcatattaaaaacataataagttgtaaaagaatcaaccagggttttccatcccattcacagaccagcatgtttgacatattaataactgaatgttaaccagaaaacatttcattacccaaagactaacctttatttaatgcaacccaacaaaatagtataagatattagtcctttttgcgcgaatataagatattagtccttatcctgctggtgaacatttaatttgttactaccttactggtggccattgcatactccctttatttggcactaacctgtactggtcgccttcctccatcttattttaggtttctactttaccataaatacctgtaatcttttcagtttttcacaacgtaatgcttatctgctaaaaaaactgagtgtttcagttgcaatggagaaagttagtacaagattctatgcatatccaagagtgttcaggttaagaagtgcagggctaaaaacctcatattttaaatttggccatattaaacctaacaaataacataaaagtatttctgggataaaaaggaaatttaaaatatgaagctcatcatcccacaccatcctgaatttgaaatattacagatgacatttgaccatatggacatggcttcgtcaaaggccttcaagtaaggagtactaaacagcattctgtatcttttctacctaattaagctgtacacttaaatcctattcagggtaacaggttctttcagaaatacttgccgcaaccaaaattatagttactcattcccttctgctatgatggctagtgatgcaaggaatacaacatgtatggattgggaaaatatcatcaggactgaagtcactgaactgtgattcaaaactcaaactcaactccagacctaaaacattcagacctcaatttcagtgataaaagtgcagatcatgtcatgcattgcaccacctctgttcgtaacaaggcactgaatggttctaagttctaacgttcagtgcacgggatttgatcgtcataaatgcatcaaaaaataaaataaaaagtgtcaactttccatagaaacaacaaggttcgttgctgttagtatctgtggagattatggataccccatatctacacgacagttataatttagtcggatatatggtaccaaatatagatataatatctctatgagtactcgggttaattctaaacttatatgtcaagaaaatacccgggatcctagtcgggtacgaatggtattttatgtgtaaatcccataatccgttaggaaaatgactgtattttgtaaagcggactccttcccctatataaggagggtccatgtgcctcttggggcgcgattcttttttcccagtttatacaatcaataacatactcggcggaatcatccccggacaggagtagggtattacttcttgaataagaaggcctgaacctgtataaaattctttgtctccgaacccatccactttcctaacttgatagccacccccttttattattgccgaaatcttgtttcgacagttggcgcgccaggtagggtagcgtcaagttttttgccgactaagtgcgatgggttccgtctctggcatcgacgacttcgccttccctcccgagcaggcattcaagttcggcagcctcaacttcatcaccaacgacttcggcaagatctctctccttgactcggattcaaaccagtcggggagagaccaggcccccgtgccgttcggtattccgaactcggtcgaggcctactccaagatcatctctcccgagtcggcttcaaaccactcggacgagatccaatctactcttccgcgaccagatcaagacgacgggtcctatccctcaatcctgatgaaacttcatgatgacttggccgctgtcttcacagtcaagacatctcccactcgaagatctaggcgagctccggctttggccccgatccgatctagatccagggaggttggcgttatactctgtcacgcccagaaattcactagtaatttccgaacttatttgtgcataaaatcctcgtccaggaatcagccgaggtacacaaactgacaatttaatatacagaatcatcaataatagtgttacatactttcaaaagaaaagaaaactgcagcggaattaacggtctagcgatggcttcagctccactcccacaggcaactcaactggggtataagccaaacgtcttctccttctggatcctttatcttcaactgaggttgattgattattgcaagaatgagcatatgacatactcaacaagccacacagcaaatatgcaagtgcacaaggataccaaaggatggcataatataggctcatttgcgaaagcagcatttagcaaagagttaagagtagtaaaacagtagagtaattaattaaaaattttaatcaacactgaacaacacacccatgctgcacaggcccaaccatcctgaacaaccatacccggctgtacagatctaactccaaaccaggagctaagcaaattattaccaggtataacatccataattattgtgagaggtgtgagactaatcacgaaaaacattgctcaacccgcccataaccgcgggcacggctattcgaatagttttactctggccagaggtgtaccactgtacccacaagacacagcctcatcatcatgtctaccatgcgtcgcgatactggaaagtacccgaatagaggctgtgacaataccctttgcacaacacaactcaccacagtgcaccattcctggatcataatcaccccctctataaatataaccagaggcatggactccccagcgacccccacggacttctcgccgcttctcagtctggtgccccgcaatgaatcatgctatacagaaggtaaagccgttgcccatgctggcttgtggttggtacggttaatatttcacaacagtagctcgtgaaccggtccttaattgtcatgagcacgaccttcaaaaccatgtgctcacaacccaccattgtcaagttttagttatcaattaattatcataacacgattaaacatcgtgagctaccattaaatataatcataagtgatagtgtaacattagttatcccaattatgtgataatgtttctaagcatggctaagcaattatatatacatagcatttagctgaaccaaaccaatatataaggttcaagctaatcaatttgttacccaaggtatcaaggaataaagtaatcaatgcaaattggccataacaaaggaataggttcacaccacccggtgacattcgaaaataaatgcacagttgaaataaatagagaatttaaatataggatcaacatgctcaaaggattgtgtttaggatctgtgtgacttgccttgcaataatcggtcttcaattaatcttcttgaatacttccggcgcactcacgaaccttcgcaacgacggaaacgacaaactaacacgcaaaacgaagaaaaagactaataaaaaccaaataaacagtacatataaagtaaacaaacatgtagatcatgattttagatgaatttagcaacttgaaccactcaaaaccgagttacgatgatttagttatgaatttccgaagatttaatctattagaaaaacaggaaaaagaaaaaaacgatgatgacgtcatgatgatgacctcatcaatggccgaaccaagatggcgacctcgccggagattggatggtcggctgcgactttggaggacaagaacacgtagaggacgacgagacgaacccaacggtacccaccctcgaaccaaacggcgaacgacgacggccggcgacgaggtctagcggcggcgcggcttcggtcgacggcggcgacggggctgcggtggtcggcggcttcgggggtcaggcggccgggcttgtccaccctcccgcgcacctaacggtggtgacggcgaccggcggcgacgacggaggcggcggcgcgacgcggatggagctcggccggcgacgacggcggggtggagcacgtggcggcggcgctacgaggcacgggagaccacgggggagggggcaaacgaaagaggaggactagggggtcctatttatagccttggattgaagagatcggactcctcccgcaagaaatcgatccgggaaatcaaaaactcggttttggagataaactcgaaaacgagctcgattcggataagatactcaacgattagctccgatttttggggtaaagatagaggaggataagaggaatatttcccctcaactaaattggaaaaagagcaacggggaggcgagatttggaaggaagaggcggcggcactgtgcacggcacggctggctcgggctctgcctgagttggaagatgaacagtagctcagggagggaaagtagacttttccggctaggctgagaggagaggaggcggctcaggttgggccggcggaagagagaggaaggaaaggaaggaatgggccgaaaatggcccaagctgaggaggaggattttattactttcccaattaaaataatcacttaaatgatctttgaattgttaaaaatacttccaatgctcaaataatttcaagaaaaatcctcaaaatacttggacactcaaagtacttaaaaaaattacaattagaccatttaatgattaatttaatatgtgggtaattactgaaatgctctttgtaagattaaaaattaggaattgagctccgaaaaatccgagaatattccagagagtataattaaccatggagaatttaataaaaattaaatccatccatgctttaaatttaggaaattttatttcccacatttaacttcacttgtaaattaatgaacatttaatataaattctaataataatttattaaataatttataaatcctgaaacaaaaattcaggatgtgacatactccaacccctcgggacagtctcgacggaagagttggatggctacctcagctcccccggcgtcagttctcgaccaaccgagatcctcgactacgacgatttcggctaccactacgaccacggcgacctcgacaacttcgacgacagctatgaggataactacacgcccctcttcttcggcgtattcatggctgacaacgaaacggaggaacagcgccaagcccgagaagcggaccaagatcgtgcacggcaagaagctgaacgtcgccgactagaggaagagcgacagcgacaggagcgagaacgactacagcgtgagcaacaagatcgcgaacggattgcaaaggaggctgaagatcgacgacaacgcgccttagaatctgggcggcgagcgagagagctcattgggcaacaagacgtcgatgggacagcggtctttcgcaccccccagcagaacacggttgcagcaatcactctcctcaacaccctcctcaaggaagacgcactcaaccaagctgatcatgttgtcaacatcttgaaccagacaaagaccatgatcgccgcctcggttccagccaactccgcaagcacccgcaccccgactggtagccgagtccctcatcttcgatctcaagactatcaccagccaagcctcagcattgccggcgccggatctagtcgcaggagcaggggacatgatgaacggtctgttcgttcgcctcccgaatgatatagggagcgtcgagttgaacgaccacactccccacatcgaaggcgccccatcgatcttcgcgacaccatcaaccagcgccacgcagcaagaggccatcattcaccagatcgcgatgacgacgacgtggacggagttgctgccttcacaagcgacctgcgtcgagtggattggccagccggctttaagccgtctggaattgagaaatatgacggcaccaccaaccttgagtcttggctcaccgtctatggtctcgcaatccgcgcagcaagaggagacagcaaagccatggcgaactatctgcctgtggccctagcagattctgcctggtcatggcttcacgggctaccccgcggcacgatcggatcatgggcagagctacgcgaccacttcatcgccaacttccaaggcacttttgaacggcctggtacacacttcgatctctacaatatcgttcagaagtctggagaatctcttcgagattacattcgacgcttctccgagcaaggcaacaagatctccgacatcaccgacgacgttatcatcgccgcctttactaaaggcattcgacacgaggacctagtcggcaagttcggatgcaaacctcccaagacagtcaagcagatatttgaaaaagccaacgagtatgccaaagccgaagatgctattacggtgtccaagcagtcgggcaccacttggaaaccaaagaaggatacgccgaccggaggagggagtggaagtaacaaccacaaggaccgcaagcgtaagcccgaagaacttgtggccacaacctctccatcttcccgacaacgttcccgcgtcaacaccttcgacaagataatgaactcccaatgtccgcatcatcccaactccaaccacgtggccaaagattgcttcgtcaacaaacagtttgcggagcaatacgtcaagaacgcacgtaagccctcaaacggagatcaaggcacatcaaagaagaaagatgatgaagacgatgccccgactggttttcaagatcatcgcaaagaactcaatcacatcttcggcggacccctagcttatgaatctaagagaaagcagaagctaacagaatgggagatcaatgcggttcagcctaacacgccctaatattcttcggtggtcagagatagcaattaagttcgaccgctcggatcatcccgaccgagtggtccacccgaggcggtaccccttggtactagacccagtggttcgcaatgtcaagctctgacggactctcatcgacggtggcagcgcactcaacatccttttcgctaagaccctggacgatatgcagatccctcgcacggaattaaagccgagtaatgcacccttccacggtgttatcccaggattgtcagctacaccactcggccagatcactcttctagttaccttcggcactcgggagaattttcgcacagaaaatgtttgtttcgaagttgctgatttcgagacaacatatcatgctatacttggatgaccggctttggctaaatttatggccgtcccacactacacctacatgatgatgaagatgcctggtcctcgaggagtcatatcactacggagcgacatcaagcaggccgtcacatgtgacaaagaaagttgcgagatggcccaaacccacgagactacgctcgcccgcgaagaggtccgactggctgcgaccacagcaagcgagggagaagtgcccgcaaccaagctaacgaagaccgaagaaagtgatgccaagacgaaaaaaattcccttagatccctccgatcctgataagactgctgtaataggcgctgagttagattgtaaataggaaagcacgctcatcacctttcttcagaataataaagatatttttgcgtggaaaccatctgatatgcctggtatccccagagaggtgattgagcactctttacatgttaaggaagacgccaaacccatcaagcaacgactccgccgttttgcacaggacaggaaggatgcaatcaaggaggaattaaccaagctgttagcagcaggcttcattaaggaagtccttcatcccgactggctggctaatccagtcctggttcggaaaaagacggggcaatggcgcatgtgtgtcgattataccgacctcaacaaatcctgtcccaaagacccttttgggttacctcgcattaaccaggtggttgactcaacggccagctgcgagttactcagcttcttggactgttactcgggatatcatcagatccgactaaaagaatccgactgcttgaagacctcgtttattatgccctttggggcctactgctacatcactatgccctttggattgaagaatgcaggagcgacctatcaacgcatgattcaaagatgtttttcaactcagatcggtcgcaatgttgaagcttatgttgatgatgtagtcgtcaagaccaagcagaaggatgacctgattgtggatttagaagaaacttttacaagcattcgtgctttcaagatgaaactaaacccggaaaagtgcatcttcggagtaccgtcagggaaattgcttggatttatggtatctcaaagaggcatacaggccaacccggagaaaatcaacgccatcctcaacatgaaaccgccaagctcccaaaaagacgtccaaaagctgactggttgcatggtggcgctcagccggttcgtctcacgactcggcgagcgggggatgcccttcttcaagctgttgaagaagactgacaatttccagtggggacccgaagcacagaaagcctttgaagacttcaagaaacttctcaccactccaccagttttggcctcgccacatccgcaagagccgctactgttatatgtgtcggcgacctcccaggttgtgagtacggtcctggttgtcgagcgtgaagaggaaggccatattcaaaaagtccaacgtccaatttatttcgttagcgaggttttagccaattccaagacaagatatccttaggttcaaaagttactatatggtgtcttgattaccatcaggaaattatctcgctactttcaaagtcacccggtcacggtagtcacatcgtttccactcggggatatacttcataaccgcgaagcaaatggacggatcgcgaaataggccttagaattgatgtcttttgacatatcgttcaagccacgaacttcgatcaagtcacaagctttagctgatttccttgccgagtggaccgagtgccaagaagacatgccagaggaaaagatggaatattggactatgcattttgatgggtcgaagaggcttataggcactggagctggggttgttttaatctccccgactggagaaagattgagctacgtattgtggatacatttttctgcgtcccataacatggcggaatacgaggcgctactccatggactaaggattgcaatatctctaggtattcgccgactaattgtccgtggagactcttagttggttgtcaatcaagtcatgaaagagtggtcatgtctagatgataatatgatctcttatcaacaagaggtacgcaagttggaagataaattcgatggactcgagctcacccatatcctccgacataacaatgaggaagctgacagactggccaattttggttccaaacgggaggcagccccttctgatgtgttcgtcgaacatctttacgaaccaaccgtacccagaaaagaaacaatcggagccatggatactcaaggcgtaagcataatcgaaaccgattggagagaacctcacataaaatttttgagcaaacaagaactacctcaagataaaaatgaagccgagcggatttccaggcgcagcagactttacattattcataagacggagttgtacaagaaaagtccatcaggaatactgcagcgctgcgtgtctttggaagaagggagacaattgttgaaggatatacattctagtatttgtggtaatcatgctgctacacggactattgtcggcaaagcttaccggcaaggttttttctggcctacagctgtgtctgacgctgacaagattgtgcggacatgcgaaggttgtcaattttttgccagacaaattcatctgccagcccaagagttgtaaaccatcccgttgtcctggccgtttgcggtctgggggcttgacatggtcggcccgtttaaaagggcagtcggcgggtacacgcatctctttgtggctatcgacaaattctccaagtggattgaggctaaaccggtcatcacgatcacagcagataaagctagagattttttcatcaacattgtgcatcggtttggggtacctaatcggatcatcactaataatggcactcaattcactggcggagcatttaaagacttttgtgaagactttggcattaaaatttgttatgcctccgtggcacaccccatgagtaatggacaagttgagcgcgccaatggcatggtacttcaagggataaaagcacgactgttcgaccgactacgtccctatgctggcaagtgggtagatcagctgccgtccgtactttggtctttacgcactactcccagtcgggctaccggccagtcgccgttctttttggtttatggtgcagaagcaatgttgctgagtgaagtggaatttgaatcactatgatttcggaacttcaacgaggagcgctatgaagagggccgagtagatgacatcaatcgactagaagaagcccgtgaagtagctttaattcagtcgactcggtatttgcgagggttgcgccgttatcataatcagaatgttcgatcgcgagcctttttagtcggcgacctggttctgaggaaaattcaaaccacacaggatcggcataaattatctcccttatgggaaggaccgttcataattgctggagtcactcggccaggttcttatcgactcaagcacgaagatggtactctcatcaacaattcttggaatattgaacaccttcgtcgattttatgcttaggcatttcgtttgtatctttcctctttgactgctaacttcaagtttttccttgaagttttcagtcgaggggctactataataataatggagtgtgattttttatcaattcaatttgcttacttgatgtatcattgccctgtttgatttcttggcttagtcaatgaggactgaaagttttttaacaacttttgcgggttttaggctcaacaaggtttgacaaaaacttttaagaaatcaggaactaagttgagatatcaagcacaacataaattcatcagtattgtacaaattgtgcctccatcatcattaatcatcaaaatcattggtatattaatcaatatcagtcttttcattatcagaattatcaggaccagtcggtcgaagatcggtgtcctgaaatctctcaactacatcaactgctatcttatcagcagatttttgtgcatcgctgatgaggtcaagagcagcttcttcgctcgtcccgtctgcaaagccatcaatggcgtcaacgtcaaccctcggataaagagatttggtcatcgcacgccagacttgctcccatacttctaacctctttgatgctcttgaaatatgtatctggagcaactctcagcttgtcgaagatttcagaagcatcaagtgcactcgggccgttgttattgaagaacatcgcttgaacaattggggcagcagcgttagcaacctcatctcgggctccttcaagttttttgatcttgccaaccaggacgtcgaattgagcttgagacttgatattgcggtctgtatcaacagattcacattaatgagtcagcatttggaggataatggcttttgaggtattgattgttgataccttcaacttcctttaaagccaagtctttttgtcttgctagctctgccttgtcattctccagagtttaaatctgcttctctaactgagatatcttggcagcttgcactacattgatcacggttaatcaagattgcaaagataacagtatgagtcagttgagcagagtttgtgcataccttttgacgagccactcagttcaaaatttgattcctggagctcagcaatccgatccctcagatcatgttcattcttcctagcaagttcttttgcttcgtgcagttgattcctggtggcttcgagggttccgagatgagggactaacctctctaaggttaccgttttggcttcgttcctaagatgaatcctctgcaagacagtttaattagcgcatgaattaaatggcaaacaagatggttgagatcaggtgccagagagcttacatttacaatgcaggttgcctgaccaagtgcctccttcagtaggcataactcttcgtcctctttttgcttatttatcacgatcccttgaggctgcatgttgtcatcccaccacttgaccagaataggagggcgtgaatcctcagctgcttgtatccggaggatttcttcttcatcaccaattattggccctagtgtatccatgaatgaagatgaagcggtcaaataaagtctgttggatcaaaatgatttcagatagcgtgtctacctgtgatgattcccggtcggggacgagtggactttggtgtcttcacaggagatctggtttctgattcactgtcagcatccttcccgagaggcctgttcgtttgagcttcaacctcgggaatcttttggcttgaccctacatccgactggtttccagtcgggggctcctggttagcgccaacttcagcttcggccgactggttcgcagtcgggggctcgttgctgggttctacattgtcggttgccggttgtttgtcactcgggcaatcctctgcagttggcccggtttcttttgaagggtttgcctctatgtcagccggctcagggtctttttcagaaggatctatgtcagacggcttcctacgaatttgagttatgttgttagtattatttcaacagcgggtaagctgcaagacaaggaagatggccaaatgatttgtacctggaagattttctgatttttggcaaaggacgactggaggttttcttcttcggattagttggcttcgggggttttccggtcgctcctttgtctccgagccttccggtatcatcgccttcgtcgtcgcttagaactagcttcctcttgcaagaatctgactggccgactggatcggaagcacttggttgagcgtcagaccgaatttttggtcctccactcgcctgaccagtctgctggcaaggtgatcggcgttgagcaattggaggatccgatttcatcaaggcaaattcctgggcatgatattttgaattttcaattagcttaatagaggacaaaagcatacttttgaggaaggttgaaatgtttgaatgcataccggtggaggagggttgaatgcattgaatggcacaatgggcagcagatgtgaatagctgacaacaatagcgtttgagaagatcttgtacattctttctttcatgaccttaaagtcaagagaatctggatcttcctgatttggatcatgcttgccgtcaaactcaaaagccgtgcgggatctctctttgattggagctaatcgacttttgatgaagtgtcgagtgatctgttctccctgcaaaccttgttccttcagttttagcatgcgttccatcaattccactgcctgagcagcttcatctcccataggcaatgagttccatgtgtcctggtaaaccggaggaagacaggaatactcgggaagtgcgggttcaggattttggacgtaaaaccagtttgcgtgccagcctttgtgtgaggtcttgaagggcatagagaaatacttttggctcagtgttcctctgagttggaaaccagcgcccccaaccacacatggtttgctcttattcggttggggcttgaggaagaagattcggcggaataaggcgaaatgaggcctaatgcccagaaaagcttcgcaggcatgaacaaaattggcgatatgcactatggagtttggattcagatgatgcaagctaatcccgtagaagttcagaatcccccggaagaatcttgaggttggaagagaaaatccgtcgtagaagaaatgagcaaataccacgatttcgtgcgtgtcgggggtcgggaatgcttcgccgaacgccggtcgccacccgatgatttccttcgccggaagaacgctgtgcgccaccatttccttcagattatcttctgttacatcggagggcgcccactgactctcgaagctttctctttcttccgccatgaatgtaaactggatggtttaatttggtccgagatatggctagagtggaatggggaattggagcggtggacgcggggagaaattttgtgaagtttttgagggaggattggagcagattgatgaaccctaacttcgtcggcgcggttctgtactgtagcatggagcggggaatggcgagagtctcggcggggaagacgaaatgacgtttggacttcggtgtttttagggtatcgggagtactaatgggcctgggcctgtacggtacttcagcccaattttgttttcagcgtggcccgttgtgatccctagggacttaagcgctttttgctttggcaatatgtgctcacaatgatgtgacccgatgctgttaaaatcttttttaacgcaattcaataattctttggaattattatgatgcacataaaaaggtacccgacagaaaggtgttatactatttttgtaagcttttttaggctacaaaagctgttgggttaatttgagatgactgatttattagtagtcattctcctagcatgttatatgcttattttgattatggtaagggttatagcctaggctattaaacttcctaattgccatgatctttatcatatttggtggatcattttacgagtttcttactcagattcctatcaaatatgcctatttttggacctttgagtgtttatcactcggcccttcttgtatttttgttcttggtatgttcaagttgagaagcagtcggctgggtatcttactaagtaccatgcgtgcttcgctatataaccactcggttcttgactatatgtttagttttttcaactaatcacatagtcaggggctacacctaattaggtgcatctactcgatgcaccatgttttatttttgcccttcgtagtctttgattttagcactcggcaagttgaattgaagcactcggattactgttttttgtttcgagaaggctattactgtcaactgcgaaggtttcgggggctactgtggagattatggataccccatatctacacgacagttataatttagtcggatatatggtaccaaatatagatagaatatctctatgagtactcgggttagattctaaacttgtatgtcaagaaaatacccgggatcctagtcggttacgattgtattttatctgtaatcccatattccgttaggatatggactgtattttgtaaagcggactccttcccctatataaggagggtccgtgtgcctcttagggcgcgattcttttttcccagtttatacaatcaataacatactcggcggaatcatccccggacaggaatagggtattacttcttgaataagaaggcctgaacctgtataaaattctttgtctccaaacccatccactttcctaacttgatagccacccccttttattattgccgaaatcttgtttcgacagtatcccaaggacaatctatatgaaacatctgaaatttatagataacacatgtgaattcagagcaagactttagtactggaagttgtcgaataatgtcaatttagagctaacacatgtcaatttaaagctaacatctgaaattgaaaaataatgtgcactgctggaagactaacgagtactgaaatggtgtgctacttaatagggtactgaaattgcaaaatatagtgcactgctggaagattaacaaatacaattaagcatggttgaaatagtaaataagaaaacaaaagctgctcaccacaataaaccggtcttctgaattaagtaaattgtattcctctcccactcagtacgtttgataagctttgagtcggtcaaattcagtcactcaattttcgtaaattaagttaagtggtctatctggatgaagcaaactggaattcatgcaactttggaatgtagccacattttctaaatagaagcctactgattttgacatcaccatttcaccagatcatttttcggtgacgcctacttatttgatctttatataatttttaggttagtactataataagactgccatgttgcagcttccaggtagacattatttcttgccatgatgtgcatgatgcaattgagataaataaatcatgggcaattttttctcctatataaagacaaagatgaaaatatccccttcatatcacgaaaactgaaccctgattaatgattagttttcccgttgcaatgcacgggcacactattaaacacatacaaccacagaattggtgtccaaaaccagctatatgacacaggtatttttgccaaaaaaaaaaaacacctatgcctcaacctgtaaaatgaagtactacatgtcatcgtcgtttgcactaaccttaatcactgtcccattttatttgccaacataaaaccagctaagcttgagtgaacgtatccgccggtaggagtcagggactgtacacagtggcacgaatcctatgtacaataaaagctagccattttaccgcaagaaatatgccaagatgacatgttgttcataatagttagcaaacacacaagggaaacaggggaaaaaaagagtagaacctacaagtgaggaggaaccgtcgtcggcggtaaacagcaaggggtcccaagaagcaggtagttggctaacgacgatttttgattgggtagcttatgctcctgccagatgacgaagttagtgtgcaaaccaatcatgattaaaataaaaatgagtatattcaaaattcactcagaacaacccagaaatgatatcgccaaattcagaaatattcagagaggaaagccaaattcataaatattcagacgaacatttatatatgttggcgcgatgtccttcgttggtcaaatgtatgccgaagcaatgtggggcatcggcggcgtctggcgttgccggattgagaggcaccggcggcgtttggcgaagcggtcggattgagacgcgtcggtggcattgatctggaggacgttggggagggccgaggaggaagttgacggagcagcttccgtcgaagtaggggatggcgccgttgttggtggaagggctcgccgtcgatctcgagttggctggcaaggtaggtacgaagccacgcggcgtcggggttcggaggcggcggcgtagtgggggatcggtcaccgcgacaaggaactgcgctccgggcgagagggattgcgcatgaggggatgggtggggggtcaccggcgatgatcaatcagcggcggcggcggctgctgcgctcgggacagagggagcgatgggagagagggagcggagattgcccggcggctgtgctcgggagagagggagcgcaaattgtgtttgcacgtgaggaaacggggatgggaattgggaagcagagagaggggcaatccgggaggggcggggtttgcagggagagagtatgggggaggtgggagtaacgtggagcgttggatttgattggggcgatcctgaccgatcgatgaggaatgaggatgtaacacactgttggtgaattatagggtagattactgtagaacggaaagagtaaagggcactaggcacgcgtcgtggtgcttgggcgattgtcccgtgagagtgtgagacggtgagagctaatgaggagcacggccaaccatgccccgccacaacgcaccaaacgcagcctggtgcgccgcacaccgaaacgacctaactaaactaggcgcggcacgcaaagctgccggacgcaagtgctcgcagaaaattgctgcgaaaaaattgccgtactaaataaaaacaactcaattcatcgtcaacatgctccactgacacaggtatcccacgagcaaatttatcacgagcattgctttatcttttttaagtcaaactactagtttgagttttcgctccgaattaataatttggacaagaacacagtctctaaaaacaattttaatcatatttttcattataatataaaagtattggcatatatatatgattttattacattactttttaagcctaatcgatacatgtaatcatcatatctgatagacaaatattttaaaactgatttataatcaaaggttctaatgtttgacctcattcttatctaaaacgataaatattatcagcccgaaggagtaatcaagtttatagaaaaaattaatattttcaacacaaaataaaaatattattaaaatatatttaatattagatataatgaaattaatttggtatattagatattactagaacaaatgttcgttcgttgcaacgggtaaggctattttaatgttattattgttatacgttttagttaaggtaaaatctactgtgggaactcgtttggatatatatatttttaagaaaattatgagcggcaattaggagtacgatcgtcttaggttagcatgcaagttttttaaagagaattattatacaattacttctgtatttacgaaagcaaacgaactcaaaaaaccgactcaatacacatctatattttcaaaaacgaacaaactactcatactcgaatgacgtaccaaaataacatataaacatcttaataatttttataaagtagagattaattatttttataaacttaattaaatttagcaaaatttaattctaaaaaagtcatactcctgccatccccgtcggaactcggaaagcagccaccaacccgaggcgacgtaaaaatcaataaagaactccccgacaggtggaccccatccctcgctcggttagaccgtccacttccacactcaccagtcaccaccgcaccagatcggtgaggtgatgtgctaccgcgcgccaccgcctctccactctaccacaccgacacg

SEQ ID NO: 4995 - DNA, 41904 bp, Oryza sativa
aaagacacgctcaccagccgcagcggcgcgcccctctctctctcctctccttttaactactactccccacgaggagcagccgcgaacaccacacaccacctcacgcagcagcagcggcagcaatggcgtccatcatcgtgctcgcctccgtcctcctcctcgacgtcatcgccttcggcctcgccgtcgccgccgagcagcgccgcagcaaggcaagccccccccccccctcccactcacccccttcctttctcctaccggcctctggaggagccgtctgctgacgtacgtacgggggttgctttttttgcaggcgacggtgacgcccgactcggagaagctgtacgactactgcgtctacgactccgacatcgccaccggctacggcgtcggcgcgctcctcctcctcgccgccgcgcaggccgtcgtcatgctcgccagcaagtgtttctgctgcggccgcggcctcaagcccggcggatcccgcgcctgcgccctcatcctcttcctcttcgcatggtaaatcaccatcactccgcttgctactactcgatcgaatgcttcaccacattaaccaaacaacattacgaatgctttgcctcttttttctttctactcatattttgggatctcgcgcctcttcgttgcttgcttctggatctgggttgctggtagtttaatctccgcggtaatttttagctagatctaccacttgtggtttgagcacagaacgcgcagcttcagttcagatccggttgttggtgggcaattaatggaggatgggatctagtggtttgagcagatctactgcaacaaatgcttgcacataagcatttagtgaggggaggatctagaggacaattattggatggtttatttatgctggattggctattaatttagagctcataaccattttgcttcagtggaccgggcctattgagctgttctgctcattcactacctaatcagttagtataattttagtctgaaaaaactgagcatcagttcgggcagctgttattcagaagcaaagaggttcttccttcagatctattaggtttactatctctttcatgctaaccaaaaatatattttaagcacatgactgctgcctcattccgctgattgttggtgaagggtcaaattgaattgtggcacactcaaagtggtgatttgttgtccacttataaggaaattagtactactatttttttcagctcgcacaagaggcagctttcactttatgggggcttttaactatttgccacttttagatttggcaaataactactccctccatactcataaaggaagtcgtttaggacaatgtttaagtcaaaccttgggaatataaatcatgaataactctcaagttgttgagtttgaaaatataaaaattatatgaatagatttgtcttgaaaaatactttcataaaagtatacatatatcacttttcaataaatatttttatagaaaaaagaagtcaaagttgtgttttggagaccgtgtcgctgtcctaaacaacttcttttacgagtacagagggagtatttgccacccctatctcaatgacatgtgggtccacatgtgtctatgacatgtgggtccagtggcaaaaagttaattgccacatctaaatgtggcaaatggttaaatattcctcactttatggcagctcctctgtcacaaaagctaaacagttaaaactccaagagtgggggagacttgttcacttttcttaggcttgttttagttcccaactttttcttcaaacttctaactattccatcacatcaaaactttcctacacacacaaacttccaatttttccttcacatctttccaatttcaatcaaacttccaattttgacgtgaactaaagctgtgcttttgcatttcattagtctcacggaagctctatatacaattgaacaattcttttctgggattttaaggtagtacctcccattcaagaatttatcctttcaaagttgcaatagtttacttgaataagtggtagatctactggacttctacatgagtggcctgcatatgtttaattgctactcctacattagtggctgcatatgtccaactgctacatgagtcactgcatatgtccaactgcctcaaatttacttgccccacaaagcgcaaagtgcttgtcactggttgctttgtactactactaggtacttcctccgtttcacaatgtaagactttctagcattgctcacattcatatagatgttaatgaatctaaacactatatatgtctagattcattaatatctatatgaatctaggtaatgctagaaagtcttacattatgaaatgggggagtaggatttaacagttgaactagtgttcctacagtaggtgcacacttgaactaaatattttttattttttaatttaacattacgcagacgttgataacaactattttgggtgtgttcggaatccccctttcccaactcacccctctctttttccgcacgcacgcttttcaaactgctaaacggtgtgtttttttttaaaaaaaaagtttctatacgaaagttgcttaaaaaaatcatattgatccatttttgaaaaaaaaagctaatagttaattaatcacgtgctaatggactgctgcgttttccgtgcggagagtttagttccaaactcccccctccagcgaacacagcctgtcttgttccgtgggtggtacctgtgttattaattagctcattgactttaaataaagtaatgagaccatgttacctggcctgacacagctcactatactagttttgtgggatcatagggagtagtatttaatagtagccatgcacttgtgattatctttttacaaattataattgatttgtgttgtttctttaatgaattgttaaattaattaacttggttatatggtcttccttgaaatcaacaattgggatatcccaaaaaagttctgaagtcaacatcaattgaaagcttgctttcttggtgtccttggctagccaaaccttcatgtagtgtacacctgtcatagtctacagccaaatgtcatcaaatctaattcccttcatcttcctgctctgacgatgcttgttgtgtccatcactacatatacttaatccagaactgcatatccatcatattctaggtgttccaatatgaacagatgtttcaacacctatggtttaaagatatactgatatgcaactgtgcatccgttcaacagtttttgttatgttcccttttcccggtgcttcttcatgttctaatctattggtttttgattgaccaaagtacatagggtaaatggtttagctttgtttctcatttctgcatttatttgaatttaactactactgcctgaatctgtaatatggaaaaattagggtatacgccaattaataagtcaaatcaaatgtacttgccataaaatgattactcaataagatgttttctgatcgttggcaggttgaccttcctcattgctgaggcatgcttgatggccggatccatccggaatgcgtaccacacccggtacagggggatgttcgttggcgagtccgtctcctgcgagactgtgcgcaaaggtgtctttgctgctggtgcggccttcaccttcttcacagccatcctcagcgaattctactacgttagctactccaagtcccgcgatgctgctgggggtgccccgtacggtggctccaacattggcatgggcacttacagctaaaaggagcttgctgaacaggatgatccggtccttgagcttgttggattcaaggtggagcatgtgatcgtggagtgcattgttcttgttaacacattaccttagttacggtgtaattggttggggtttactatcccgttaggttgtatgagattacttggttgggttgtacactattcggattattggattggattctgaacatggaatacacgtatcctagtatgatgatgcgctattgcctgctgacatggtcatctctcttgcttgatgtaatctgtcaccagatcttcactaatacgagatgctggtaaaatggaggtagcatggtagtcatgtgtgttattagttgacttaacgcacacattgagttatatgactatgtatcacagtttctggtcaaagtaaagcttcacaaattctgttttatttctggctaaacgaaagggcgttctttaaaaattcgtatcaaataatttactcatgctggatgcgacatttattcatctttagaaccataagagcaagtgctatggttgatgtgactaccatctctaaatttatttatatcattcactgataaattaagagacaactcatacaatatgttaactctagtacacaaataccaatatatctaatactctcacgttttattcttgaaatttatgtggaggttatcacttgatttaggggtggctcattatctctcttctcacttctcttatctacctcatcactcaatccgatgtgacattctttgggacagtatatgtagcattatagtacttgccctgagggaactagaaccacctttcccactaaggctctgtttgtttcaacttaagattattgtaatctagattattgaaccagattattataagctggattataataaaccgacataaaataagctgttagttgtttgtttggattattagatgcttgttagctgttagccactcaataatctaaaataaactcctttaaagcggattactagattatagtaatctggctttatagattgtaataatatatcataataagctatctatttgtttcagcttgcttataataatccagattataaccatcctaagttgaaacaaacaggcactaaattgtactccttcattcgtactttttagccatttcaatttaggttaaaataaattttttcgcctctttcgtttatcttaaaataaatttaagagctaagtttcttatttgataggctaagtttctaatataaaatggctaccatgttaattcaagaaaattttggctgaattggtttgtaatgatcgtagatatgaagctgtgttcatcttatgctctcaatttagtatcttgttaatttaattttcagttttaatgtaactaatcaatgagttgtaattgatttgaactttttctaaatttagtttaaagcattatagttaaaaggtaaccaatgtatttaatatatgattaaaattttgatatttataatatactagctaagcaataacctattaggtaacgaggccatacatgcattttttttaaaaaaaaggaacttactatcaaacacaattttacatagaaaatgatataggacgaaattcatatgtgtatatttatctaaataaaaaaatactttagtcagtttatcgtatcttatactccctccatttctttacaagtcaaacttactttttatgtttgactaaggtttataaaaaaataataatattaaattagtttcattaaaattaatattgaatatattttgatagtatgtttgttatgtgttaaaaatgtttctatattttttataaacttgattaaacttaaaaatgtttaacttagaaaaaagtcaaaacaagatataaaaaggtccgttggccacggcactttgccgcctcccgtacgcattgcaattgtgcccccaacgcattgactagagaagatgcttcgatgtagatggtgacctgcgttcacctatagatcgacctcgatatccagacatcgtgataggaacggtagaatagtcaggacgccatatagtatagaccatattatctacgtcgtattggagtaaaatgtttttagataaattatagttcgagaaccacactatatatgtagttatttgtccacaagctgacaaaaaaaatactatcaccgatacattttctattttataattttacatatgtacccatggtttagacaaaagcttttaaaaccactgaatttttgaaaaaaaaacatattcaagtacacatgcctttcccttttataaaaaaagtagaaatgtcttttttttaacaaaaataccatcatcaccgtattattattaggcaaaatttgctacaggacactcaaaaatcatgtaattagctgagagacaccgcaaaaacgtgacactgctcatagacactatcaaagttgtgcaattggccgtaggacaccggacgtattattttattatttccagactgaaagtggtgagtttttttttcaaaataaccggagtgcccctgcgcctcaccatctatcctagacttgggtccccggtcgaaccaaacccggtcggattcgtcacctggtgttggcgggcggatgagcaccctgggcacaacaccggcaaggcgagcggagctccacatgtaagcccctctctccctctttgtttctagatggggcagcggagcggtgactcgtcgtgccggccctggcccttgcacacgaccgtgcagcgtcgtccctgccgaggcatcgcaccagcccgtgcctcgccgtgccggcgccggcgctctcttcctcaggcttgcttgaagaaatagcagagagagagagaatgagggagagaaaataaaagaggagaaattccctttccacaatcatcaaagaaccgtgttgaatcaaacactacaatagtgcaattccttcaaatccaccacaaattcagagaggaattaaatcacaaactcaaccagaggaacaaacaaatcaatcgtgtaatcactagcaaagctaggcacagccatggggatgcccacgacaaggttagcactagtagttcttgtcggcagtggcaagcttgcacttgaccttccggaacaccaccgccggcggcgcaagctgcagcttgagcgggcacgtcgcgggagtttgcacttggtgtagtgcgcctggtacctgacctcgccggagactgtcacctccaccttggattttgccttttcaaaatccagtatcctgtgtcccctagccaagataggttgtaagtatactgtatttgtttttgattttttttctagtaatcatgtgatacttgacataaatcagatgcaattaccatttttttcacactgtttttttctattctgttccaatgtagtcatgactgaggtttctgccttttgaggatgcttgagtgtcacaacggcaggactcttgttggatacaacacggtattttattcctttgtttgacattttttaatttttttcaccctatacatacattttttctgcttctaaaagctgactgtttgtatgtttctctttctcagaaggacaagcgacaataccgtgcgatgatttgccacaggctgttgtaccaccgcttcaatgatctacaccctcatcgcgtcatttgaagaactgttttttttttatcctttgttgtttgggggcaaaagtgccaagatgtaatgccaggtcgtagactcttttgtataggttccctcactgatcttgatacagtttgcactaaaactaaagcagtgtgttttgtagactgacactccctagccaaatagtatcattttgtagtttgcactaatacatgtgattttcaacttactaactcatatattgcttcgaaaaggtatctttttcatccaacttgatgttctagatcagcaacccttcttttaaaaaaaaattcaactatgatgcctatgatgtttttgccaataagtcaccatgctgtgccatttaccaggtacttaccacactggtatcagcatggtattcttttttagctaatcatttagcatgctaccatactggtaccaggtatcagcctggtaccatactagtattaggtaacaggtaccatactattaccagggtaacaccctggtatcaggtccatactggtgtaccctggtatcaggtaccaggtactaggtatcagcctggtaccatactactagtaccaggtaccaggtaccatactggtaccagggtatcaccctggtatcaggtaccaggtaccatactggtaccagggtatcaccttggtacctttttttacaccaggcacctgcatggtaccatattggtatcaggtaccaggtaccatactggtaccagggtatcccattttgtaccaggaaccagcatgcctttttttatcaggcagagcatattgctggtacctggtactagctagatgaaaccagggtgtaccaggtatcctttttagttagaaaaatatttttttggctcatagcacaaattcatatgcataactgcaacatgtcataacacaatgtacttatgttatagcacaaatattcataaacgcaacatatcagaacacaagtacacttttgtgcccacattcatcacagtgataacataattttcttagccacaccacaacaaagtatatcaaatattacaataccattgtttttttaaaagtagaagcataggaatgtttcattttttttgaagaatcacatgaactgtggggttttaccacctggtgggatcatcacaatcctgcatataaaaagaggacagtaccaaaatcatcaatcttcttctctttttttttggcgatgcaaacatgaataaaaattgactattttttgttacctcatattagcacgcagagccttgattgctagatgatatcttttcatggctcaccaaacagctggtatcatcaagttttttcttcttagaacttgctgctatcacttggctttttctttttacggcctgtcgaactgctatcttatccctttgaaattttttgcaggcacaactgtaggtttcattgtttatgtcataatgaaccaagaatttcttgttgtcatcatccaaaattagctgcacaaaatatgatccaggttccggcccatttattgttttgtatttggtagctctgtatagcatttcttgaaactcctcaaacattgcacgtgtatagaactttgagtcttgttcttccattggatagccagaccacatttttgggtctgtttggactgttataaaccgctgattgtcattcctgtcaagacaagattgggcaagtttctcatattggaagatgaaattcctgattgaatcagctgggtggacaaaatctttgaataatttgttcatgctctcactcctttgggaggtgctcatgaatgggaagaagtaatccatgaaaaaacaggggacccactttttcctgttatcatagaggtgttgcatatacttgttcccacacaactcatgtctatcaatcattgcatcccaacttgcatcaaattcttcttcgttcaaagaattatcaatgcatgacttcaagtctgtttcaaacccttccttgccgtttaacagcacaccaaggttagtactagcattcctatgcacatgccacatacagcgcctatgaatagttcttggcagcacttttgcaattgcaatctccattgttttgtcctgatcagtcatgatgcattgtggctcttttccatccattgctttcaagaatgtttcaaacacccattcaaaagtttcaaccttttcatttttcaggaatacacacccaaataggacagtctggccatggttgcttaccccgattatcggagcaaatgggaggttatacttatttgtgcagtatgttgtgtcgaagacgatacaatcaccaaatttcttgtatgcttcttttgaggcaccatccacccaaaataagctaccaaccgtattatccgagtccagttccatgctatagaaaaacgatggatcttctgcttgcaattcctggaagtacttgatggtttcagccatgtctccgtttgcagtagtccgttttctcatcgatgtcctcagattgctaacatctttctttgtgaatggtatgttacgcatggtaccatacaaatcagacaggacagacatgattcttctagtggggatgttgttgttgtgcagtaattctattagctcatagtcttcatccgacacgttacggtgtgattctaggaaccttagagaattggggctcaaaggaggatgattgtgatctaagtctactattgtcaccacccacttttcagcccttttaacgaccaccattctcgccttacaatcagttttccgtatgctgttgcacttcctggatctgcttccaatacttgattttgcattctgctccttacttgtgcgttcagaatagcaagcgaactcatatctgttgtaatctttggtgacattgcttcttttgcaactcgaaacctttctaccgaaacctcaattttttgcatacctattgtagtacacgcgtgcctctttgtctgaaaagaactccataccaacaaatggtaccacaggttgtgattggacaccctccatttcagatccttcagttgtagttgctggttctatttcaagtccatccccagcatcaacttgcaaaatactcgtgggtcctgccactattccagctttaagcagtgctgccctcagaacttcagcatctatatccttctcacccacacttgtagcctgctcattcacacttgtttcagcctccatttcagatcctccagttcaatttactggttctatttcaaatccatccccagcatcaacttgcaaaatacttgtgggtcctgtgactattccagcttcaagcagtgctgccctcagaacttcagcatctctcacccacacttgtagcctgctcattcacacttgtttcagcagaaacacaagccccagcacccatgttttgaagatcttccattcttctttcaatagaactaactgacgaactcatacttttttccactcccccttcacattttgatagtgcaaaacaaaaaaaaaacattaaattctatacggctcaaattagacaaacataccattatcaggttagtaccaattttcatcaaacttttttcagttctacaatcagaagtaccagattactaaaaaataattatcagcctttttgcaagagcacaaacattgataaatgagcacaaaacataagtgtaagattaccatggacaatattaccagttttcttttttcaccagttttgatacaaatttagcatttctacttacagaagtatcaggtatcaagttttaaaacatctatctagtataaggtatccagttttaaaacatctagtatcaagtatcaagtttcaaaacatctagtactaggtatcaagtttcaaaacatctagtattaggtatcaagtttagatgaaaatacctatcaacgccgaggagtgttctggttgtggtcagcgccgatgaggtattgcccgtgcaagccgaggatgtagttggcgtcgctgacgaggtatcgcgcgtggtagcgcgcgatgccgaggatgtttttggtgtcgtcgacgaggttgccggccgtcgccgacgaggtggcgcgcgataccgaggaggatcttggtgtcgccgacgaggtatcgtgcgcgcgatgccgaggaagatctgggtgtcgccgacgatgttgcgggccgtggccgacgaagatctgggtgtcaccgacgaggtagcgcgcgatactgaggaggatctgggtgtcaccgatgccgacgaggtatcacgcgctccgcgcgcgatgccgacgaggatctgggtgtcgccgacgaggttgccggccgtcgctgacaaggatttgggtgtcgccgatgccgacgaggtatcgcgcgcgatgccgaggaggaacctggttttgcgccttgatttttggatctgggatatttaggacatatcaccgtaaatcgcggggaccgaatcgtaactaccatattaatgttgtctccttcgaacagcattccgttttgtagcgtctctcttttgatattgaagttgaaggtaagtctataaccgtttgttacccgaattggggcgcaaaaccgctccacataaaaggctccctcctaatagatgaagaataaatatggtagagaaaagagatgatgtatttattaatggcccactttaagaaaccatgggttgtaaaatatagtttttattgtgatgtcttattgacatggcatcatagacattacttatgaacactatgaattaagactgccctcatgcatcatcaacagcagcagcaaaaacagcgcgattttgctatatctcactcgaaagattttttcttatctctcactcgattttctcactcaaatttacagtgcattttcttataaattacagtgtaatttatgaaacttacactgtaacttttgtaagttacactgtaatttttgaatcttcgcatgtaaattttaaattttgtattggatttggtctttttcttgaggatatggtaatttagtgtccattatggtgtttcttaattgctttttgctttttattatatctatcggattttaattcaaagattaaaaatatgtgtgatacaatcataaaaatctttcgaaagatgtataggtactcccaaacagcgcgcacttcaagggggagagcccagctgacgtggcgtcacccagccactgacgtgtgggcccccaccccaccgcttttataacctcgccgcctcgcctcctcctctctatcttctcgctcgcctctccctctcgctgtctctcactcgcactcgcctcgctgccgccgccgccgctgcggcgcctctctcgccggcggggaggggaggtgaggtgagtgagcccgattccgcggcctcgtgagccgagcccacgtattgtcgcgtcaattttcggctgattttttccctttttttttgttgtgattctcaaggtttttcttaggtgtacggatttgatggcggtggcgtcgcggctcgcggtggcgcgggtggcgccggacgggggagcggcggggaggaggaggaggaggagggggcggccggtggtcgcggtcccgacggcggcggggagggggagggggcgaggcggggccgtggcagcgagcccaccgacggaggaggcggtgcagatgacggagccgctcaccaaggaggacctcatggcctacctcgtctccgggtgcaagcccaaggagaactggaggtgaggagaggagattcccttgtgtttgttttttttttctttttgcgaaattggatagcttgtcactgcttcactagtggtagtggtaggtagttttttcctctacaaaaactaggggttggtagaatggttcgcatggagacatcattatcgtatcgggttcgatggaaatgtggaattggagaatttcctattggcatagcctaactcgctgctttagctacgcaattgcagttttagttataaatcgattgatttcgggctttctattgatgactgatgaactggtttatatggctctagtactctaatgttgtgcagacaaactgtttagtcttatgcgttgttaatgcaactgtttgatcatttttttattggtaattttagctgtgattgttatttctacctgatctgctagcaccattcgttgggcatgaaagttctgctggtgcctgcattcagtttttgtggcattggcaatgtcatcttgtttgttcaatttactcccgctttgtttgatatggagtattccagttagttattttggttatgccataaataaatttctgatttcacagaattggcacagaacatgagaagttcggttttgaagttgatacattgcgtcctataaagtacgatcagatccgtgacatcctgaatggacttgctgagagatttgattgggacaagatagttgaagaaaataatgttatcggtctcaagcaggtagtattctgctcttatttcccctataataccaccttacatgacttagaccaacaattaacgtggagaaaatttccatgtgcttcactggagtgccgtaattaactctaatggaaaaacaaacaaaaacattacagtttgttctgacaattttagtttgttccttaattcgaggtacttgtatatggttgcagggaaagcaaagcatttcactagaacctggtggtcagtttgaacttagtggtgctcctcttgaaacattacatcaaacttgtgctgaggtcaattcacatctttaccaggtaatgcgcactgcatccctgtattaacttcttgctttatgtgattttcagttatgatttgtgcattgccatgccatatatatcttcagtccgaaagtttttttttttgccagcagttgatccaatccgaaacgtctattcttgtaggtcaaagcagttggagaggaaatggggattggatttctcggaattggttttcagccaaagtgggcactgagtgacataccaataatgcccaaggtagttttggccttagaccttgtaaagctttagtttttgtatgaattcagtgtcgcgtacatatttaacttaacttacaagaagggttcctataaattttaatgcttcagttttttttctttatagggaaggtacgaaattatgaggaattacatgcctaaagttggctctcttgggcttgatatgatgttccgaacatgcactgttcaggtgagtgtaattatatgttcatgtactaattttggaattccatcttaaagaaacttgaaaacttattgttacttctctaaacaactttacttacttgagtcatgaaggttaatcttgacttcagttcagagcaagatatgataaggaaattccgcactggtcttgcattacagcctgtgggtacttttgttatcttccctgatcatttactttgccctctctcacatgaacctggtttattcatttaatggattgttgccatttaacagattgcaacagcaatatttgctaattctcccttcaaagaaggaaaaccaaatgggtatcttagcttaagaaggtgattgctttattgcttttaaaagtacattgttttgttgtatgaagttgccaacatcattcatgatctgcagccatatttggactgatactgacaacaaccgctcagggatgcttccttttgtgttcgatgactcatttgggttagtatatataatttcataccattcgaccctcttcccccacccagaacactggcaatttgattgaagacctcattttggccaaagatattttacacatgaaatgaaggtttccatgttactgaaattctgattatagtttgtttctttgatgcaggtttgagcgatatgtggactatgcattagatgtcccgatgtattttgtctatcgaaataagaagtacattgactgtactggaatgtcatttcgggtctcttcctgtttgtgttaccttagtgcttgttctgttatatgcagtagagctttggctatagaatacagaacttggttattaactagactaacttgatttatatttgttttgcaggattttatggtaggaaaactcccacaagctcccggggagctgcctactttgaatgactgggagaaccatctaacaacgatatttcctgaggtttgcccttaaatttgtatagctgatcatcatggcatgttgacactgtaagcttaatgtaataactatttgttcttttgtatttggcttgcaggtcaggctgaagcgatatctagagatgagaggtgctgatggtggcccatggaggagattgtgtgctttgccagcattttgggttcgttagcttactcctttgcacttcttttgtatttctgtacactttgcagtgtggtcttggtgtcaagtagaagtaaacacaaagagtttggacatgggtactgtagtaatttatatcttccatgttctataggaagaattttgaaccagttttggaattggtacttgtatacaggttgggctgttgtatgatgaggaatcactgcaaagtatttcggacatgacctctgattggacaaatgaagaaagagaaatgctaaggcgaaaggtatcttgagttatttgtgctctctgtccctgccaagttatataatatactgttgatccataaataaacttttgttttgccttacaatcacaccagttttaacagaattatacaatcttttttgtcagaataatttgtaaattagcaaagtaacccaggttcggaagttacaacatgctactagagtcacctcggccttactgtatttaatttgattaggtacctgtaaccggtttgaagacacccttccgggatggatatgtaagagatctagctgaagaaattctgcagttgtccaaggttatttactttcttgaatgtacattcttttataacacggagtgcatgcagattatatctgcctgtctgtaatgctcctttttttgttattccagaatggattagaaagaagagggtacaaggaggttggtttcttaagagaggttgatgcagtgatcagttcaggtgaagatttcaacattccagcatctcttttcattgatgatgatataaacattttcatggttttgctgggctctagataataaaaatgaagagtttaactctgttttcagacaataattcgtagcctactttgttgcaggagtgaccccagctgagaggctgctcaatttgtacgagacgaagtggcaacgcagcgtcgatcctgtcttccaggagttgttatactgatgctgagaaacctcttacacagcaaaactggacagtctgtagatgtactccccccatacagaaaaaaaactcatgtccattctattccatgcctcggcagctaatgtccgccgtccgttttttcttgagcctgaagagggaaaaataaccgccgtgcagcaattcagcttcacggactcaattgtttctgcctcctggaacatttgagttcggaagcctttgtaggtgctgtctttgttggggccttttacaacttccgatttccctcgtcaacagggagatgggacaaaccactgtttgtaccagaccctcttttgttcctgatgatttttgtatgaaaaataagcccatctggtgcatgatggaaactatatatatatggttccagaaaatgttggaataagtatttgacaagcacgtggagttagttcatccagctaaaagaaatatcttgcagatgtaatggctggtgtatttggtggtctccatgaaagtgcctttttattcggtacttatatgacttgactggttgtttcctgctgccttccttttggacctttctatcaatctatatatgctatcctgataggtactcaccctgtcattttgttatatgacaagtaatcagatattactgcatggttttcctttgttttatctctcttagatcacatggctcttcttattattccctgtgcctatgcccatcttctatttatttttcatcaacaagctggtgaatgatgctgcataaacgaaatttcgtcgtcgtcgtctcaagaacatgatcaagtttgtgcattgttaatgtataagcaaaaaacaaacgtgtgcggcgtgcatgctctctgtccctagtcttctgaccaagcccgtcttcctgtcctgaaagcacgcacgccaccacccaccaccaaccaccaaccttggtttggaacatttcccttactcgcacctactccctctcacttacatgtgggacccataagcaagaggaacatatgtgttgtaaagaaacgggccaagatgtgcttaatcttatcatagtgttttactggaaataaatacgcttccaaaaaaataagtgcgtgtaaagaaagataccaatgctactagctagacattaaagacaaaaaggataatccccgcaaaaaaaaagacaaaaaggataatgaaaagcatataataatttctccatcgaaacatactatcagtagtgtctatatcatccacggcatcttaaaaactagagtgcacacggcaacactaactgctattcctttcgtcctaaaataaatataattttactaaaataaatgtaattttatattatttatgtccaacgtttgaccgtttgttttatttgaaatttttttatgattagtatttttattgttattagtagatgataaaacatgaaaaaaaatattttatgtgtcactattttttttatttttttataaacttttcaaataagacggacggtcaaatgttattattttgggatggaggtagtaactctcttatatcatgtcttatgtcttatctgtagcatccgagttaaatctttgcatatttcgcatgtattctcttcatattaactcaagtgatacatcaactatccgtggagaagatagggagggggtgagcaggggtctcgatcgcctcccctaagcccctaaaactacactacatttgttgtagtttttgtaagatttaaaaagataagtatcgtggatcctctccatcaaataaagtttgtgttttttgtttcgccactatcaacaatttatctacgtgacacaattagaagtgtaagtgacaaacccgcgaaactcacttatcgactaaaataaaccacgagtccgtttatcttgacctataaatagattcacggctgacccacttacacccttagacacaacagtaaagtcgttgaactctatcctagttgaagtcacatgataggcctatgatgccccatatttcagccttatccatatcatcaaaatcctacacatcaatctggtagaaagtattggttcctcgagaaaaagacaactgctcaaaaaaaatgatactgtcactgtttggtatttgataaattctgactataagttcttaatcttttattaataactcttgaaatgatataattatacaacattagacgtataaaagaaactcaaactaccgctatatatagagagatattcactctaatttaatactccctccatccatttcaggttataagacattttttacttttgtcaaagtcaaactatttcaagtttgactaagtttatagacaaatatagtaatatttataatattaagttactttcatcaaatcaataattgaatatattttcataataaatttatcttgagttgaaaatgttgctactttttttctataaacttggtcaaacttaaagcagtttgactttgaccaaagtcaaaacgtcttataacctggaacggagggagtattaaattttagccatcatatttattctcactaattaaaacgttgccagcaaaactatcagcttattgaaacaaaggacacagaaaagacgccgctgatgtggtgctggaaacgtgggtgcatgccaccaagatttaaaaactaaatttcacgaatattacatcatttttttcatctcttttaacatgtgttagaaaatacatttgtaagtatgtaagtttggtgttacacgtacagtggtggtataacaacgaaaaaaaaaacacctcttaacaccttttgtttgatccaaagcgtgataggcgatagccgcctccacacaaacaatcacgaggagcagagcaggcagccgattcgacacctaacccccaattccaatcccgtatttaatccctccaattcccaaatcatccaagcccgattccacccaaaccctcctctcatcgcccgccatgaaatcgctccaatcgttcctcgcacctcaacccgacggccaccgccgccgcccttgacggcatcggcatcggcggcgcgcgcctccgtccgtcgcgcgtcaccgcgtgcctcgccacgcccacgcccacgccgccgcccccgacctccgcgcccctcgcccccgccgcggccgcgcaccgcgagctgtccgccgcgagccgcgccgtggtggaggacgaggcgaggtacatcgtcgggacgtacaaccgctcccgcgtcgtcctcgtcgccggccgcggctgcaagctgtacgacgccgacgggcgcgagtacctcgacatggccgccggcatcgccgtcaacgcggtcggccacgccgaccccgactgggtcgccgccgtctccgcccaggccgccaccttcgtccacgccagcaacgtccagtacaccgtcccccaggccagtctcgaacgcgtcacgcccaccgctcaccacgtgttcgacgcattgcccaaccctctcgtcacgccaagctcaccgtgatcatttctttttccgcgtgcatgtggcgctcgccaagcgcctcgtggaggcctccttcgcggaccgcgtcttcttcgccaacaccggcacggaggccaacgaggccgccatcaagttcgccaggaagtaccagagggtggcgcgccccgacggggacgcgcccaccgagttcatgtcgttcaccaactgcttccatggcaggacaatggggtcgctcgcgctcaccagcaaggtgcagtaccgggagccgttcgcgccggtgatgcccggcgcgacgttcgccgagtacgggaacctagaggaggccaagaaggtgattcagtccggcaaaattgctgccgtgttcgtcgagcccatgcagggcgagggtgggatccatagtgccaccaaggagttcttgcaggggctgcgggatgcttgcgatgaggctggagctctcttggtttttgatgaggtatgaaacatatttcttctattactccttatgtttagtatgttgtgggttggtgttgattgagtaatcaatgctaatctcacaagttgaatccaaatatatataaaactattggtaaccactacacaatttgtattaaaacagagggaattgtacaaagtaaaagttgtttacatgcatttagtttagaccagagatcacactccataggaaccttcattttcatacttattcaaatcagtgcaaatgtccaaagctgccgatcatcaatgaacagttctgaaattctatgtctctgttgcattcagaaagggggcgctgatctaatctaacactcctgttacatggttactaaacacaggtgcaatgtggtctgggacgcactggttacctctgggcgtatgaagcctatggagtagtacctgacattatgaccttggcaaagccattggcgggtggtctccccatcggtgtagtcttggtcaccgagaaggttgcttcagcgataaactacggcgaccatggtaccacattcgggggaggccctcttgtttgccaggctgcattgaccacattggacaagatccagaaacctggcttcctagcagaggtggccaagaaaggagagaacttcaagcagcttctcagtaccaagctgagtggaaacgcccatgtgaaagagatccgggggatcggtctcatcgtcggcatcgagctcgatgttccagcgggtcctttggtcgatgcatgcttggaccgcggtgtcatagtgctgacagccgggaaaggcaatgttgtgaggcaatgttgctgattttttacagagtgaaatatatctcatcttcctgctttgctccttcatcattttgtgctggtacaagagtacttgtagcgtgttcggatcctcttagtgtccagcgatcacacatatatttttctggtccacatacacattcaattgtgtcatcacttttaaaacatgtccacacagtatcttatccctttgaaattttttgcaggcacaactgtaggtttcattgtttatgtcataatgaaccaagaatttcttgttgtcatcatccaaaattagctgcacaaaatatgatccaggttccggcccatttattgttttgtatttggtagctctgtatagcatttcttgaaactcctcaaacattgcacgtgtatagaactttgagtcttgttcttccattggatagccagaccacatttttgggtctgtttggactgttataaaccgctgattgtcatccctgtcaagacaagattgggcaagtttctcatattggaagatgaaattcctgattgaatcagctgggtggacaaaatctttgaataatttgttcatgctctcactcctttgggaggtgctcatgaatgggaagaagtaatccatgaaaaaacaggggacccactttttcctgttatcatagaggtgttgcatatacttgttcccacacaactcatgtctatcaatcattgcatcccaacttgcatcaaattcttcttcgttcaaagaattatcaatgcatgacttcaagtctgtttcaaacccttccttgccgtttaacagcacaccaaggttagtactagcattcctatgcacatgccacatacagcgcctatgaatagttcttggcagcacttttgcaattgcaatctccattgttttgtcctgatcagtcatgatgcattgtggctcttttccatccattgctttcaagaatgtttcaaacacccattcaaaagtttcaaccttttcatttttcaggaatacacacccaaataggacagtctggccatggttgcttaccccgattatcggagcaaatgggaggttatacttatttgtgcagtatgttgtgtcgaagacgatacaatcaccaaatttcttgtatgcttcttttgaggcaccatccacccaaaataagctaccaaccgtattatccgagtccagttccatgctatagaaaaacgatggatcttctgcttgcaattcctggaagtacttgatggtttcagccatgtctccgtttgcagtagtccgttttctcatcgatgtcctcagattgctaacatctttctttgtgaatggtatgttacgcatggtaccatacaaatcagacaggacagacatgattcttctagtggggatgttgttgttgtgccgtaattctattagctcatagtcttcatccgacacgttacggtgtgattctaggaaccttagagaattggggctcaaaggaggatgattgtgatctaagtctactattgtcaccacccacttttcagcccttttaacgaccaccattctcgccttacaatcagttttccgtatgctgttgcacttcctggatctgcttccaatacttgattttgcattctgctccttacttgtgcgttcagaatagcaagcgaactcatatctgttgtaatctttggtgacattgcttcttttgcaactcgaaacctttctaccgaaacctcaattttttgcatacctattgtagtacacgcgtgcctctttgtctgaaaagaactccataccaacaaatggtaccacaggttgtgattggacaccctccatttcagatccttcagttgtagttgctggttctatttcaagtccatccccagcatcaacttgcaaaatactcgtgggtcctgccactattccagctttaagcagtgctgccctcagaacttcagcatctatatccttctcacccacacttgtagcctgctcattcacacttgtttcagcctccatttcagatcctccagttcgatttactggttctatttcaaatccatccccagcatcaacttgcaaaatacttgtgggtcctgtgactattccagcttcaagcagtgctgtcctcagaacttcagcatctctcacccacacttgtagcctgctcattcacacttgtttcagcagaaacacaagccccagcacccatgttttgaagatcttccattcttctttcaatagaactaactgacgaactcatacttttttccactcccccttcacattttgatagtgcaaaacaaaaaaaaacattaaattctgtacggctcaaattagacaaacataccattatcaggttagtaccaattttcatcaaacttttttcagttctacaatcagaagtaccagattactaaaaaataattatcagcctttttgcaagagcacaaacattgataaatgagcacaaaacataagtgtaagattaccatggacaatattaccagttttcttttttcaccaattttgatacaaatttagcatttctacttacagaagtatcaggtatcaagttttaaaacatctatctagtataaggtatccagttttaaaacatctagtatcaagtatcaagtttcaaaacatctagtactaggtatcaagtttcaaaacatctagtattaggtatcaagtttagatgaaaatacctatcaacgccgaggagtgttctggttgtggtcagcgccgatgaggtattgcccgtgcaagccgaggatatagttggcgtcgccgacgaggtatcgcgcgtggtagtgcgcgatgccgaggatgtttttggtgtcgtcgacgaggttgccggccgtcgccgacgaggtatcgcgtgcggtggcgcgcgataccgaggaggatctgggtgtcgccgacgaggtatcgtgcacgcgatgccgaggaagatctgggtgtcgccgacgatgttgcgggccgtggccgacgaagatctgggtgtcaccgacaccgacgaggtatcacgcgctccgcgcgcgatgccgacgaggatctgggtgtcgccaatgaggttgccagccgtcgccgacgaggatctggtgtcgccgacgccgacgaggtatcgcgcgcgatgccgaggaggaacctggttttgcaccttgatttttggatctgggatatttaggacatatcaccgtaaatcgcagggaccgaatcgtaactaccatattaatgttgtcccgttcgaacagcattccgttttgtagcgtctctcttttgatttttgatattgaagttgaaggtaagtctatgaccgtttgttacccggatcggggcgcaaaaccgctccacatagaaggctccctccttcctcctccctcctcgtgtggcgtcgcttcccctatccccgctctctactttatccagggcctttcccctgcttacctccaccccaccatcccccgccgccgccgccgccgccccagattcctctcgcggagacctcagcctcagccctcaggggcgcggccggtttagggtttccccccgccgcagaactgggtgccgaggctcccgcgccgccgccgctgccgccgccaccgacgacgagggaggaggagaggcttagccctctcccgcagcgaccgcgaggtacgtgtacgcgcgttccgcggcatctggtcctggcctcctagatccgatggatggaaggatgggtggggtgggtgggtgggtggtttgggacttgggagtagacgcgttagggatcgatgcggtcggtttgccctcggggggagcggtagggttctcgtccgttcctgttgcgttcgtgatggaacccttggagaatcgtgtagaggggggttggggggaggaatactccatgaatttggttataattcgataatggtagcagctaattgttgtggttccgtgtatttcttgaacaaacactaggcacggattgcggttcatattgactttatgttgctccggatttcgtagtgctggcacttttgggagagcacatttattgtggggattcacccttgctggccgctgttgtgtcaataggccctctcaacttaaggacaaagtttaaactttgatggccctagatttgttgacactttgattggctgcaacctatagtttgttttaacatggaagtgatatggaaagtaggagaactactgacaatgacatttggctgtgatgaatacttgagtcgcagatatatgagaagttatgaatttaaattaggcacacctgttagcaatgccagccaaatgacacgatggattgggttaaaacctttgggtatcttaactttgtaggaacagtttgttcagatactagcagcctgcagccatattagttatcttaaattttaaaatttgattttctttggtgtaaaatctggtcaatttttattagacagttattatactcatcacggggtcaatacacacaaacttatcttaacttttagcgttcgttggaattacatgactgctcatttggacagtcacaatcttatttatgaaataatttacattactgacaaatatccttcgtgattctatatattgatttggtatttttccttcaaagtggcacttttcttatgtaattgcattcttaaattttaattgtgatataaagtactatttatgcaaaatagaaaattgaaatgctaaaatggattatgaattgctacgactcgtgaatactaaacagtaagatgtaaaatttagttttcttttgatgctgtcatgtttatccaaaaaaggtgtttaaggtatatgagggaggaacaaggctgcagagggcttgcagtggttgcttaacttggggaacttgcgatcacctcagttaactctctgtgggtggccgggtgcctggaggccgtgtggtgtcacccagacaacattgcatgataatcgtcttccttgtaggatgtcttgttgcttgggtgtgtcaaacttgctgtaacaagctttgggtggtcgggaagctttttttttcttactttcttacatcatctttctgtctttaactggtatacctaggtccacagttaagttgactgaaaaatctatatatattttttcctgttaccaattgtctttgagctaccaaccaaaccaaattattgtacatttcaggtgcagcctgtttttcattgacatgggacatacattagtgtagaggcaatattagagtcatatattggtaaaaagatttacaacctccattttatgatcagatgacctgcagaatggcagcaggcaagcaaaagaaacgtataataaggtctactaactcagatcaaaacaggacatggaagaagtcaaaagttgagtcttctaattgccatataagtttgaagtctcaaattgctcttaaatgggatgactatcaaaagagagtggttccccaaaaggaacaagttgggattttgtggtcagacttggcaccattcatagattccagacagaagcatgattcagggctggctgatgttacatatattcctccagagacattttccttggagaacttgagaagtgtgctgtcctataaggtgtgattagtttatcctttgtatgtaagctttgttcttttgccatctatttttcacaatgcctgccttttcgtgctaaagctttaattgctttagaataatgatcttgatatcttgatgccccattacaggggtatactcttattacatattaatattgacaattgtgaattgattataggtttgggatacatgtctgacagaagctgacagaaagtttctcatacagtttcttccaactgagattgatgcagaagaaaatgttcatttattgcttaaaggccaaaattatcactttggaaatccttccctcagctggcaagttctctatgatgtgatttctgtgatcacttccatttgcacttctagacattttagctgcattttttattgcgttctagtacaattttagaaattgcctctgtaggggcctacttgtttcatcttcattctagtgtatgttcaaaaaatatcaataaggtttgaaacaggtggatatatgcttttcctcgtagaactcctttttgccttgcatagatgtggcgtgattctccatttgaatattttattttattttgtttggcatattctcatgggaacaagttaggtatgttttacatccatcatagaagtcatgcagtttgtcccttattcattttgtgtttttgttgaacatataattgtttgtcctgctaaagctggggcttgggatgtgttgctccagctcacatgccaactctctttctaagtgttacgtaaatgtgatcagctttctaaaatattctacctggtatttatgtacgccgaacaattactagctccaatatgaatatatgattaatagaataatgcataagctaacataatgtcaaaatgtacttttgcatatcaaacaaaacctttaaattggatttcaagagctaccaaattgagggactatgactcattctggaaggctcatactaacaccaaaagccactgataccccagaatgttccctttacactcatcatattttgtaggcaatacatgttgatccacaccattaaaagtgatatagtgggctagttgctgacattagagttcatttttatcctatttcatgcataattcctattaggcatgtggttgcacacattgtctgtcacgtacatgaattacaatcgatagaccgttcatgcatgtgaacaatcactattttcccatttgatactgtatcagcagtattcagttgttattttagagatattattgagttgttatctatttccttagttttagagataagcatcccgtgggtcaactcatctataaatggggctggcatctctttctgtcaaacaaagacgaataaacaagtccctaaacagagccctggtcttccccagttctattacagattaatctagaatccctgcctcacatcaccgtccattctagttgaagttgtcaccaagcgacctccctccagcagatgtttactaccatgattgtccaaggatcatgaagtcctgtttatgatgcaggtgctaacagtaattttattatagtaacaaatgtaatgttcaaaaaatattacacactactaggatatacactctggagcatgagagaatatcgcatcagctaaatacagtaatttataccatacaataatacaagatttggtaggaataaggaacaaaagcacctaaattttgatcatgtataaactgaaatagaacaaagaaaaatacgtataagacaaagtcctcaagcgctctgagaggagtgctgaaatgagaaaaggacacattaccattaaaaattagtgcaaatgtattatagaaataaagcaataccaaggaaatcaaaataacaagaatattctggattcactgttttcatgtcctacctatgaccaatcctaaagtctttcatggagcaccacttcagcggcacgacttgacttgctggcaacagaagacgcaaaggagtgcagtgaaggctgcaacagtgagttgtttgggagacctggcctatcaggccctattgagtgaaagggagatgagaggagagctccactgggtccattaggcacagcaagtaataacatcctagcagtagaagtaatcgatatatgtagtaacaccatgatagaatagtcaactcaatgactagtcaatactagtctcctattcggtagatggtatctcgactcggctttacgatttagcaacaatgtttggatctaataatcttgtcttacctcgatgttttattttgactatgaagcaaagatccaattttttggagttgatcttgcaaaactagatatgggccgggttgaaattcttcaaatcaattatgtgaaagaaagcaaccaaacaggagattaggagctgcatcagtgtacattttggaaaaatagggaacaaggcgttgtcaacttttcgtaacttgcggcagaagcggaatgagagcaattattggcttgcacgggcctctactagtctcctggctaccgatacataactaactcgtggtgcacatgtgggcttgggtccggggcccaggacagtcgccctgacagccctgctccaggacaacgcctgcctgtttgttcagttgttcacaaatgatattgcactgcacttcttttgtcttttaaaattgttcactagacttctatacttctcaatttctgcaagatgttgattgctgattgaattattattaaattacaggtcctcctctctttgctatggtgatactcacccagatgccttacttaataaggagaagcaaattagagctgacgagaaggcatatcgtgttaacctgaataactaccattccaagtataccaaaccatccaattctgttataaatgtaccattttggctatgatatttatgctaagataattgtgcagcatggttgagtccttgaagaaatggaagaagagatggctaagttctgatgatccagaaataatgttcaggttatgcttcttaaattttttgatcttctatattctgtatcttgataaattactgtttctcatttccttttaaattccacttgcaaaattatcatctattcatccttctgttcttcaaatcatacattatattgccgttggactatcctttttcacatttgagtggtgttccaagtaacacgatcaatgtgtagttctaacatttcagtgctttaaaattgccaagtgccttagttttctggctaatcatatcgacatattcaattactgccgttgttgtgcattaaaatagcttagttttctaattgtataaacagtcatcaatgtttcttttaccaattgacttttttaaggaaaaaaaagacataatctgattaaatatttaagtagagagatgctatctaatttcaacaaaggacttctgaattgctaaaacctctatccgttatgtgtgtgcagggataataaccttgctaaacacaagcaaggagatacgcgaccaaaagttaccagtagtgaaatgcccttgaaggttgcacagagtagtgatgtttcgaagtttatgtcatatattgaggtaagatgttatgtgagccataatgaagtatttttgttcagcattggctatttgagcatctctctctctctctctctctctctctctctctctctctctcgggagagtattggagcttcattaagaaagaacaatgagctcagtcttgtatttgtgcacctctgtaatagccaaatggaaatcatgcaattagtttcagtgcccatcttaaaataaaaaaggagacatttagctgccaaacttgtatatattgctgaaactaaccttctatttgtatatttgctttctttgctcccaaagttttatttccttttcttctagttttgaggattatattacaaagcaaaattaaatgcttaatgaatgatatcagctctataataaaaatcttaaattgcttaattaccattatctcacatatataacccctttctcttatttagttcctaaattattgttatcttctttcccaattcttttgaagaattaatagtcttgttttactgtgtaacattaaccgcagctagagctgtgtaaatttgattacaaatttggatagatggcaatctaactgccaaattgtttctttagcataaaaagccaataatatttaatatataatattttgcagcagagcttttagaaagtatatttgatgattctttccagttaacgcatgtagctaatctaaacaattatatagttctgaatgttgactaatatttacagaaaataacagatatctaattttgaccaatcatatgtaatatactttactatatggaatatataattcgatgttctgtgatattaatgcttgtttaactttttcagatcagcagaacacagcacaaccttgttaagagcatgaagcagtctggtgatggcattaaaaccaagcatcttactcgtgtaattggtaaccttgataaattccatgtaaaaccatatggaacattaatagatgatgaacagaggagactgcgtgaacattggttagtaacattttaattttaacatttttatcttgtttttgggttcaagattcttatggtaaattatttgcatataggttgaacatatcctgcaatgatatacctgctgctttcgaggtccttaagaacaatagggtgacaacagagaaactgagaaatttacttggtcttgagctaggcgaaaagaatgtatctatcatgagaaaggttcgctgtgactaatcctttcaattcttgtttgaaagtcttttgattttccagatcaaggtattttacttgaatgtatgaaaaatatagtggatgatatcactttgttcctactactatgtgtcttgtatttttcatgtatcatatcatacacagcagcaaagttactattcgacatgatgttcattctaaaactctgttaccatgtgtataaaatactgatttgtaatggatctactgtggaagatctaaaaaattgtcattactgaagggaaattgctgtgcagtgttttcttactgatatgttgtagtaccttgtcattttctagagaaagttaacacaataacactcgattagttgtaggggttctacttatttatacggacataatttcctttgaaaagaaataattatttgagtactcaatagatgattatggtttatttatttttgtttatgatgagaaggcagaccagttagcaggcataacaaaagagcttggtcaacatggtgcctgcgaaaatgacggcagcactgatttgcaggatgctctggtagaacagttgtctgaagatatgttgcaaggtggtaatgatcattgcccatctcgtcaagattgtgatgatgatgaaaccaagcatattgaaacatctgctgaccatcatgatagtcagggtagggagaactctgatttgcaagcccaagattacaagggcaccagctgtgcagatagaagcatttcattctgtgccagcaacgtagaggagcagaatgaagatttcgtgaatacaaaattcagtaatgatggtccagatgttcaagctgaagatttcaaagaaataagctatacagatacaactattattgatcatagcccagagagacggcagatcaagactacctgttatacaaccgctcccattgacactcgtgagagccaaaatacacaagctcaaagtcttgagggcattacttacacagggccatcaatgcatgctcatgagcaaaatcagggcctgaaaggcaccagatacaaaattatgatagacaaaggccatagtgcaaatgatatttctttagtaaacagttatccagagatgaatgatgtaactatggattcgaaagaggttgagaatactacagtgataccatcaaacagttccacattgctttccaacacctcagggggacaaattcctgtggaagaacatctaaatggtcaagcagcaaaaggtgttaaagatttatgggagttgcctgaacctgatgattcctattaccttccactggagaatagtagcgtgtataatggttcaggtggcttacagattgggcatagacatctccctgctggacaacagggttctgtagtttgcatggagaatggtattttaagtcagcagcagtcacaagtcaccattgcggctgccttcccaatggacaatccagcgtcatttatgcaaccttgttcaaaccggcaaagcaatggtcaggtccagacagtagcaaatgacattggaatgcttccttactcccttgaacatacagattgcattgggcagtcaactgatttgcattctttggacaacaaccgattctctcagcccactcactttcccagtcccttgcaggagcaacagttggttgatcagagcaacagtgtcctttatgatgaacttcacaagaatttgtattctgatgtgagttttcaaactaaaggaaacaattctatccttgaacagcattctttcgcttcttctggttctatggatcatagatataaccgcttccctcaggagcaccagccacatgataattggcctgcaatggagtcaaataactgcttgccccaggcctttccagttggaagcagcaacacagatggaagcctcttcagtgctttggcccagtacagactaccgtcatcgtcgctacacatgcaatctggtaggtccagccctagccagctccttgaaataaggaaccaagttcctatgtctggaagttttgttcctagaactcaaggcacaaatcttcaagctcctagtatatatggttacacccagaatctgcccagtagttcaagcagtcatgtagcatctgtaggttctctgaataacatgcagtggacaaacctgatacaacagaatcctggaatgcccaacttaacgaacaggcaatttcgaggtccctggaccagataaatcctgagactttagaaataggttgatttaggtacaatcgaggtgcacaatgagaagtctaggtagggctggaacagaatgattctgggcaccaactaacatagtgtggttttgagctgttctaacgttgtggcttcagaatatctgtacatacatttctgctatgcctgtatgtatatatctgggcgtgctgggagtctgaaaagagttggaaactaaggattcccattttttgcagttgatccgtttattttgcctcaataatttcagtcccagattccatttagaggctgtctcaataatttgtttcaggtcttggcctctcagcaaaataaggtttctcaggggaatgtagtagttttctttagttgtgaacttgtgcttgataggtatcttgttgattcctaagatgtaatgacatgaggattcgatttttattcactctatttgaaatgagttctctaacttagccatattttattttactttactggaatgtttaactgattttggtttgtgcactagacaaggctaaccaatatgatggttcatatctgtaaaaacgacgatgtctgcatttattttttcttgcatgcgctatcttctcaatcgtcataagaaattcaattcaaaggtattgaaacacgtggaaccattcgtttgcaggctgattcttggaagtcgtatgtcccagcctctgacttcatggttcgtgttgatgcttagcaagctcaagctgtccacggcgacggtggaatgtgctattctggaacgcggtgccggaaacaaaattttgttgaaattctgtcaaagttaatttatcagaactactagctgcatgtacaaatagggggcagatgcacaattgacaaacaaagtgtgaaatgtgtaatagcaagtaaaggtatggatgtattttcataaaaaatttaataccgtcaacatgtccatatccatcctccagtccaaagtgggagtaaaatttggcttcttaaaaaaaagaaataaaaaaacctaaaaaacagagataaaattaatgttggatattaaaataggggtaagaatgaaattgcctctttagaaaaccgtgttcagactagccagactagcaattgaaggaccagtatactgagagctcggccaattcatccattctagacttctcctactgtggccaattcggccaattcatccgtttggtagccaccattgctgttgtgggagagccggctaccacttgaggagagacatcagtgacacatgtgggcactatttatcctcctagagacgatgttgtgatgccccgtctctcttccatgtcttcggtagaccctacaagtaaaaaaaaaatgttctatatgttcggggatagcgattacgatattctagatgtctcgatctatttaaaggcgttgtactggaggttccctattagtatagtgctcttgtggtggtgtcctcatcagattgggttcgcttggacgaatcacttatttacggctcagttacctgtgttgtcttccacattgattagacgttagtcggcggtgaaacgagtgaactttgatcgacataatcatcagccgatgatttcgaagattctacttcatgggctgatgatttcgaagattctacttttctgatttacgaaaaagaaggaatatatatagctctagtaagctattgggagaaataacagttatgcatactcacgctaactgaaatattccctatatactcctgaaatattcctcaatcccttttatactgtggggttttgctcattacattgtctatcttcgaattttagttttgatctttattagagagaatccattatataccactaagtttgtcacggctctacgatttgccactgactttatcacattctataaaatgccaccgacttttacttaacttctactatttaccatcactgtccgattagcctcctagcactatataattttgtccaaatgaccaaaatacccctaggaaaaaaacttccataatttggacaaaaattcaaaatatcatattagaaatataagattgtaaaaatccaaaattttgccaaaaacttaatatctgatatttcagaatttttgtccaaattttgaaagtttttatcatatgggtattttggtcatttggacaaaattgtacagtactaacgaaggctaaccggacgacaatggtaaatcgtagaagttaagccaaagttgatgatatattatagaacgtgacaaagtcagtggtaaattatggacttgtgataaactcggtggcatataatagattctctctttctctcttactcctttttcatcagttgatcttaagctgaccattcatttctatcaaaaagtccattttacattttggtataaagaaacatataaatttatgtagtatattgttatagggtagaaatttgttatatgataatattataattactagcttagagccaatgtattgtaacagaaaacaaattgagtctctaccttattaaatcaattaataagcacttatttagttcaggcaatactataattttctttattgaacaagtaggtgattttgaaatttggagagagccaataatgaaacgggagatgactcattgtaatataatataatataatataatagtatagattatggagcccacatgtcagtggtagcctggtaaggatggtgtggaaatggatattaccacaactaacattttaaatagtatatatgagtttattatgcgatatattatttatttgtagaaatgactaaactagtattatttatttgttattaaaaattatttatgtatcgtataaatagatttcttttacagcaaatatgttgtattaattttcataaaaaattatggtcaactaacaaaagagtatggaagtgatccaaagtatgcaatggaaagagtaaaacttacggaaataaaaaggatgggcaaagtttatacaatacactgtaattagttttccttaagttataagatgtaattttgtaatcattattcatttataaaattatgtcgtagtttttttaagtaaaagccaaaaaaaaattattatgtaaaaaaaatgtcaaaacgagaaaataacggtcaaacttaaccgagcaatgtctctaagaaaataacggtacctccctcttcctctccaacactcttgtcggatccaaaaaaacctcccaaagatccgctaagccgctatcccatcctaccgcgcgcgtgcgccatcgccatgtcatccttcgactccgtcgcggccgtcgccggcgacggcgacgccgacgacgacgacgtgctccctcccgctcccttcgaccccgccgccgacggcgcccagggcggcctcggcgccctgcgccgtggccaccgcttcgccacgtcctactcgtccttcggcaccgccgcctccgaggacgacctggctggcgccggcgccgggaccgacggcggcgtcggcgccggcattcccctgggctcgagctcgaacggcggcgccgcgtatgggtacggcgggtcgggggacgtgatgaatggccacgtggaccagatcggcgacgtcatgggtggcggcgtggtggtcggcgacggcggtggcatcgacgacgacctcttcgccggcgccggagacggcgacgacgggcccgtcctgccgccgcccgaggccatgaaggaggagggcatcctccggcgtgagtggcgccggtgagtgtgctccactccgatcatcccataatctcccaaaaagcatcaattcgcgcgcatttcttgatctgatctgccgcctcccccaaagcttgatcgaaaaagaaatcaagaaatcgatgggtttaattctgcagccaaaacgcgctgatgctggaggagaaggagcggaaggagagggagcggcgcggcgagatcatcgcggaagccgacgagttcaagcgatccttcgccgagaagcgcaagctcaacggcgacaccaaccgggctcagaacagagaccgggagaaggttggtcggtcaccatcttcttctccgccattgatgagctgcacatcatacaactcgtgaactatcagactgacccgccatcatcgccatggatggtgcagctgttcttggcgaagcaggagaagttccacggggaggcggagaagcagtactggaaggcgatcgcggagatggtgccgcacgagatcccggggctggagaagcggggcaagaggagggagaagcagtcggcggaggccaacgccaaggcgaagcagcccggcgtggtggtcgtccagggcaccaagcccggcaagcccaccgacctctcccggatgcgccaggtcctcatgaagctcaagcagaccccgccgccgcacatggcgcctcctccgccgcagccagcgaaggacaccggcggcgacacggacgccaacaaggacggcgaggcagagaaggcagctggagagattgagaagaaggcggccggaggcgagaaggaggccgcggctggtccgccggtgaccgccgcggcggcggcggatgcgcaggcgaacaaggcggcagccgaggagacggccaagaagtgatcggacaaggctgcattgatcgacagccaaattgctacggaattcgtggactctgataaaattcagaaacagctagtatcatgcatggttctctctctcttctatgttcatgttagaataagagatttaggcgtaagctgttcctttctcttttgcatttttcacaattttgcatcatttatatattgagtcgtagttaggtgtgaattattttctccgttgtaacgcacgggcactcagctagtcactgtatatgtgtgcagcgaataactcggttggttgtcagattatgagctgataatcttcagtgccaaaagcgttcctttggattcgtaactttgaaatttgctttgctagttgcacgtagtatctgcacgttaattttcttctggattctgtatacttgcagcagctggctggaagatacgatctgaagcgaatcagcccgctagtatatgcagtgcaaactctgctcacacatactgttttctctgttcttcagttatttgtagatgttcgacagagttaagagttgttcagttttgcatccacacagcgtgagcatgagtgcgttttaccgacggttatgtttcttttggtggaacctatccatttaggtcgagtcttcgacccagcgcaagtacttcgatttatatggttatactttctccatttcatattataagattttctagcattgctgaatatggcaggggcgaagctacaaccattcatagggataagttgactcgaacgatgttttgcgaacctctcctacccctctttattttaccatctatgaccccagcaaagagaaaaactagaccctagtgatattactgattgttctgtcaaagcccaattagtgactaggaacgatactaacaaacaacaaataaaaaattagctagcacttatgatttatacatcagcccaatatacatataggattgagatttgggtccaaaaataactccacaaattctcttgttgcgccatcatattccttcgagcactttgtcccgcaccagcgctgcacatcttgacatcttatatcattttttttctagcagaacgaaaggcaagaatcagtggttttgataatctttggttcatttggtgtcttttacaaattaataatgtatggtttctaacaaatttgtagtcatttcattttatcataatgtattgtcattattttgtcttgtattttgtatagtcttagatcattaattacaaactagatgacatttccgagttagtgttggattccaatgtagcgatacgatatttttcaccaaattttaataagttttgatatagttttgtcgtgaattctaaaaaacattcaaaatttcactcaaaatatacttttcgtcccacgtcgaaacatcaaattacatgatttttggttggttttggtcaaaaacgtaaaccctggttaatactgaccccggtgaccatttatcctggcttcgcccctggaatatgggcaatgctagaaagtcttataatataaaacggaggaagtactacgtacctaattattttttcaatggtatgccaagtgtcccatggcagcaagatgactatacgtgtacttcatttgaaggatgagggcagctaccgtacgggattccgttgcaacgcagtagtcatgggataattaacaaaaccaccccgacagatttaataccagacttcgtcgtttttccgaccaaggtcaactctgctcgattccccatctagaacccggctgatacgcaactactcagagcaaccccaaccagaaagcagctgcgcgcgatacctcgccagtggcgcagagggccgccgcaactactctgagcggccccagccagaacccagctcagtatcgcgcgcctctgcgcgcgataccttgccggcgacgctccgcgacgccacaactactccgagcaggagtgcttcttcctccgccccgtatcgaggccccgaaccctcgatacctcgccggcaccgccagcaactactccaagtagggactcccccaagccagaaccccgctcggtatcacgcgcggaggtgtgcgatacctcaccggtgacgctccgcgacgccgcaactactccgagcggccccagccagaacccagcacgcctcactccgagcaggagtgctccttcgtcctcccagataggtatcatcttctctagtttttgggcatgagttttttttctctagtttaggtattagcttgtctctagtgtaggtaccagcatgtctctattttttttcaagctataatggtttgtgttctgcctgtgtggggccaaaaaaattactgaaaaaaatgtgtgaattattcatgcagttgcagtttcagttaaaaaatggactcctcggttggatccgctggaagaatgatagaaaagatagcaaatgaagggagtgatttccttggtgaaagaagtatcaaagaacaacagagtggcaaggaagatgtctctgttgaaagagcgatggaacaagtatcaagtcatgatgatgatgcctgatactgaattgaaagcttctgaacaattgtgatgtatggtcagagaatgtcaaattttgttgcacttgagacttgaattttatctgatacttgtactgtgaggtgatcttggtaccttgttgtgagatgtacggagctggtcatgactgatacatgtagtgagctggtcatgactgtgtggtaccagtcatgatacctatagtgaccatgtgctgtaaagtatcaggtctggtgcctgggttaagacctggtaccttggtttttttgtgaggtaccagacctgatacttgggttgtttctaggcaccagaccctggtacctgtattgtgtgaggctggtacccctatcctgtgaggaaccatgtctggttcctaggttaagacttggtacccgggtttttttgtgaggtaccaggtctggtaccttggttgtttctaggcaccagaccctggtacctgtattgtattgtgtgaggctggtacccctatcctgtgaggaaccatgtatggttcctaggtttagacctggtacctgggttttatgtgaggtactaggtctggtaccttggttattgctaggcaccagaccctggtacctatatttgtgaggctggtacccctatcctgtgaggtgtcatgtctggttcctaggtttatacctgatacctgggttttctttgaggtaccaggtctggtacctagtttagacaaggtggtggtagcaggtaccatatgttccacagtaaccctaggttcagatgtggtacttggtactaggtaccaaaccccattgtgtgaggtaccaaggtaccatgtcatgataccttcactgggaggtaccaatcaaagcctccgatgcttgtaggtaccaaccccattt

SEQ ID NO: 4996 - DNA, 44763 bp, Oryza sativa
acccgatagttggcctggttgttttttgttgggggggggggggggggggcgaggggcggaggtcagtacatggttcaaaagcactatggagttgcctttacattttaaaacaaacaccgtcactagctttagatgacgcgatgtggatgtaggtcgttgaagcgatggtaaatcaacctatggcataactgcttgcggtatttcatggtgtctctctggggaaaaaaatgaaacaatatgagaaccaatgagcatttctctagagatggaacaaacaaccgatttttggtagcaaaaaaaccagtaccgtcgtatatccaacaagactcctgccactgtgacactcgagcatcctcataacacagaacccgcagtcgtgtctacataaaaaatgaaagtgtgaagtaaaaaaaaaacatgtacagaaaaggatgtgactgtgagtgagataaatcaaaaaaaaattgttgatacttacaatgtatcttggtgaggcgattcaggatactcaactatgaagatgtcaccaaatccaaaagggctactgtttgttcgtgtgtcaagggcaacatggagattgctactctgaaaaacatatggaagaaagaatgaaaagaaaaagaatgatacctagtaaaaatacaatgaaaaagaggaatagtaaaaaaaaaaagcttaatcacaaagaagacaattgaaaaaaatatgatacctccgtttcagtttccatcttcttccttttgttgctgccacttatggcatttgatttatctggtaggaatttgttaacgaccaaatttggtagtgtcagcatcggagaagaaggttagatcgaagtggagtccaggacgaagatcgttgcggaaacagagaaagaatcggctgtatccaacggatacggtcaggatcgacagagtttgagtcggacggggttagccaatatagccgattccgataatacgacttggtgtgcgatatcgggttgagttaatgtgcttcatggtgattgccacgcaaggatagagtcctgagaaggcaattatatctattaattaggatattttatgtaatttccttagagatatgtttgggcaaaagtctgccgtaaagacttatggtattttagagtttgttagagataatagtcatgtccggtatggacacatcttagaattctcgggtataaatagaccccgagcctcatgtaaaaaaaaaacagacgttcaatacaatctcggcgcatcgccatcctttttgctttagttttattttgacaagttcttgctttcgggttgagctgcatcggtttcgatcttcaacaagaggtaaaacttgttatggcggtttgcattctcgggattggtgcttccatcttcatgacactctaatcttgtttatgtaattcgtcgagttatcatatatcttacataatttttagcaatatcgttatctaacctacaattggctaacatctgttggtagaggacagccgattaggttaaatatcgatgttgattcaaattatatcggatatccaccactctatgaaactttcagcggtttgattgtctagatattgttcttcttttcatacttaatgctgcatcagttgagtttgatctattaagtcgtgtttagaatatcaatctctagcctgccttctggttgcctattagggtagtatcggggtttcagccgatcttacctgatttaactacttttattccatatgcttgattgatatgttaaatgtgccctttatgttaagatcttgttgcatttaagtatattaggcttctgtttgatatatttttcttactttaatatattgatatagagtggtatcggagtattagccgatacacgctagatctatttgatcggctatgctataaacatatatatagtcccattattagtatatatttcgatataaatgatttatactgtctcggcatggcgtccgatctatctcaatcacttgatttaagtatatatcgatatagggaatatatatattgttaatatctacagccgatcgagtagatttagtttcttcttatttattcatgattgccgatcgatacatatatgacatcggctcaaagataaatgatatgtcatcggcacctagccgatcgactatcgtttataggattaattgtggtttctttgtctttatttcttgttgattgcaggatcaaatcaactggcacgctcacacgtccgaaggcgagttttggacctgcactaaagttaagcagatctcccaggcctcgtgttttctgtcaacacgcttttggcacgcccggtgagactgattagaagtcagaaaacaaccttcctcatggccgagaagctgccgctgtcgccatcctcggctagtccaggttctgttaaggagaaaatccagatgctgggcctcagatacatcaatgaagggaacgttgtgactgttgatccggaaaagttcacacctgatcaaaagaaggacttcgaagcaatgatgcaacaagcgcgggatcaattcttaaaatcattcacgcagactcgcaaaggaacattggttcagaagtataagataaaggtagttcctgatgagcctgagaccagtatttctaaggaatgagaagggaagagaggctcagaatcggctcaaccaagtgacaaaggtgctaccgacggctcggctcaagagaatcagggtgaaaactctcaaggggtacatggagttcaaggtgatggtgttcatgggccacaaggaggaaatcttaatcaagacggcgagacagtgcaggatttcttcaacaatttccaagatcgggttgattatgttgtgcacaatgctttgatcaatcagtctggggtattagtcaataccttgtcaaacatgatgaaatcaatagccgatggatcaataaccgagcatcaggctgcaggcccggtttatttgcaagggggtgtcttcccaaattatcggcctttgatcactggtgctcaactgtctgcccaaccagttcctcccattgcaccttcagctcagccgacggtaccgccgttgactcctttacctgctccagcagcattggcaccaggccagccgattaatcctcggctgttgatgagggagcagccatagcatagtgggcaggtgacaaatcggctgacacaagaccaggttgctgctatgtttttaccccctcaacctactgttgatccggtccagcaacagccgattcaacaaacgccgtctagacagcaaactatccagccgattcaccagcaaggcttgatgaatcaatcggccggacaattggctagacacgtcctgaatcaggttgttccagagggtttggttcaccatatgcagccagatcatacggtaatgccccagattgtacctgagcacttggtgcaaaatattcaaccgaattaccagaactaccaagggggcaatttgaattatcaatatcgacctccttccccgcaagcccaatatcagcaaggggggctaactcaacctcagttcactcctcagtgtaatcagttcgagccaatgcagcaacaatcgcaaggagcagctcagcaacgaccatgggccgatgtgattgctgacgtgatgagggaacagttcgggcttaaaccaaaagatactggaaacttatatcggcaaccttaccctgagtggtttgaaagagttcctcttcctatccgatttaaagttccagatttctccaagttttcgggacaagatggtgtatcaacttatgaacacattagctgatttctagctcaatgtggtgaagcatcggctgtagacgctctgagagttaggttgttccggttgtccttgtctggatcggcttttacttggttttcttctttgccgtatgggtcaatcaacagttgggtcgacttggagaaacaatttcacagctatttctacagcggagttcatgagatgaaattatccgatttgacagtgattaagcaaaggcataatgaacctgtgcatgagtatattcagagattcaaggagatgaggaataagtgcttcagcttaagtttgactgatgcccaattagccgatttagcctttcagggcatgattggtctgattagggagaaattctcatctgaagactttgatagcttgtcacatcttatacagaaggtaacattgcacgaacagaggtttgcggaagctaggaagagctctaagagggttaatcatgtgtgtccttacatgtatgggtcggatgacgatgatgatgactctgaaatagctgcagccgaatgggtaaggagtaaaaaggttataccgtgccaatgggtaaagaattctgggaaagaagagaggtatgattttgatattaccaaggctgacaaaatttttgatctgctgcttcgagaaaagcaaatccatcttcctcctggtcatacgattccatcggctgaggagttaggcaaaaagaggtattgcaaatggcataattctggatctcattctactaacgattgcaaagttttcagacagcagattcaggtggctattgagggaggcaagattaagtttgatgattccaagcggccgatgaaggttgatggccgaacagccgatgctagacgtacgagaggttttcagatgaattcggccaaggttataaataagtatcagaggaaatatgacaagcaacaagagagatgttataaagaggatgatggtagttttgatcctcattggggctgtgagttctttaggttctgctagaacgagggtatgaggttaccaactatcgaggattgtcctggatgcggtgatgttgcggaaagttcgagccgatcatacaatggaaacaatcggctgaagcaaacaagagtccctgttcatcaaagattgggcccagtaaaccaacatagttacttggaggatgatgaagataggaagactcagtggtgtccttctggtatttttacaaagaatcagaagagaagggttcaaaggttggggaatagggaacgctttcaggaggtcgagcaagaaattaatcatcggctgaggaaggcaaaaccgaagcaggagtggcatgttaagggtcaagctcctggggccaatgatgtcgcagccgatgatgcaaagaggttggcaaaagggaagagtgtggtaacagcgtcaattaacatggtttttaccttgccggccgaattttggatcgatcaagccgatgtcgacgaggtggaagaggaatcggctaagttggttctattgccagaacaggcagtctttgaaaagcctagggggacagagaatcgacaccttaaaccattatatataaatggctatgtcaatgggaagctgatgtctaagatgatggtcgatggtggggctgcggtaaatttgatgccttatactaccgttcaggaaattgggtagaaatgccgaggatctcatcaagacaaacatggtgctcaaagattttggtggcaatccattagaaacaaagggtgttctaaacatggaactgacagtcagcagtaaaacaattcctaccacattttttgtcatcgatgggaaatgttcttacagcttgttgcttggaagggattggattcatgccaattgttgcattccttcgaccatgcatccatgcttgattcaatggcaaggcgacaagattgagattgtgccagccgacaggtcagttaatgttgccagtgctgatttagctctttgggagatggatggccttgattgtttatctggaaaggtttgggatggagattttctaaaagtgtccgattctgatatacaaccaattaaagatggagaacccaacctattactttgagggcgtcgtggagggttcaaacgtctacaccaaggatacagtagatgatctcaatgacaagcaaggtcaaggtttcatgtcggctgatgatttagaagaaatagatataggtccgggtgatcgaccaaggtagacatttattagtaagaatttatcttcagaatttagaaccaagctgatagagtttttgaaagagtttaaagactgcttcgtttgggaatattatgagatgctaggactcagccgatcaatcgttgaacatcggctacctctcaaaccaggggttagaccgcactagcagcccctgagaagatgcaaagccgatatgcttgaacctgtcaaggctgaaatcaaacgtttgtatgatgctggttttattcgtccttgccgatatgctgagtgggtttctagtatagtttctgttatcaagaaaaatggtaaggtgagggtatgcattgattttagagatttgaataaagctaccccaaaggacgaatatccaatgctagtggccgatcagttggttgatgctgcttcaggacataagatattaagttttatggatggaaacgcggggtataatcagattttcatggctgaagaagatatccataagacagctttcaggtgtcctggtgcgatcggcttgtttgaatgggttgtaatgactttcggcttgaagagtgctggagctacgtaccaaagggccatgaattatatatatcatgatttgatcggctggttggttgaagtctacattgatgatgtggttgttaaatctaaagaaatagaggatcacatagccgatttgagaaaagttttcgagaggaccaggaaatacggcttgaagatgaatccgacaaagtgtgcttttggtgtatcggctggccagttcttgggatttcttgttcataagagggggattgagattgctcagaggagtattaatgctattcaaaagattcaacctccagaggacaagaagttacaggagttgatcggcaagataaatttcgtcaggaggtttatttctaatttatttggaagattagagccttttacaccattattaagattgaaggccaatcagcaatttacttggggggcagaacaacagaaagctttggataatatcaaggaatatcttagttccccaccagttttaattcctccacaaaaagggatacctttcaggttatacttatcggttggtgacaagtcaattggttcggtgttgattcaagagcttgaaggaaaagagagggcagtgttctatttaagttgtcggctcttggatgcagaaacaaggtattctcctgtggaaaaattgtgcttgtgtttgtatttcttttgcactaagttcaggcattacctattgtccaatgaatgcactgtggtatgtaaagccgatgtgatcaagtacatgctatcggctccgattttaaaagggagagttggtaagtggatattttccttaacggagtttgatcttcggtacgagtcaccaaaggcgattaagggataggctatagccgattttattgtggatcatcgtgatggttcaatcggcttggttgacattatgccttggacattattctttgatggatctatatgcactcatggttgtggtattggcttggttataatttcgccttggggggcaagttttgagtttgcctatactattaaacattatgtaactaatgatcaggctgagtatgaagcagttttaaaagggttacagttgctttaggaagttgaagccgatgctattgaaattatgggtgattcgttgttggtgatcagtcaattggcaggagagtatgaatgcaaggacgatcattgatgatttaccacagaaaatgctgaaagttgatgaatgagtttcggctagtaactttgaagcacatatctcgagatcagaatatagaggctaatgacttggctcaaggagcgtcaggatacaagccgatgacaaaagatattgagatagagattgctacggttacagccgatgattggagatatgatgtgtttcaatacttacaaaatccatctcaatcggcttcgcggaaattgcgttataaggctttgaaatacaccttgttggatgatgagctctattatcggacgattgatggggtgttgcttaaatgtttgagtgccgattaggcaaaagttgcaatcggcgaagttatgtggcactcatcagtcggctcataaaatgaagtggttgcttcgacgtgccgggtattttttgctgacgatgctcgaggattgtttcagatattataaaggttgtcaagattgtcagaagtttggagcgatgcagagagcgccggcatcggctatgaatcctattataaaaccatggccttttagaggttggggaattgatatgatcggcatgattaatccaccatcgagcaaaggtcacaagtttatattggtggcaacagattattttaccaagtgggtagaggcgattcctttaaagaaagttgattctggggatgctatacagtttgttgaagagcatataatctatcgatttggtatccctcaaactattacgaccgaccagggttcgattttcgtatctgatgagtttgttcagtttgccgatagcatgggaattaaattgttgaattcttcaccatattatgcacaagctaatgggcaagccgaggcatctaataagagcttgatcaagttgattaagaggaaaatttctgattttcctcggcaatggcatactcggttagctgaggcgttatggtcttatcggatggcttgtcatggatcgatacaggtttctccttataaacttgtttatggtcatgaggccgttttgccatgggaggttagaatcggctcaagaagaacggagctgcaagttactttaacagccgatgagtattataaccttatggccgatgaaagggaggatctggttcaatcacggttacgagctcttgcaaaagttacttaggataaggagcgagttgcccggcattataataagaaagtagtgcccaaagatttttcggaaggtgaactcgtatggaagttgattttgccgattgggactcgagatagcaaattcggcaagtggtcgccgaattgggaagaaccgttccagattcataaggtggtatctaagggagcttacatgttgcgaggactcgatggagaagtttatggcagagcactaaatggcaaatacttgaagaaatattaccctagtgtttgtgttaacgcatgatcggctgatgttgccgatacatgatagccgatgtgtttacatcgccttgagatggccgatatggttatatcgcccttagttttttttattgtaatcggttgcaggttgccgatgtgcaatggccgatatggttatattgcccttagtcgtttttataattttatcaatgttttggacattttaaaattaggggggcacatacatggaaaatcgcaaatttttaagcgtatttgggaaatatgttaatcggcacaaggattatacagacaacaaagttactagggtatcttagccgattacaaaagttttctaaagtttgttacatagaaagtcactgagacaaatatcgctggatagccgatatagccctttgtctaatctgttctacttcttctatggcttgggaatcttgagcgtcggttacagggatgactctcaaggatttggtcatatcagcgacgttcttgatagccgatttcagctttgccttctgttcttcgacagcttgcgggagatcggctagtttcttgtgctccatatccagctcagcattgcattcttggagttgtgccatgagatcaatcttacgagcttcaagccgatcgatatttgatttgatcgggccctcagacaactgatcaagtttggatttctctgcatgcacaagctgccgattgtgctggattgtagcttcgatgtttttgcgctcccggcgatcggctaacctctgcctggccttctccagcttgaattggtgttgctcaagatagacggctagagtaagggcatcggctaaattatctggaaggagagcttggatatctgtgaatcttacccggatcgagccacagttggtcaccaggttatctagtgttgcttctagccgattagagatatcctcaagagttctcttcacattatcagacagaggagctgttgccttgctggtggtgtcttcttccgtttcatcgaggtaatctttgatgtcgaaggagaacagatcggctaaaacctgcaaaagataatatcatggatggttaaggatcaagacatgattggccgatctcaaatttatgtcaacaaaacttactggaatagcaggagtagctggttgttcttcctcttcaacatgatgactgtctgcagccgatggggtgcggtcgcctgattcgatctgcacaagaggtgaagaagaaggaggaggctgcaaaagggacaaatgttagacataattggcccagatcagttaatgagatgattgagagcatcttactggtggaaccggtttaggagttggcgcagccgatttcttcttcatagcagttttctttttctgtaattactaaaactgtgaggaatcggccataaggtaaaacgattacaaaaggagtcaaagaaagctgcttactcttaagaagtggactggggcagaagcagttggaggggtctacttgggtgaagccgatggtgttttttctgtgtcacttatttcggctgcagcttgatcgacatcatctccaattacttcttcatccagagcttgttcgatggatggatctagagcaggcagatcgtcagctggtgtggtcttcttcggcttaattttcttctttaaagctgggactaaagtatcctcagccgatgatctggttttccgcttcttgccggcatcggctagttctctgataagccctcggagaagcgctgaagtcttgggggcgttgtagccgatgacggaaggagatggcgcacctccatttggaattagacctggcgcatatttaatgaccttgccactgttactttggtgaggaggagaggattctgttgtctgcagatcagaagaaaaggttagtcaaggttcaaatcggttaccagtcattcaagcaagattgataaagtgaagatttacctgaggaatggcatcggggaacaggtctgtcatatacatggaagccgattgatggaacaaatgcagcttccattcactccaccatctgtcaaatgcccggttcctggaccttgccaactctatgttctcaatgcttccaagttggggtcctgggatgttcagcaaccgatccattattaaggttgaagagatgtcacctctacactggatcttgtcagcaaagtacaggccgattggcagctgtcccattccaaattgtctagccgaagtcattgggtgataaaactcgtaggagacctgaatatttcttccttgatggatgccaacagggagaatacatgggctgatagcagtagtgaaaacttctctagattgctgaaatttttcatgattaatgtcttcaaatctaaaatcggctggtagttcaaaatccattgagtcagcatagaagaaccaaactcgggcatccttttgaaatccatcataaaaactgaagaaccaatccttcagaagttcagccgatagcttcgctcccgcatcggctggcgtagatgcatattctccgtatgacatgcatctacgatgagtgtgttcttctccatcatcttccatgatcggctccaaccttggaaattcggcttctatcacaaatgaccgattgacaactttcatgactaccaagttcagccaagtttgcagtaaccaccatggtccacctgccccaactactgagccgacgatcactttagctgatgcattattcaacatttgatataggtagccgaggaggattttgcccaagggaaattgtttcttcgattctagggcctcggctaagaattaccaattggttgtaggaccatagcttaacccgcagaagaggaatttttccaaccacatcaacaggaaggccacatgttctctaggggtaactggtcctttgcccatatatgctgcaatatatcctgaccagcctccaatgcttttagtcttgaactcgaaggtgttcttggtattcaagttcatggggttagccgacgaggtcacatctaagccagtgagcatgatgatatccagtagagttagggccatcggcccttggttgaagaggaaggcattgagggtgttggaccaaaaataagtagcagcagctatcaggggttcatctttggccgagtttgctattgtaagggctagggcttggccgattccaatctcatcccaatgggcttgcttgttagccgacatccgtttgtaccatacaggccagcttttctcaagagaaggccaggatttaaaagtatttttccaatgacttatatttggattggccgacctaaaaggggttctattggtttcggctatgatgaattcagtgggatcaagattgccgattggaccaagaaagtattgttgatcgtgcaacaaactgggaaccgcaacaagattggaaagatgctacaagtacagaagaagtagagaagaagaaaacaagatgagatgaggaaaatcaatctactgtgtaggaaaagggcatctagccaatggatacatacctctgcgtactcggctgatggtgtagcagacgggctggttgatggcgcagcggacgggtcggcggaagtcgacattgccgcgggtggagatttggccgaggaggaaatcgccttgcgcgtcgggggaatcgccggagagagagaggacggaattcgcttaagcggtgaaaacggaagtcacggtgtgaagattctcgggggcaacggttggtatttaaagcactgtgtaacggtcagaaaacagcaagtgcgatatttactcatagtcgatgtatgtcaaatccgaaacattaccaaatattccggacttggggggcatgtgttaacgaccaaatttggttcaaaagcactatggagttgcctttacattttaaaacaaacaccatcactagctttagatgacgcgatgtggatgtaggtcgttgaagcgatggtaaatcaacctatggcataactgcttgcggtatttcatggtgtctctctggggaaaaaatgaaacaatatgagaaccaatgagcatttctctagagatggaacaaacaaccgatttttggtagcaaaaaaaccagtaccgtcgtatatccaacaagactcctgccattgtgacactcgagcatcctcataacacagaacccgcagtcgtgtctacataaaaaaatgaaggtgtgaagtaaaaaaaaacatgtacagaaaaggatgtgactgtgagtgagataaatcaaaaaaaaattgttgatacttacaatgtatcttggtgaggcgattcaggatactcaactatgaagatgtcaccaaatccaaaagggctactgtttgttcgtgtgtcaagggcaacatggagattgctactctgaaaaacatatggaagaaagaatgaaaagaaaaagaatgatacctagtaaaaatacaatgaaaaagaggaatagtaaaaaaaaaagcttaatcacaaattatctaacataatttttagcaatatcgttatctaacctacaattggctaacataagttggtagaggacagccgattaggttaaatatcgatgttgattcaaattatatcggatatccaccactctatgaaactttcagcggcttgattgtctagatattgttcttcttttcatacttaatgctgcatcagttgagtttgatctattaagtcgtgtttagaatatcaatctctagcctgtcttctggttgctgattagggtagtatcggggtttcagccgatcttacctgatttaactacttttattccatatgcttgattgatatgttaaatctgtcctttatgttaagatcttgttgcatttaagtatattaggcttctgtttgatatatttttcttactttaatatattgatatagagtggtatcggagtattagccgatacacgctagatctatttgatcggctatgctataaacatatatatagtcccattattagtatatatttcgatataaatgatttatactgtctcggcatggcgtccgatctatctcaatcacttgatttaagtatatatcgatatagggaatatatatattgttaatatctacagccgatcgagtagatttagtttcttcttatttattcatgattgccgatcgatacatatatgacatcggctcaaagataaatgatatgtcatcggcacctagccgatcagctatcgtttataggattaattgtggtttctttgtctttatttcttgttgattgcaggatcaaatcaactggcacgctcacacatccgaaggcgagttttggacctgcactggagttaagcagatctcccaggcctcgtgttttctgtcaacagaatttaagcttggtacaaggtttcgagttacatttcttcctctgttctccagcattacattggttggatttcttaacccgtggtgagcgacttggaccactaggcgcaaaatgtacaaaatctgaattatctgaatatgtagccatatagactctgtgcaccaaaacaaataaaggaaaacatgacaattagtccgctttcaatcattgttactctatccctgtaatgtcagatttatagtgatgcatgttgcaaaatcaagttaaaaaaaatcagtagatgccattcctcccatggtatcaacaaaaaaaatgtctatttatcactatacagagtaatagaaggtacatttatcgcttcatttcaatagcttcctctagtgcaatgcttcagagtagtatatattgtgtgcaagatatatgtttatagtacactagtatccccgggaccatgtaaactgggcaaaaatattggcctgtcagataaattttggtgaaaccaatactagtaagcagtgagtagatgcagttcatgcatctcatctcccctcttatcaaaccagaaaaatcaaaacacaatgtatgtctgtaatctacctgatacctagtacaataaagtagtgcatcttaggtatcaaccccttctaataaaaattgctggaaacaaaatgtatgtgtgtccatattgtactagcgcatcacaaaaaatagattccaaccacaaacaaaaaagtttcatgagatgagtaactaacctgttaattttaacagctcaggtatcaaacatgactccccccatccgcttcagcctcactacctgtaaaccctagaacacaaatgtagatagggagctgaatcagtaagttgcaaagttggggtgcgagaagacataggaaatgggacttagaaattaagatgaatcagatacctgcagttttgagtctgctgcacgagaggggattgcgcgtgaaggatctcgccaccgatgcagcgccatcagcgtggggagaggggagaaatcagccagagcacgatgggtaccagcggaaagaaacgaagggaaccgaacgatgatgcagccctgccggcgtggaggatggaggaatcggccaaagtggagtgcgccgagtggaggagccgattccgatcggaggaaggatgtgatgggagcggcgccgcagcaccgccggcgtgggggattgagggaggaagaggagcggcggcacaggctcgccggtgtggggaggcggagggagggaggggagtggctgcgcacgccggcgagcgctgtgaacaaggttgtcggtatcccgatacgtatcctagtatcttacgatactacgatcctaccaagtcgaaacgataccgatcccacatagtatcctaattttcatagtatctcgatcctactattcattagtatatgatcctacaaaattttaggtggtatcctgattctacgatccctatgatactataaaatattatttaaaataacatggtatgaaaataatgtaaataaatatgttcaaatttatataaaatcagttaaatatatcaaaaccaacgtggtttctcttaataaatgcctctgtttgcatgatatatatcattactacatttttttatatagaatggctacatataattaatataaatattaattaaacttaaaaaagaaaatcttatagtacccgatactacgatacgactctacgatacgatattactttgagtaaaacgatactaactagtatcccgatcctgacaaccttggctgtgaattgaggggaaaaagcacagagagaggaaggaagctgtgagctgcaagctgtaagccgtggcggagaaaacgttttggacgccgtgcgatagattttctgttgaaggatatatacatgctatcttaggcattttacaatgcacctcgatatatttttcagtaggacacactaaggatgtgtttggttgctcgcatccttctagcctggcccatctcccagattcgggctgagcttagcctggttaaggacatacacatgcaggtatttgtttgtctgattggaactaaactggatatggctagatattgtttggttggttgcattgaagatactggatgtagaagattttgtttggtaggtagtatgaacttccagtgcagtcacctttttatttgatagggtgagattaccccccacaatatcatatatattaaaaaactatactaatatctaatttaagcaattagttatattttgaccacataataaaaaagtgcatttactagactttaagcacggtatacattatttttttctgaagactacagtaattcacttggatatacagagccggtgaattaaaaaaaaggggaaaagaaaaggggaaaaaaaaaagagaaaacactaagcttcgtggtctcggtgagctcgcggcggtgcaaaaatagaaaagaaaatgaaaaaaaaacaaaaaagaaagcacgaagcttcgtggtctgggcgagctcacggcggccgtgaactcgggaccgccggatctggctgcctggccgctggagggaaaacggatggtgttggtgaggggatggatggcgatggcgaggaggggattaagggcgacagtgcgacacagaggaagaaagggagcgcaatggcggcgacggtggcacgctgttggccaccaaatctggcaaagaagagaggaggaggaagacgatggcggcgcgctgttgaccgccgaatctgactgtggagattatggataccccatacctacacggcatgtatagtccgactgggtatggagtgccatgtatagatagaatttctttaggaagactcgggttaaattctaaacttgtgtatcaaggaaatacccgagatcctagtcggttacgattgtattttatctgtaactatatatttcgttagggatatggactgtattttgtaatacggacccctttccctatttaaggaggggtccgggtgcctctaggggcataactttctcccagatcatactatcaataacacactcggtggatcaatcctcggacaggagtagggtattacttcttaaataagaaggcctgaacctgtataaaattccttgtctcttaacccatccacttttccagcttgatagccactcccttttagtattgccgaaatcttgtttcgacagttggcgcgccaggtaggggtagcgtcaagttttttgccgactagtgcgatgggtttcgtctccggcatcgacgacttcgtcttcccttccgggtaggcgttccggttcggcagcctcgacttcatcaccaacgacttcggcaagatttctctcctcgactcggatccaaaccaatcgggaagaggccaggtctccgccccgttcggtgtcccaaactcggccgagatctaccccaagatcatctcgatcgagtcggcttcaatccactcggacgagatccaatctactccaacacgacctgatcaagacgatgggtcctatccctcaatcttaatgagacttcccgatgatctggctgctgtcttcacgaccaaggcgtttcccacccgaagacctagatgggatccagcttcggctccgatccgatctagctctagggaggtcggcgttatactccaacctctcgggacggtctcgacggaagaattggacagctacctcagctccctcggtgtcagttctcgaccaacagagatcctcgagtacgacgacttcggctatcgttacgactacactaacttcgacgaaagctacgaggacaactacacgcctctcttcttcggtgtattcatggccgacaacgagacggcagaacagcgccgagcccgagaagcagaagaagaacgcacgcgacaagaagctgaacgtcgccgactggaggaagaacgacaacgacaagaacaagaacgactgcagcgtgaacaacaagatcgcgaacgggctgccaaggaggctgaggaccaacgacagcgcgccttggaacccggacgactagcacgagagctcatcgggcaagacgacgttgacgggacgacggtttttcgtgccccacaacagaacgcggttgtagcgatcaccctcctcgacaccctcctcactgaagatgcgctcaaccaagctgatcacgtcgtcaacatcttgaactagaccaagaccatgatcgccgcctcggtcccggctaactgcgcaagcacccgcacgccgactggcagccgagttccacctcttcggtctcaagactatcatcagccaagcctcaatgtcgtcgccgagggatccaatcgtaggagcagggatcatggtgaacgatccgttcattcaccccctgaccggcacagggagcgtcaagctgaacgcccccgctccccccaccgcaggcgtcccatcgatcttcgcgagaccattaaccagcgacgcgcggcgagaggccacaatcctcatcattcaccagatcgctccgacgacaacgtggatggagtagctgccttcacaaacgacctacgttaagtggattggccagctggcttcaagccgctagaatcgagaagtatgacggcaccactaaccctgagtcttggctcaccgtctacggtctcgccatccatgcagcaggaggagacagcaaagccatggcaaactatctacccgtggctctagcggattctgcccggtcctggcttcacgggttaccccgtggcacaatcggatcatgggcggaacttcgcgaccacttcatcgccaacttccagggtacctttgaacgccctggtacacagtttgatctctacaacgtcattcagaagtcgggagaatcccttcaagattacatccgacgcttctccgagcaacgcaacaagatatccgacattaccgacgacgtcatcatcgccgccttcaccaagggcatttgccacgaggacctagtcggcaagttcgggcgcaagcctcccaagacggtcaagcagatgttcgaaaaagccaatgagtatgccaaagccgaagatgctattaccgcgtccaagcaatcgggcaccacttggaagccgaagaaagatacgccgactacaggggggagtggaagtaccaatcacaaggaccgcaagcgtaagcccgaggaacttgtggcaaccactacaccatcctcccgacagcgttcccgcgtcaacacttttgacaatatcatgaactccccatgtccgcatcatcccaattccaatcacgcggccaaagattgcttcgtctacaaacagtttgcagaacaatacgccaagaatgcacgcaaggcctccgacggagatcaaagcacgtcaaagaagaaggatgatgaagatgatgccccgactggttttcaagaccatcgcaaggaactcaaccacatcttcggcggacccctggcttatgaatccaagagaaagcaaaagctgaccgaacgggagatcaacgctgttcagcccgacacgccccaatatctttggtggtcagagacaacaattaagtttgaccactcggatcatcctgaccgagtggtccacccggggcggtaccccctggtactagacccagtggttcgtaacgtcaagcttcgaagatccctcatcgatggtggcagtgcactcaacatccttttcgccaagactctggacgacatgcagatccctcgcacggaattaaagctgagtaatgcgccctttcacagagtcattccagggctatccgcaacaccactcggccagatcactcttccggtcactttcggcactcgggagaacttccgtacagagaacatttgtttcgaggtcgctgacttcgagacagcatatcatgtcatactcggacgcccggcgttagccaagttcatggccgtcccgcactatacctacatgatgatgaagatgcccggtccccgaggagtcatatccctacggagtgacatcaagcaagccgtcacgtgtgacaaggaaagttgcgagatggcccacacccgcgagatcacgctcgcccgagaagaaatccgactggctgcgtccacagcaagcgaaggagaagtgcctgcgaccaagacgccaaagaccggagaaagcgacgccaagaccaagaagatttcactagatccctctgatcctaccaagactgctgtaataggcgttgagttagactgtaaataggaaagtgcgctcatcacctttcttcaaaataataaagatatctttgcgtggaaaccatccgatatgcctggtattcctagagaggtgattgagcactctttacatgtcaaggaagacgcaaaacctattaagcaacgactccgccggttcgcacaagataggaaggacgcgatcaaggaaaaattgaccaagctgttagcagcaggcttcatcaaagaagtccttcatcccgactggctggctaacccagtcctggtccggaagaagacggggcaatggcgcatgtctgttgattataccgaccttaacaagtcttgccctaaagatccttttgggttacctcacattgaccaggtagttgactcaacggccgactgcgagttactcagctttttggattgctactctggatatcatcagatccgactaaaggaatccgactgcttaaagacttcattcatcacgcccttcggggcttactgttacatcaccatgccttttggattgaagaatgcaggagcaacttatcaacgcatgatccagagatgtttttcaactcagatcggccgcaacgttgaagcctatgtagatgacgtagtcgtcaagaccaagtagaaggatgatttgattgcggatctagaagaaacttttgcgagcatccgcgctttcaagatgaaactaaaccctgaaaagtgcatcttcggagtaccgtcagagaagctgcttggatttatggtgtcccatagaggcatacaagccaacccagagaaaatcaatgccatcctcaacatgaaaccgccaagctcctagaaaggtgttcaaaagctaaccggctgcatggtggcgctcagccgattcgtttcacaactcggcgagcgggggatgccctttttcaagctgttgaagaaaaccgacaatttccaatgggggcccgaagcacaaaaagcctttgaagacttcaaaaaacttcttactaccccaccagtcttagcttcaccacactcgcaagagccactgttgttataagtgtcgacaacttcctaggtggtaagcacaatcctggttgttgagcgtgtagaagaaggccacgttcaaaaagtccaacgaccaatctacttcgttagcaaggttttggctgactccaaaacaagatatcctcaggttcaaaagctactatatggtgttttaattaccgtcaggaaattatcccactacttccaaggtcactcggtcacggtggtcacatcgtttccactcggggatatacttcataatcacgaagcaaatgggcggatcgcaaagtgggccttagagttgatgtccttggatatatccctcaagccgcgaacttcgatcaagtcccaagctttagccgactttgttgtcgagtggactgagtgccaagaaggcgtgcctgtagagaagatggagtattggaccatgcattttgacgggtcaaagaggctttcaggcaccggagcaggggttgttctgatttccccgactggagaaaggctgagctacatattgtggatatatttttctacatcccataacatggcagaatatgaggcgctccttcacggactaaggccccgtttggtagagctcctaactccaactcccaactccaaactccaactccagtgagagctagctcctctaggagctgaggtaggtaaaaaagtgtttggctagattactcagctccatatttctacatcctttgtcgccatttcatcgaacaccttctaggcgtcgccttgacgttgccgccgtagccagtcagcccacgagccaccgccgccgagaagcccacgcatctccgccgcctcccaagccgctgcgcaagcgccgccgcacaggccgccgccgtcgcccaggctgcctcctgccgacgcccccgcacgcgactcgcctgccgacgccgccgccgcgtgccgcccgtcgcggccaccgcaacaccgcccgcagccaccgccaccgcctgccgccgccgatgcgccgcggcctgctgcccccgtatgctgccaacgcagacgccgccacaaccggttgtggccgtcgtcggaggatggggaagaagatgggccatcgtcccccaacagccgctctccgccgctgccgcagccccccgccgccagcctccggccgcgcgtgcgtgccgcccgtcgtcatcccgcagccgccgccgcccgccgctgtcgctgcccgtcgccgtcaacgctgccgcagcccgccgatgccgccgcactagctcgggattgggaggaagattgggggaggagagagaacgggaggaaagaaggggtgaaagggtagttgagtggcattttcgtgtaaatacactaaaatattagagggtagtgggtcttttggggtggagtggagctgtgtagcagcaaaaacccagctccacccccgtagttcattttctaggagtagctctgccaactccactccaaaaaaaggtgaatctggaccatttggcacagctcccgctccaggtaagttggagttgggagctagagttgtgccaaacggggcctaaggattgcaatctctttgggaatccggcatctgatagtctgtgtagattttcagttggttgttaatcaagtcatgaaagaatggtcctgccttgatgataatatgaccgcttaccggcaggaggtacgcaagttggaagacaaattcgacggacttgagctcacccatgttcttcggcataataacgaggtgtcgcgaccgagaaaattgccttttcccgaacgctagtgtattaatccccgtcccaggaaatgccggggtacaccaaacaaacatgatacaaaaggcacatctttattatatcgattatatttacattattacaaaggcacttaaggcctgacaatcaaaaataaacagcagcggactagcgggcctacggctccatcttcacaggcgctcaactggggtataagccaggactccacctaagacttcttctccaaagcttctcttactgaagggggggaaaagattgagcaagagtgagtacaaccacagtactcagcaagccacaccggcagatgcatgattaatgcaaggggggtacaaggggataataatatcggggttaagttttgcagtaaacagcatttaaaagtcacttagttgcccaaagctattttgtaaacacgatcctagagctatacaatattattaatcaaggtcgtgaaccctcacgaacctgccttaacccaaggcctacgatgattcagaccgaactggcaacccgaccctgggtcccagctcgtcccaagccaacccaggccaaccattccacattttagttgttaagcaaattttaagaattaaaacactaacttgggtacattgctcggcttgcccataaccgagggcgcggctattcgaatagattatactctgatcagaggtgtacatctttacccacaagacacatcttcctcacgtgtaaccacgtgccacataccaccacggtatacggacggaagacgtgacatagttcccaacccatcctagccataaacaagagtaccgacccaaccccacctacggccggaacccccgggacaggtaggcaggactgagcccccagcagcaggacaccagccctgtaccatgacatctcgactaccgggccgcagctcgtgtagccttcatttgtcctagagatgtccatcgacccccgacttcgtccatctccatccgtgtacttttgtttataaccagactgagccacaaactaagccttacccactagacatgtggaagtacggtagtgctttgcaacagaggcccgagcttaatccttatagtacccgaggtacgactagcaaaacccaaccacgcacctcgagcccagcctaaaaccattttgggggttttgaatagagggggaggtgtgtgtccaattgcaacaaaagccaaccattccaaagtatccaagtgatatgaatattcccaaagtctaaagttataaaaccacctaatgttgcctaattaaacagcgaagcatctacctaaattcatactagtggaaccatgaatagagtacccactagttggggttttgtttattccagggtgaacaaggtaataataacaatagcaataataataaggtcataacaaaggtaaataggcatggctaaataaaacagtgataacgcaggaatttaaataaagcgataatgcattaatttaaatcagaataattttataaactgggattcaatatgctcaaggatgatgtgacttgccttgctcagagagaacggccttccgaaccttcggcgacgaccgcgaaccacgcttcgggaacctccggaacgacagaagctacgcgaagcacacaagcaaagctacaagcctataaagaagcaataacaatacataaaaagaaagcacagggttctttaggttataacaaacattaggagacttgaacgggtcgattcagagttcgtatgaccaagatatgatcatccgaagtttaatgctgttatatggagatttgcggattattataattaagctttgcaattataaaacatgtgtaagcgctagcctagaaaagacaggaaggctgcgccgttgacatgcggacctcacatgtcaacaaaaaggaccgcggtagaccgagtacacagagacggtccacgggtcgacggaaacggatcccgtgtgtcaaccgaggcgagtggccgacaaacggactccagtagacaccacacgggttgcacacgtggaaaccatgcggctaccgagtgggcacactaacacggtcaccacacgcacacctggacgactaccgacaccggtacacgggtaccggggccgacaaccgcacaacgagcacgggcgacaccgaaaggacgaggacggggcagcgagggagagggacccttaccaccacgcaacgaggcgagggaacgacaatgacgaacgggcgcggcggaggcggccgggaacgacggagacgaacggcgaggggacgacttcggcggcgatccttggacgaaggcgagacgcggccggcgcaacgcttgacgatgcggagccgaggacgaagacgacgacggggctgcagcggctcgcttgacgaacgcggacgacggacgagaacggctcgatggagggacgaacgccacgacgaccgggaacgacgagaggacgacgacgacgacgaccggggccggcgaggagacgacgagggcagccggcagcggctgcacggaggcgaggatggcgtggaacacgccgctgcgatgccgacgacggaggcggcgccgcgagacgacgagccggcgaggatgaacggtgaagacgacgacggacaccggcggtgttcggccgaaggggaagcgatgccgaggacgacgtcgcggctgcgatgccgaaggtggtggaggtgcggccgaccggtgcacgggcgaggagggacgggcggccgaaccactccggtgaggcggatggagaggttcgcggcgacgtgcggcggcttccgggcgaaaccgaggggtggacgaggtggagggctacgtcaccgtgccgagagaggggacggcagcgccggctgatgcacgggcgcggcggaagggggctgccggaggagacgtcgacgaggaggaagaagaggccggcgcgggcgacggcgttccggcgaaattcgggcgacgccgtggccttgccgggaaagaggacggcactccggtgccgggagaggtggtggcgacgtcggccggcgcacaggggacgcggcagaggcggccggaggcggaatcgtggcggcaataccacggttgccggcggggaggcacttccggaggtctccgcggaaaacagagggtaggccggcgaagaggaggcggctgcgatgctggaggaggcgacggcgcgaccggacggcgctccggcgaggagggagatgcggctggaggcggccggcggcacgggagagagaggaggacggcggggagaggtgatacgaccacggggaggctcgggatgaggttaaaacgatagaacggaggatggggattccattttatgggatgggggagggagccggccacgggaggagcaggaacggcggcgggaaacacggccggcggcaatggaaggcggccgggaatggcgcggccgttcccggcgattgggggcgccattcaaggggaaattaagggggaaagagagaggagggaaaggggattaattccccccaattaattttggaatccaacgcttaaatcaagcggattcgagggaggaacgaagctagggttcacgggagagagagagaggaggccgggcgggaggaaggagatgaccggcctggcgcgtgggccccacgcggtcgggcgcgcggtcagcgcacgcgcggcgtgcgtgcgcgggaggggagcggctcaggcaggggcgcggcgtgggccgggcggccggcccaggaggagaggaggggaggggtggcccagggagagagggaggaggagggagtgggccggggaaggagggagggaaggagagggagagaaaaagagggaggagagaaggacttcggccgcgggccgggggagagagagggaggctttgggccagacttggcccaaaggagggagagggattatttttaggtttttctttttaataaactttgataattgtttttgttgcttaataattatttccggtgctctggaaattcaagtaaaatttgagggctccttttagaccaaagagaatttaacaaaaattctccaggccacatttgaatttttcttgtatgtattttagtgtttgccaatttcttttcgaattttaattaattctattattccttttagaaaatgatttttatttcgggatgaatttatcaggacgtgacacgaggcagccgacagattggccaacttcggttcaaaacgagaagcagctccttttgacgtattcgtcgagcatctctatgagccaaccgtaccaaggaaagaaataatcgaggccacggtcactcaagatgtaagcatgattgaagctgactggagagagccccttataagatttttgcccaaacaagaactccctcaagataaagatgaagccgagcggatctccaggcatagcagacactatgtcattcacgagaccgagctgtacataaaaagtccatcgggaatcctgcaacgctgtgtgtctctcgaggagggaaggcaatttctaaaggacatacatttaggcatctgtggcaatcacgctgctgcacgaaccattgttggcaaggcataccagcagggtttcttctggcccacggctgtgtccgacgccgacaaaattgtgcgaacatgtgagggttgtcaattttttgcccgacaaactcatctaccggctcaggagttgcaaaccatcccgttgtcttggccgttcgtggttcgggggctcgacatggttggcccgtttaaaaaggctgtcggtagatatactcatctctttgtagctgttgacaaattctccgagtggatcgaagctaaaccggtcattacaatcacggtagacaaagccagagatttcttcatcaacattgtgcaccggttcagggtacccaatcggatcatcactgataacggcactcaatttacaggcggagtatttaaagatttttgtgaggacttcggcatcaaaatttgttatgtctccgtagcacaccccatgagcaatggacaagtcgaacgtgccaatggtatgatacttcaaggaataaaagcgcgagtttttgaccgactgcatccctatgccggcaagtgggtagaacagctgccgtctgtactttggtccatgcgcaccactcccagtcgggctacgggccagtcgccgttcttcctactctatggagcggaagcaatgttgctgttcttccgagtagatgacctcaaccgactggaagaagttcgtgaagcagcattaattcagtcggctcggtacttgcaagggatgcgccgttatcacaatcgcaatgttcgatcaagagcttttttagtcggcgacctggttctgagaaaaatccagactacacgggattggcacaagttatctcccttgtgggaaggaccgttcataatttccgaagtcactcggcaaggttcttaccgactcaagcgtgaagacggtactaatatcgacaactcttggaatattgaacatcttcgccatttttatgcttaggcgttacttttgtatttccctctttgactgctaacatcaagtttttccttgagttatcagtcgggggctactataataataatggagtgtgatttttatcaattcaatttgcttacttgatttgtcattgccctgtttgattttttgacttggttgatgaggactgaaagtttttaataacttttgcgggttctaagctcaataaggtttgacaaaaacttttaagaaatcagaagctaagtctaaatcatcaagcatagcatacatttatcagtattgtacaaattgtccctccatcatcatccaaacacaatgttagtcagctttttcatcatcagagttagttgatccagtcggcctgaggtcagtgtcctggaacctttcaacaacatcagccgctatcttgtcggcagcattttgagcttcactgatgagatcaagagcagcttcttcacttgtcccatctgcaaagccgtcaacagcttcaatgtctatcttcgggtacaaggacttggtcatcgccagcgacaggccagctcccatacttccagcctccttgatattcttaaaatatgtatccggagcaattctcagcttgtcgaagatctcgtcagcatcaaatgaactcggaccattgttattgaagaacatggcttggacgagtagtgtggcggcgttggcaacctcatctctagctccctcaagcttcttgattttgctgaccaagacgtcaaattgagcttgggatttgattttgcgatctgcacagatatacctacatcaatgagtggtcatgaagaggtgaatattttttagtgcttcggccgtcggtaccttcgacgtctttttgggcccagtccctttgcttagtcagttcggccttgtccttttccagagctttaactcgcctttccagctcggaaatcttggcagcttgcgctatatcgttcccttttggttagtcgcacatgaacaacaacatgaagcaagtcaggcaatgagaagagttaccttttgatgagccgctcagctcaaagttggaatcttggagctcggcgatccggtctctcaggtcatgctcagtcttcttggcaagctccttggcttcgtgcagctgatctctggtagctttcagagttccaagatagggaactaatttttcaagagttgcagtcttcgcctctttcctgagatggattctctgtaatacaaaagtatccttattcagcaaagtggccgacaggatgataagagacatgtatgagaagacttacatttacaagacgagtggcttggccgagagcctttttcagcatacacaattcctcgtcttctttttgcttgttgattacaatcccttgaggttgcatttcatcatcccaccatttgatcaatatgggtgggcgagaatcttcagccgatcatatccggaggacttcttcttcttcaccgataattgggccttatatattcatggacgatgattagacggatgaagaaggtttatcggatcaaaatggatttagaagagtagctttacctgttattatctctggtcggggacgagaagatccttgaaccttaacaggagacttggatcccgggtcagcgttggcatccttcttaggagggctatcggcttgggcctctgctttcgggatatcttcgctctgagttgtgcccgactggtttccagttgggggctcctgttcagcactgacgttagcttcggccgactagtttccagtcgggggctcattgctagcttgtgcattatcagatgctggttgatctttactcgggtgatcttcggtagtcggcccggtttcaactgaggggccagtctctgtgccgatcggcgtggggtcttttccagaaggatctatatcagatggctttctgcaaattcgatacacgttgtcagctctgctacaatgatgagcgactaatgatacagaggcattttgttagatgatacacacctggatgacttccttatttttggcatgggacgaccggatgttttcttcctcgggttagtgtcacgccccgaactagtcccgagcagaactagcccgtgacgctccaaattaacctgttaaccgataccagtcccagaaaacagtgctggtatcacaggaagacagaatatcacagcaacagaggtctctttattatagagtaggagtacagtcatgttgggctgcggatagatcccgagctcacaactgcattacaaaaggggaacggaagccagacttggaccaaacatcacaggcgcgacttgggaactaggccgaaaccctaaaactcatcgtagccagcttgctcctagaagaactcctcgtcagtgggatccgcttcatcttcttcagcaactgggggggattatttatatagagcaagggtgagtacgggagtactcagcaagccatgggaaataagtgtttaatgcaggcttcaaagaaaggctgttgtttttgcaattgattttatttgaactcttttctgaaacaactaagggagtgcttctcaaacgacatgggtgagacagtgcgtctcgtccggtcggagtatgtgcaatgtatcagtcttttgaattgattaagattgactcccggccaacagctttcaaacggccacccgggcctggctgatcccatcagccgcagattttccaaacatcaaacccattcaacaacagcaaatttcacaaggcagtagtcaaacaaactacgctaggaatcacctcacatccgcccatgaccgtgggcacggctgttcgaacagttttaacaacctctgcagagggtgtacactttacccacacgacattactaacccggatcatccagttcgtgcagaacggccacgactagagaccttaaggctttcatgacaaggcatttcgaaagccgacacaggttcaccatatgccaacgagaggggtcccagaccaacaccagattaggtcccagaccatactgtgccaggaagcccaggggtcctccccgacaccaccccggcgaatccacatgtctcttagcatcatggctcccccgataagctagttactcagccaggggtgtcccattccacccatgtggtcgtacttgtcatatgttcggatgaaattccaaggaaacggtccttaagtgcaagagcgggaaaccgtacacccggtacgttccccggtccgcggttttggaaattcatttagttcgcaagcaccgacctaggtgtcgggttttccaagtcttttgtaaaacccaagttttacccaagatgtttctcagattttaagtttgaaggcgaccgtcgatacccgtgcagagtgcatgattaccgaggcgcgactaggtgggtacaagggagcatggtataacaattacaatgggagggtcaaaagcaacaaattaggtaggtctgccaatctgccttgcagatgggacaagcagattgagtgcgatcctatcaatccataatatttttcaagcaacataattaagttcaaatataggctcaagatgttcaaaggtggcttgcctcgctcgagatcatgagcttgatcctcgaaatcctcgcactgcgggtcttcgggctccgaaactacacgcgaaacgggacaactcagcaaacggcgaaaataaagccctattattgacctctaagtgtgccattagatagatctcgagatttgatgaattttggaagttgaacggagtcaaacggacttactgttgggaagatattgaatttctaagattattggatttttggtctaaaggaaaaggatttatttaaatcctttttgaaaaagaaaagaaaagaaaagaaggcaggagggaaattagacttttctcgggcggctagggcgcggcccgagagaaaggggcggctcggccgagcttaatgggccggccggcccaagaaggcggcccaaggcgcgcgcgcgggcggggagggagagagagagccggtgggctaggtccatcccgcgtggtcccgggtgggacccgcttgtcggcgactcggctcaccgtgaccaaggtgcacgcggggcgagctagggtttggggagggaggcgcggcgcatgcgcgcggttcgcggaggacgcggtgcggcgggcccacgcgcagcctcacggctcgcggtggaccgcgcgcgcgagggggcggagggaagcggcggaccggggtctacttgacccagtcgcggccgaggtggtgccgacgtggcgcctacgttgctgccacgcgggccggcgggaggtagatgacgacgccggccggaacggatggcggacggcagcggagtgatctctccggcctcgggccagggaagaggaagaaggcgagctcccggagtccccttccgcgtccacgaacgcaccggctctcccggtgcttggcgatgaacggcggaggcgagacagaggggcagcaatggcgcggtggcagcgagcaaaacgagaggaatcaatgggagggcgccttggtttataggacgacgatgtcggtttggaaaccaaccttgggcggtcaaggcgcgagctggcactcggcgctcgcggccaaaacagcgatagaggcggatgacgccggctgggaggggaaaaggaaaaaaaagaagggagaaagggggcttgccccttgccactttgggaaaaggaggaggggatgggggcgacgcggcagagggaggaggagctctgcctccatcccttggaggctagcgcggggagaggcggggccgaggcgatgacgacgacgatgacggccaggcggtttggagcggagcgacgacacgggcggcaggcgcgggcaggtgcggcaggcgctgacggcggcggcgactggccggtcggccaccatggcgtgcccgcgcgggaagcaacgggcggcgtggcgatttgggcggcgtcggcgagaaacggcagcgagagcggagggcgctcggctcggcgcggctcacgcgcacgcgtgcgcagcgcacgggcagagcgggggagagggagagagagagagagagagagagccagggagggaggggaagatgggccgagagggattcggcccatcgaacccgagggaggcgaaaaagacttttgtggagggatttgatttgggaaggatttggattcgggattgaactcgacgatagatcggggatttgaggtctgagatggcacggacactagacaacaagcaaagaaacggaattcgcaaatagggtttttaagagatagttttcccgctaggcgccacgacggaacgggcgctacagttagccagctttggctgtctctcagctccttcctttttgctgccggattttttggcgtcatgaccctcatcgtcggtcagcactgatttcctcttccgagagtctgactgagtggttcatcttgaggggccgggttgtacaaccgaccgattttttggccccccactagcttgaccagtcggttggcgtgatgagcgtcgttgaacagttggaggatcagactttatcaaggtgaattcctgtgcatgatgattcacattttcaattacttttaaagaagaccaaaggatgtaacttgtaaaggctgagacgagtgatacataccggagaaggagggttgaaagcgttgtacggcaccactggtagtgcatgagagtaactgactacaatggcattagagaagattttatacattctctcctgcataatcttgtattcaagagcctctgggtcctctcggttgggatcatgcagtgcgggatctctccttgattggggctaaccgggtcttgatgaagtgccgagtgatttgctctccttgcagaccttgctctttcagtttcagcatgcagtccattagagtaagcacctgggcggcctcgtctcccattgggagtgaattccaagtgtcttgatatactggagggagacaggagtactcgggaagagctggctcgaggttttgtacataaaaccagttggcatgccatcctttgtttgaagtcttgaagagcatagagaagtatttttgtcccaaagttcccctcaactgaaatccggctccaccaactacgcatggtttgctcttattcggctggggcttgaggaagaacatgcggtgaaaaagcgcaaaatgcatgaatgaagttggcgatgtggactatggaattgggatttaggtgatgtaagctgatgccgtaaaaatccaagatgccccggaagaaacttgaagttggaagggaaaatccaccataaaagaagagagaaaataccaccgtctcgtgtgtatcggaggttggaaatgcttccccaaatgctggacgccatccgatgatctccttcgccggaagaacgccatgcgccaccatctccttcagattctcctccgttacatcggaaggcgcccactggttctcaaagctttctctttcttccgccatggatgcgaactagatggcgagatttggtctgaaatgcggttgagaatgaaggggagattgatgcggtgggtgcacggatgatttctgtggaattttggaaggtggatttgagcgaatcggttaaccctagtttcgccggagcagcctttgcactgtagcgggaaatggggaaagtggcgagagtctcggtgaggaagacgaagagacattctgtttctctttggtgttattagggtatcggaagtactaatgggcctgggcctaaaatagtacttcagcccaattttgctaatcggcgtggctaagtggtgatccgtagggacttaggcattttttgtttcggcaatttttgctcaccacaatatggcccgatgctgttaaattcctttttgatgtagttagataattccttggaattactacgatgcaaataaaaaggtaccctacagaaaggtattatactacttttgtaagcttttttaagctgcaaaagctgtttgggtttggttgagatgactggttttttaatggtcattctctcggcatgttatatgcttattttttattatggcgtgggtcatagcctaggctatttagactcattaattgccatgatttctatcatatttggtggatcatcttaagagtttttactcggattcttatcaaatatggtcatttgtagaccttttgaagtgtttttcactcaggtttctttatatcttctttcttggtatattaaagctaaagcagtcggttggatgttttgctgaacgtcatatctgctgagctacataactactcggattggatgatatttgttccttaactatatgtttagtttttaactaatcacatattcgggggctacacctaattaggtgcatctagccgatgcacctggttatttatatttttcagcccttcgcagtctttgattttggtactcgggagatcgatgcagaagaaattgaagcactcggattatcattttacgctaagagaaaaggttatttcgtcgactgcaaaggtctcaggggctactgtggagattatggataccccatatctacacggcatgtatagtccgactgggtatggggtgccatgtatagatagaatatctttaggaagactcgggttaaattctaaacttgtgtatcaaggaaatatttgagatcctagtcagttacgattgtattttatctgtaactatatattctgttagggatatggacagtattttgtaatacggaccccttcccctatataagtagcggtccaggtgcctctagcggcagcgagtcggcgatgtccgacaggatcacctccacctccacctccatgacgcctgcagagctccccgctccgccgcctttcaccatcaccggtgccggcgccggcggcagcaggttggccaccatcatcttgagctggttggtcgacttctgcgccttgaggatgtgctttaccgtcgccgccgcgccgccgccccggccgccgccagccatctcacaatgagaaatttatgtgttctctcttcctcttgtgctgctgatttgtgatactaagtctcactgactaatcatgcaagtgtgtgctttcaagggtaaaggactaggatactcaaatatctacgaaagagatacttcaaatgcatatcatttttttagggtaaaagcagaagctctgcctatttcatataaggagaagagagagggaccaaagtttttacaaacaaggttaaaaaagatcctaagaggaccctcctctgagagtgacaggtcggaacaagaattttaggtaatgtaaagaaactaatgtgaggatacgagaactactaatctaaattgtgagctccgtcataggctcatcttcaaatgcatatcatatacgcactttattccttttcaagactgccaaatcgaattcactttgttgaattaacaacttcttgaagtcgggtcaagacggtgacaggtgaccagttagcatctcactaattaatcacagcttatgtagtatatggcctatcttatccatcatgagcatcatggtgacagctcggtgtcaaatatttagcattattttagtacaagtcaagtcttcattcctactatgtggtcggtttgtttcacagatcagaacatgtgcctgcgtcagtttaatctattcttgtcttgttgagaattagccaacattaatttgataatctaaccacgtctcgttgcaggaacaacttttgatcaatatttgattctacttcttgttcactgtatttacctgcaaaacaaggtgtttaaactgtaaatatattgtcacaaagaattaattcctcttctagcaaacaaagtacaccctacttcttaaactaagaaaataattttctgatcatgaaccaacgtggaaagttcgtagttaaaaatggctaaaagtttaatgcttttagtacggggagtgcgttctgtcatgcatggttctctcttatatgttcttgttagaataactgaataagagatttatgtaatatgctgttgttgctgttaatcagattgatagccactttggttgctcacccctgacctgagcaggatcgatttagttctgttttctttttcttctgtaggaaaataaaatggtcttcattcagtttgtccaatttgcgatcttttgccacaagtttttcgttcccctggacatatgtacattgttcttttaggtattgcaagtttgcatgattggcttggctctctttctcggatcatacagcatggattttgaaatttataaaactctcaacggaacatcccctcatttagctgactcaaaaaaaatctggtcaacagcatggatcttcaatttattaattggccatcataaggcactttagtacagccatacggagtaccaactatatatgtatgcagcgaataactcaattgttgtcagattatgagctgataatcttcagtgccaaaagtgttccattggattcgtaactttgcattttgctttgctagtcgcattcttctttggatttcgtatgcatgtagcagctgactggaagatacgatctgaaatcagtcaacctgctagttaatttatgcagcgccaaactctgctcatactctgtttcctctgttcttcagttattgtaacagttggacagagttaagagttcttcagttttgcatccacagacagcgtgagcgcgcatgagtgcattttgatcgtaagcatgagtgtgttttgctgacatcgcttatgttccttacggtggaacctattacctagtcttcgatccagcgtaagtgctttggttgatctttgattattttttcaatggtgtatcaagtgttcaatgacaacaagatgcctatagactatagtgtgaaaaaggggcactatatgtgtactcactccatttgaaggatatatacatgctatcttaggcattttacaatgcacctcaacagattttcagtaggttttgtccagttggacacattactcagagctgactatacgatgaaacacacgctgactagtcactcggcagcggaccaaaagggatgagtctcctatgacgtaaagtcagagggacattgtcacttactgacatgtgggacccacaaagattagacccccgtgtgggtctctctgactttacctcatagtatcgcgatccgaccaaaagaactttctcctgcgatttgctacataaaatccggcacgacggagttgtggagggcgagggagtcctcgtcggcgtcgctcggcttcttgtgctcctccaccagctccaccggatcatacggctcctgccgcaccacccgcagctccggaacctccccctccgacagaagctccgactgcgagcacgccggcgagggtatgaacagccacgacggcgtgcaggccatcatcatgtcgtccgacgccgccgggacatgttcctccagcttctgctgcagagctgacggcagaagacggtgactactggttgctgcgtcgcaacgcgggccgtcggcggggttggtgggagccggcgacgacggccggtcgccgccgcaggtgtgcaggccgatgtaggtgatctccagccgggacgggtcgtcgtcggattgctgcacctgcttcctcgccgtgcagcccaacatctgggcgcatctgtagtagctcctgtaagcacagacagcttcagatcactttcaagctcaatttattatgattattctttattttgttgcttttgacccaaaaaaaaacacagattcctattgatcctcaacgaaaaaagttgcgttgcgttttatgaaaaaaattgcagccggagattgcaaggtttctcacaagtcatcacaagttcacaacccaaaccaaacgttcttcaaaggtttactgaaaccgtcaatctagacttgtcgtgttataccttgcaaacctggcgccaagaatgtccttctgcccgtacttcctccagggataggaatcgtcacgatctccaagctctagtataattcttcgggatgaaccatctgccctgctgcattcaaaatcacaagctcaaattcagtattcatttatttgtaattgtgacaatttttcatgacatcactgctgaatacaacaaattaatgattcgtgacaactgacagcactgccaggcgatgattatcggggcttttttctggttcatttctaatatgttaattgaatcttgaacaatttagattttgggggcaacagaatcctaagagcatctccagcagggacctcaaatccagcccctattcaatttttgagtgttaagataaaaaaactagatccagcagggaccctactacagcccccaaagtgaggaggccctcaaatcctccccccaaggccccagtcctgggggactccggagcacgcccccatcgtcattttttttggcgcggatataattttgcttcgcgcattttcttgttattcccgcacggctgcgatgacagatcttctccggcgagtactgacgaattcccagcacctccatcaagactgccctagaaaggtaagacttttccatacctttcttgcccaccgttctcaaggccttcggcggcagtccatgcgcatgcccggccgccgatctcccgccatctgcctggccacacgccggccgtcgcgtgccctccgaggctgcccgcacacacgtcgtccacctgcacgccgtctgcccccacgctggcctcctgcccccattgatttttctggagaaactctaagtaggtcatgtggtgcgggggttcagtggtagagtactaatcaattttctgaataactctgttcttgacacctgtggacatgtggtggtagatggttctggtggagactgacttgtttttaatattttttttggagaattgtagtggactttgtcggcaagaaaaatctaaattctcagctagtaatggttgtgtttagttcacactaaaattagaagtttagttgaaattgaaacgatgtgatgaaaaagttagaagtttatatgtgtaagaaagttttgatgtgatagaaaagttggaagtttgaagaaaaactggatctaaacacggtgaatatatcactgtatttatacttagtagcactgtacaattgttgcaatggatcgattagaaccatatatatatatacaggagtaagtggtactgtactagtacgattccactgcttttcatagattgaatgttgcatactgtatatggggtatactctgtaccgtgtatgtgtagttggatgtgtgcatatgctctaaattttcttattaattttatgatcttgtgatggcagtgttttttacatggacttctacgacgacgatgatctcattaccgattggtgggatcaggaggagttgtctgacgatgatgactactacattgcagctgctcttcttacagacatagagcataagaggaccaaaagaaagcatcgtggttcagtcccaggtcgtgagataattaatagggacaggtttgctggcaatttacgcatagtggctgattattttgcagatcctcctgtatatagtgcaaaattatttaggaggaggttcagaatgtcaagggagctcttcttgcgcatcgtggctagtgtggaggctcatgatgactacttcaggcagagaccaaatgcagtgggtcttctcggtgccactgcattgcagaaggtgtatggtgcaattcgcatgcttgcatatgatattccagccgatagtcttgatgaagtcgtgaggatttcagagagcaccatgatagaagctttcaagcactttgtcaaggctgtggtggatgtgtttgctgatcaatacttgagagcaccaactgctgaggacactacaaggttgatggctataaacactccaagggggttcccagggatgctaggttgtattgactgtatgcattggaggtggaagaattgaccaacaggctggaaaggacaatactcagggcatgtggatgggccaaccatgattcttgaagctgttgcatctaaagatttgtggatttggcattccttctttggactaccaggttctcttaatgatatcattgtactacagagatcaccactctttcaaaggcttacattagggacagctccagagttggagtttatggtgaatggaaataaatacaccatgggttactatcttgctgttggcatatacccttcttgggccacttttgtgaagaccatttctaatccacaaggtaacaagagaatacattatgcaaaagttcaagaaggagtgagaaaggatgttgaaagagcatttggtgttctacaagcccgctttgcaatggtgaggggtcctgctagattttgagatacagagaccctatggtacataatgacagcttgtgtaatcatgcacaacatgatcattgacaatgagcgagatgaagatgtagattttgactatgatcaggaggacagtgaggtgttgaggaaggaggaataccaacgacgtaataaacctgtgttagaaaaatttctaaagatacataaagaaattgaagaccgacgggtacataagcaacttcgagatgatcttgtggaacatttgtgggcgcttcatggtgctcggtagtttgtttcattgcattttctatcatgtgtgggttatgttcattatttacttctaggatatatcatttccatgtttgaaaattttgaattcaattttgaatcgtggtgtttgaaattgcaaatttgaatatggttgaactccatgcgctagaattatttatgtttaaattactatgtgttaaactagatataaatataaattctataataaaataaaagagaaaaaaaataggggctaagatatggaggctactactagacataaagacatatttagggtctagaacattgagggcagcccccatttaacttttagggactcgaaagtaggggctactgctagagatgctctaaccctctccaaatccaaatacacaaccatttccttttccggagaaaatctagaggaaaaaaaaaagaccttttcagtatcctccctcgacatctgaaatgtcaaatcggaagagacataaacagaatttgcagacacagcaatcaaacttaatgaagaccacaagatatataattaatttataccttctccgttgagctttcctcttcgagactgaccggccgccgctgttcgccaccacacactgcccataggacggcaacaagctcgcctccggcggcggcggcggccgccgccgccgggagcgactggtcgtcgcacgccgcgcggagcatgagagacgcgagcgcctgagacagcgagtcggagatgtccgccaggatcacctccacggcgccggagctcctccctccgccgccgccgcctcccgctagcatcgccttgagctggttggtcgacttctgcgcgctgcggatgagcctctccgtcgccgccgtgccgcctccggcgccgctagccatgtcaaaatgaggggaataaagtcaagtgtttctctccttctcgtgccaatggtttttgatgctggtcgatcgatggtggcgagtgtgcgctagtacagagggtaactattaggataatcaatgtatcttgcactttattccttttcgatactgtcagactcacttttgtctttgttaattactccctattatacattgacttttcctagctaacttcttaaatttaatttaatcaagtttataaaaaaaaatagtagacgtattcaatacaaaacaagatcctttaaaactaatttggtgttataagcgtgtggttaaatttttatataaacttaattaatcttgaactaattaattagagaaaaaaatttaaaacatatatagtactaatccgagtgatacccttttaaatcagtgaagatataccgtaacatatagagatggtaatgggcgatatgaactgatacccgacagattttactctattactagtcacatattatctaatttttgtactcattggtctattagcggctaaaaatccttagctgttgagtacatgggacctgttctttagtcagtcatacctataaatctatgtgtaaaaaaatgtgtgccattaatgtattgtctaattcttatatggtttgtttatttgctttgaatgttattaatgttagaattacggtcttctgtgatgaagctggtatcaccatcaagctcagaggactaatgctacctctattttttaatttgtaggacgctgactagttaatgtttaaactaaccagtgtcatataaaaaacaggagggagtattatttttgaatgatcgattaatttttatggatgtcgatagctattgatcatagaggtgacaggaacggtgaagccaggcggcggccgcctgaccttgcccggaaggtggatccgccgcgcggaccatcttatgcaccagctgaaagctacgtggcaattttttactagtaatttaattcttacgtgtttatcaaatttcagctgagtcgacgtgtacaacggcagaccatttgtatcaattttcatgagcacacgcgtcaaatgttttctacggtcaaaaaacgcaagaggataagcgcgcgtctaagttctgacactccgaagcctggtatgttattctcttcgtccaataatatacgttctaatataaatgaattgtttatctagatttattctactaggatatactaaatccacctaaagtgccttatattatgagacagaggaagtattgtatagcatatattttataaataatgtcgaatagcaagtcaagtacataaccactcgatcttaattaggacccatttggtaaagttctaactcctaaatttagcttcaggagttaagggtctatttgacacagctccagctccacctctcctggagctagagcgtagccaaacagtttca

SEQ ID NO: 4997 - DNA, 947 bp, Oryza sativa
ctggctcggccattgggctgaacatgaaaagcttggcgcacacgaaagagtgcgagagctcagaaaatccctggcagagtcccctacctggcgcgccagatgacggagcgtggggctcctcactgggagaccgcacaggcccccctttgccagttcggccggggactcagggtgagattctaagctctctgtatgtggaaggctcgcgagacaggaaacacacaagacacgggcgatgtatacaggttcgggccgctgagaagcgtaataccctactcctgtgttttgggagatctgtgtatgaaggagctacaaagtatgagccagcctctcccttgttctgggttccccatctggaaaagtccagtcccccctcccagtgggcaaggtcctccttttatatcttaaggggataccacatgcaccatttctctcttttttgtggggacttaccccaccttttcataaatggacggagatttgtatagttgccgtccgagtcaccatctgatgagacggcccacaactacctccactttcgccgggagcagatgcgacgtggaatcgtggctgtctgctgacgacatgaccggtgtcagaccagtcacgtcggtcattcttgtccaccacgtgtcagcttagcaatctacatgttcgcccttcttcacacaacatcttgcctgtaatggttaggatgaagcctggcatatatctgactaggactaacgtgccatctctgggaggtaacacgctagctccagctggggacgagcgcctagaagccctcgtcctgacgggatggggcgaggcgtgcgtcagatcgcctgtcgccaccaaacccgcgatctgacctctgtgactggtcacagaccggataaacgagtgcactgcactgcgttacatgcggcatgacgcgctcagccaaaccgcaataaatgtggttaggt

SEQ ID NO: 4998 - DNA, 37483 bp, Oryza sativa
  unsure (1)..(37483): unsure at all n locations
ttggacgtcaggccacattttgccttattccgtcgcatcttcttcctcaagccccaaccaaacaagagtaaaccatgcgtagttgggggggctggatttcaattgaggggaactctgagccaaaagtatttctccatgcccttcaaaacctcaaacaaaggctggcatgcaaattggttctatgtacaaaaccccgagcctgcactccccgagtactcctgtctccctccagtttatcaggactcttggaactcacttccaatgggagaggaagccgctcaggcgcttgccctgatggaccgtatgctgaagctgaaggagcaaggtctgcaaggagaacagatcacccggcattttatcaagagccggctagctccaattaaagagagatcctgtacagccttcaaatttgatggcaaacatgacaccaaccgtgaagatcctgaatctcttgaattcaaggttatgaaggaaagaatgtataaaatcttctcgaatgcaattgtagtcagttattcgcacttgctgccagtggtgccatacaacgccttcaatccttctccaccggtatgtattcaaacatttcagcctttctcaaaagcatgcctttatctactgttaagctaattgaaaactcgaaatgttatacccaggaattcgctttgatgaagtcggatcctccaattgctcaacgccgatcaccccgctggcgaactggtcaggcgagtggaggaccaaaaattcagtctgacactcaaacaaacacctcgaaatcaatcagtcagtcggactcccgcaagaggaaattggttctgagtgatgatgaaggcgataatgctagaaaatctggcaataaagaggtgaccgggaaacaaccaagggaaaccaatccgaagaagaaaacatccagtcgtcccatgccgatttggtccgagatatggctggaaatggatggggattcggtccggtggttgcgtgaagggtttttgtgcagctcaggaggatggattggagtggatttgttaacccttgcttccgccggtgtgcttgcttccgccggtgtggttttgcactgtagcgggaaatggggaaagtggcgagagtctcggcggggaagacgaaacgacgctccgattttggcgtttatttcgctagggtatcgggagtactaatgggcctaggcctaaacagtacttcagcccagttttgctatcagcgtgattaagttgtgatccatagggacttaggcatttgtttttgtttcgtcaacacttgctcacaacagtatagcccaatgctgttaaaatcctttttgacgcagttagataattctttggaattactacgatgcaaataaaaaggtgcataacataaaagtgttatactaattttgtaggcctttttaggctgcaaaggttgtttgggttttcttgagatgactggttttaatacagtcatccactcggcatgttatatgcttattttgattatgtcatgagtcatagcctaggctatttagactcgtcttttatcagattttatgccacatttgataggtcttttgagagtttttactcggacttttatcatctgtgctgatttatgaacctttggagtgcttctcacttgggtttttctttatatttctttggcacattaaagcagtcggcgggaggtttaccagatgctgcatatgcttggccttgagatatttatcctggaatcctttaaagggtgtcgaaggcatattttttggcctaggcctaatatgtctgcagcccatattttcaggtgtggcctatcacgttcttttagggacttaggcactttttgcttaggccaaagtgcgcgtgatcaagtgcccaataccttaaaatccttttataccgcagttactcaactttttaggagttggtacaatgcatcttaaaaggtgtcaaacagtaaagctttacatagctgccctactgacttttttatatagtcaaggtgttgtttgggtttataaagcagttgattggatataatatcattgctttttgccacgtaagtgtgcatttttattaactaatattatggctttggctgattatatattgtggtcattttccaggcggttggtaaatcgtttacgagtttatttactcggatgttacaccacatatgccatatattttcaggtgtggtgaaatcatgtgtcttttagggacttaagcacatctgttaaagaagtgtgctcatggtgtatgcccaatactttggaaatttctttattcacaacatcaagctcttctttatagctgttttgctatgtgaatttccaaaaatgttgtcaactttaggttgcacgcatcatattctgcaaagcagtcggtatatcacttggatcatattatttgggggattcacactgcatatgctatatattgatatcaagtcacttggttgataacaattatcaaaaaccactcggttggttggattatttattccttgactatatgcttagtttgttcaactaaccatatagtcgagggctacacctaattaggtgcatctagtcgatgcacctgattttttctatttttcagcccttcacagtctttgattatattactcgggagatcaaaacagatgaagctaaagcactcggattgtcttttcggattatgagagaagattattccgtcgactgtaaaggtctcaggggctactgtggagattatggataccccattcctacacggcatgtatatccgactgggtatggggtgtcatgtatagatagaatatctttaaaaggactcgggttaattaccaaacttgtatgtcaaggaaatacccgggatcctagtcggttacgattgtattttatctgtaattacctattccgttagggatatggtttgtactttgtaatacggaccccttcccctatataaggaggggtccgggtgcctctaggggcacgattttctcccagatcatacgatcaataatacactcggcggatcaatccccggacaggagtagggtattacttcttgattaagaaggcctgaacctgtataaaatcccttgtctctgaacccatccacttttctagcttgatagccacccccttttagtattgccaaaatcttgtttcgacaaaaaggtaaagcttgttatagcggcttgcgttctcgggattagtgcttacatcttcatgacactctaatcctgtttatataaatcgtcgagttatcatatatgctatgtaatctaggtcgatcttgctacctaacctcagcggctagcctctatcatcgaaaacagtcgacatggttagatactgacttcgaattagattacatagtgcatctaccatcttcaaaaggttgccatcgacttgtttaaattttatgcttctttctatgtttaatgttgtatcagttaagtttgatccattaaagcattacctggaatcgtaatatctagcttgtttcatgactgctactagagatactattggggtttcagccgatcttgcctgatttagttgtctcgttacttatatgcttactcgacatactgaatctaccctttatattaagatctcttttgaatgaaatatattaaatttgttggtttattctaatgagtaacgagtggtatcggagtattagtcgatacgcattagatttaccctatcagctatgctatgaatatgtataatctttactccaaagcacttttaagcgcaagtaatttatactgtctcggcacactgcccgatctatcccaatcgcttagcttaaatatattcttggaatatagattatatatcattgatatctacagccgatcgagtggatctaactcttttctcgttacttacttcattgccgatctgacctgcgttacatcggcttggtgctaaatgatatgtcatcggcagtccagccgatgggctatcgtttatggatttaactttggattctttgtttcttgttggttgcaggatcaaactaactagcacgccctgaacctgaaggcaaatctttggacctgcactagagtaaagcaaacctcgccagtgtgtgtttttcacatcaacaccttccaatccttgtacacatgtatgattagcaggaggttcattttatcgcatgtcgggtgcatttttatccgtaaatggcctgcatacgtatatttaccaaaactagtggaaggggcagtgatgtcgacgcataatgggcgtagctgccaacatgaatttgccgcgttgaacgacggacttgacgcatgcattgcgaacggcacgggtgcagccgcaactacaagccatagctcctttcctttcttcttcttcttcttcttcttccttctttcttctttcttccttctttcttttcttctctctccctccatggctgatgccaaaaagtggctcggtcggccaatgacagcgtgacgaccgatggctcgatgcacgaaggtgcactcgaccatgatgggatgagctcgcacgggcttgtgtctcgcgaacgacgaggccacaagacgagcgtggaggccgactgctagtgcgtgatggcttgctcttttgcctgtccctgtctggaacgatacgacacatcttgtgtggagataccccaatcggcttgcgccggcgactccaagtcgacagttgcggtgttcaccaggaacggcaaaaacaaaacgggatggagagagtatttcattttcgtaattagatcagcgaatgcaaaacggatctacgagttgtcatccttctatgtgaattagaaaaatgtgacggtgatgtcatagatctaattttacaaaatttcagtggcacccagccaatatcacgaatagtagtggtatttttctaatatagaaaatttacgatgatatggatccaatctatactttttataaagttaaagttatagtccactaagttcaacatgctaccacgccacatcattacccactaccaaaaattacatattcaacctcatgcaaatatacaacatcatttacaatttatttaattctacaaatcaacatgcaatcatatccagttatcacctctcacaaatctatctatcatttttatagtattaaacatatagttatcaatatgtttcacattaaaacgcaggtatcatctgtttgttttatgataagtactgataaactctaatgttttattattttttttcttttacttttagcttaattgtcgaaaaaaatattgagaaatacttagtaattttcgtggcaaaacgtgagaaatcatacagttaacccatccaaacagtccgtaaagcccgtaagaaaaatggcatatgagaatacacattcggggaggatatggcacagggttttaaaagaaaaaccatcaaattaactcaactcgccccaaattttcgaggggagattttttttttcctttttaacgtttttacacctcatcatcatcaggcctttcccttccctttctcctttctcgttgtgtgggttctttctaggccctaggacaagccaagaagcggcggaggggaagggaggaagagggcaccagccgcaccggccggcggaatggcggcgccgcccaaggcctggaaggcggagtacgccaagtccgggcggtcctcgtgcaagtcgtgcaggtcccccatcgggaaggaccagctccggctcggcaagatggtccaggccacgcagttcgacggattaatgcccgtccgtatcctctccctccacccgctctcctcgccgacgatctttctccgttcagttgatgaatcttgctttgatctttagggtctgggagggtagggttttggtgtggcaggcatcgtgttcttgagggttttttgtaggttggtttggattctgagaattttctggattgatgggtgatcggttttcatcctgatttgcattgcgggtgtgggttttgtggtcatctgccacaagaatcttctgctttcatgggtggttggttttcatcttgatgtgcattgctaatgtgggttttgcgggcatttgccataagaatcttctgctttggtgggtggttggttttaaatcttgatgcccgaaaaaaatatgtttctgagggtaatttcgcatgattttgtggggtatgatcgaaccaatcttcttcgaatgcggagttcttgatgcatttggtttggtgctctgtcgatttgtcgatgatccgtcaattccagcatggggtttattgctgtttctaatccattatgcaatctatatgtgtaacgagctcgaattcgctagaggtgcttttgtgggcaccaactttgacatatgcaatttaactggtatttctcctaagttgtttgatatattagttattatgcggacctgccagttggttgtgctgttttaggcttttagcatggcaatggggcataccaatgacaatgttagtaatctagtgtgttcgctaatctgtttttgttcttatctgatgtgtagtttgcaaattataatctaggtattcgtttgcccgctttattttctagtttgcctcttgtaattgttttgtgggtgcatgtgtattataagtgcttacctgtattaggcaagataaaacttggaggggagtccttattctatttttcattttttatattgcacatttggataatgaatctttatttcttttggtcggatcaactcagtactcatgtggttatgtggactagacactcaaattatttcactgggaaatgtaggatcgtttagggcaacttagggggtacttttggatctgcatgccatttttcacctgaccatatctttttattttctgtgatggcccttattttttacctgaccatgttctttaatatggagtgtttataacgttgtaccttttctatgtttatagtaattgttttattcaagaactataactgtttggaacttttttttggtcatggtagattctcgatggtgcagaagagaaaactcgatggttatatgacatatctttccatatcaattttacgaattgaccacttccaattaattttagtgcccttttctctttttcagatgtggaaccatgccagttgcatcctcagtaagaaaaaccagataaaatcgtatgcaactttatcttttactgtttgcatgagtttcacgctatagtattatggtttattaatctttattgcatctattggaaatctgacctaactcaaagtgtcgattcttcatttcaaattagtgttgatgatgttgaaggaatagacacactcagatgggatgaccaagagaagataagaaattatgttggaagtgcaccagctactgcaagttctgcagctgctatttcagataaatgcaccattgaggttgctaaatctgcccgtacttcctgtagacggtgtggtgaaaagataaaaaagggaacggtctgtatcttttgatctattaattttttatatgctttctaattcgtcccttgaggataggaagttttatgccatgaaaattttatgtttgtactttgttgcttttcaaattatagtcatgaaaataacctcctcttgatgattaacaccttacagtcttatatgagcattcagctaacaatcatagataatcagaagtttcacattcttgaatgaaccttgatgcagcatgtaagaataattaatcataacatgtttcctattccttatagttactccctgggaaaaatactgtattgtccaaaattctgcatgttactttgttgttctatactttatttatttagaacatgaactttagcgctcactaaggatgaaatggatacccgacttggtcctagcacttgaacacttgtagctggggaggttaaatagcttccctaccactatgccattggcatgttcttttattttctgaacttgcatctgggaaatgtatggttctgatacgcagggacaccataggttcttttctgtaccctattccctgtggcctgcatcatgttgcatataatgcccaagcttttgcactggaattccaagtgaccagaaagcctaaaggccacagtttcccatttattttgtagttactctgctacgtgccactagcaagcattagaactctgaattttgtgttaagtttactttatcaaatgaagtaacctgcaaatgtattaattggaagagtatttattatgttcatatttcttattcatccacactcctagttgagtactcctaatgaattacaataattaccgtggagaattatatacaggaaaatgtttgatgatccagaagtactattagtcatgcacttagctaataatgtatgttttgaaaacatatgaattgtaactgtgatatggcaacttgtaatgtaaaaacatggtctttgtcttcactctaagttgtttctgtaatagtattattatttgtttgtctaggttcgtgtttcatctaagcttgaaggcaaaggttggtatcacgccagctgttttctggagatgtccccagctgcaactggtgagaatttctcaggctgggagatcctgtcgcatgaggataaaagagctgttcttgatcttgttaagaaagatgcccccagctcaggtaatgaaacatgggcatcaaattttcttcgcgccacttcgtaatctgacttgatattttgtattgttgtttctcaaggacaaacatcttctaagggttccaagcgcaagaataatcagaatgatatacacgactgcaaagctcccaagataatcaggagtatatcagaaggcacagcagaagataaagggaaagctgttgtatcacatgattccaatgctaattcttctgatcttcaagaaaagcttaaagagcagagtgacacactttggaaattgaaggatgaacttaagaagcatgtgtcaactgctgaactaaggaacatgctcgaagcaaatgggcaggatacatctgggccagagcggcatctattagaccgttggtaatattgcatgctatttgtgaaatggtttttaacttcctggcttcctgcactacattatttccatccaatgagtaattgatatttaaacaaactgcactacaaggatcccgcatataaatatatccttggccagttggccgatgctacttgatagaggagggtacgattataactgatgatgaatggtactagtgtacgaaatttgtcaggatagttgttccccaagaccccaattggtcatctatgtaattttttgtcgctagatttattttctgcttgctttctggatcccaaatcccagttgtaacatcctggttatagggtttgtgatactgatcgcttagtggaattcagaattgtcaccgtaacctaatgattgcacactatttgctttggttcttttgtaatctggttcatgtatacaattattatttccttaaaagtggctataccttttctttctaaaaaacacattttaaaaatttgatgtgtgcagagaaatttcaaagtcaggcagcacttaagatatttgttttcaggcaaaaattgttcaatagtatttaggtctgaattttttatgtataattcaaggaagacaaacattattgattgcataataagctttacaatattgttggttgcgtagacctgcttgtggcatttccttgtttcatctcacatagaagtcagtacacttcgtcgctaactttcttcctcgtctggcagtgctgatgggatgctttttggagcattgggtacttgcccagtttgttctagcttcctttactatcatggtggccagtatcattgcagtggctatgtgtcagaatggtccaaggtcatactctacgacagaacccgtgcgcagtaaaaagaaatggaaaattcctgacgaaatggataatggttatcttacaaaggtatgactatggctccccacccccacccccacccccacccaaacccaaaagaatatcgttcttaatgcttggtttctacagttgaggtaagcaaatatgtatgtatcttgcagtggttcaagtctcaaaaggctaagaaaccagagagagttcttccgccaatgtcacctgagaaatcattgtgccaatcaacccagcaaaaccgatctttccttagtgaaggactggataaattgagagtttctatagtaggacaatctaaagatgtggttgtaagtgatcttttactttttggtacagttatcctcaggttctcttgtgagttgtgttcgttaaagcaagcaccaattatgccatgaccttgctgcatgttgtggcatgcaccagacgccctttattttttccaatcacagttactttgcttacattgttatccagattgattcttaccatattatacagattatatatattatgcatatttgttgtgtggcttgttgacatgaaattggaaagtgctcaactgtacatgcttcatatatttgtttgtttaagtcaattccttgaagatagctagtttagtttgttaatttattccttgagttcctcgattatttctttaatctccaaaaattttaatccatggaatatgcagagtgaccacatttagattgcagagcaaaggttaggagagtgtaggttttttccctatgtacttgattcagttcatgttaaattcatgtcatttgttgaataatagatcaaattttatatgatctagcatgctgcttttgcatcaagtggtaagatagatttgcaattatttgcatgggatactgttttcttttattttttcttctctgctgatcagttattgggctatacatttttctttttcttgttttttggtttgtactttgtacattcctctaaactaatcatgtaatccaactactgtaggatggatggaaacagaagctgaaagatgctggtgccaactttaatgccacagttaccaaaggtttttcctcgtgttatcttttttttttctgaactacacaggatttcctcgtgttatccagaactggaactatcttgttcagacatttgaacctttcatatttggttacgtatgacattggaacctatatcttcacccaagtgggtgagcagtttgacaccaccccatgaccaaaagccaccactcaaattcctaaaattggctggctctcacgtatgtgtaattttagactaatacatgacacttaatctaactgatgttttgaaagtataagtaaaatgcattgtctaactcatgattttttatgggagagatggattatggatcacttatgtgcaggtgataattttatgttatctatctgactgtctctatttctgtaagaacatatgggcattgagccagtatttttgtgcagctgatataatgaactgagtcatgtgacttggtcattgtttcataggttaggtaagctcttagtgtttggtgaaatcttttcgcattattttcacatggaagtcttgcactgcagacagcagctgcttagttttatgtagtgagcttgagagtgagaatgctgaagtcaagaaagcaaggtatcacattttactttgcccttatccttttacacttacagtttgacctattgttttgcgaactactgtgttacctattgttttgcgaactactgtgttaaaataccattatatatgctacttcatttcaggaggttgaagataccaattctgcgagaaggttaccttggagaatgcattagaaaaaacagagtgcttccatttgatttgtataaagtagaagctgcattggaatcttcgaaaggaggcacaatgactgttaaagttaaagggcgaagtgctgttcatgagtcctctggtttgcaagatacaggtcatattcttgaagatggaaaaagcatatacaatacaaccctgaacatgtctgacctgacacgaggtgtgaacaggcaaggattttgctcacagcatttcttgtcaaattcaggatttgcacttttaggagtgattgtcaaggcatatttcatatgagtgatatggataaaccgataaaccctccagcaattttagtcaccaaacaaagaacgtggattgcttctcaaatccaacttcccggtcttcccttgaactaacagaatgatataatgctaaatttcccatggttgttaagttataatgttgagtcaagtgcaaccatataaaatagcatgaacattttggaagtactttggtctggtttggtttggtttggttttcattacatatgcccctgaagtcatagccctcgtctcttgttcaagcccaacttagctttggttgtcaatcattccacgatgtctcgtatacatatatgaatcacccgatctagaatgtcttatttactgccattctgcaataaaaaatgttggagcttgcacaaatttctgtttcctttcctctcaatttatgttcgggagcataacacactgttgaaatgagggggaacttttcttctgtagtattaccagttgctaaatttctgttaggttattgcaaataatggtgaccctgcttgccctacttaatcttttaacagntctctctctctctctttttgtctgtgaagctattatatacttcaggtcattgaagaggataatgggtctgattgttatgtattccgaaagtggggacgagttgggaatgaaaaaattggaggcactaagttggaggagatgtcgaaaattcatgctattcaggaatttagaagattgtttcttgagaagactggaaacccctgggaagcatgggaacaaaaaacaaatttccaaaagcagcctgggaaattttatccacttgacattgtatgttgtgggataatgtttttacctgctggatttttttcccctttttagtggatcatgtggattcaatctgatgtgtttaatatattgcaggactatggtgtaaggcaaggaccaaagcggaaagacattgacaaaatgaaaagttcacttcctccccagttgctggagctcatgaatatgcttttcaatattgaaacatacaggtgcgattttactgttctattttcaggttttgcatgtgcacatgctttgtttttagtattagaaaagaatttcacattattttgtaccagggctgctatgctggaattcaaaattaacatgtctgagatgcccctgggtaaactaagcaaggaaaatatccaaaaaggtgtgatactttgctcattgtggaactcattttgttgatctgtaagtccaaacatatcatgattctcttgcctgcactgcatgcaggttttgaagcattaactgagatacagaatctattgggtaacactaataatcaagaactggcggttagagagagcttgatcgttgccgcgagcaatcgtttcttcacccttattccttctattcatcctcacattatacaagatgaggatgatttgatggtgaaagtatgtgttcattaccttgtgttatattcctgtatattgggaagatattccatgactattcttattttttaaaatcacgacagttttaagtgaaatattttgctataaaaccttccttttgcaaaagaataaaggcgttctatgatcattgctgaaattgaaatgggtccattccacgcacagatcgtacatgacttgtaatgatatcttggcagttaggcatgttccataatgctcaaatggaatcgaaggaacacaaaattgttatttattttgtcatatataaatttggcttccagtaaactatgttattgaagtaaaaaaatgtattttcgcactactttcatttatggttcaagttctcaatgactctcattttgctatctagttggaacattttagaggatgttataataaaaaactaacatacctatggcatttttccttttcttttcctttgggtcttcacatgttctccttgccattagatacagtgctgttcttaaatgcaatgatatctcctgcatattcaaggaaaaatgtgttataactgtccaccgtttaaagggctgttttgggatcttggggtattttcattcttattttctttgactgatcagatgtatttcttattgccaattgtaactttattcagagacccaattgactgtaactttggtgcaatggtgcaggtgaaaatgcttgaagctctgcaagatattgaaattgcttctaaacttgttggcttcgatagtgacaatgatgagtctcttgatgacaagtacaagaaacttcgatgtgccattacgccactccctcatgattgtgaagattacaagctagttgagaagtatcttcttaacactcatgctcctacccacaaggtctgtattttcttctgtatacaaaaaccttatagttttttttttctcttttgtagatagtacaatacagacgattgtttctgttttcttctgtataggtattgacatgtcctctttttaaatcttttttgaaggagtggtcactggaattagaggaagtcttttcgcttgatcgagatggagaattcagcaagtactcaagatataagaataatctacataacaagatgttgttatggcatggtaagcaatctatccaagtaatgcaaacacatttggcttacgcaatatttgaaaaggtttttatactctcagtatttagtgccaaaatctaggtttgagatgaaacttattatccatgcgcagtctttgccatggcagtgcgtaggtgaacagagggttcacagtcaatccaacagttgtaaatgtttattttactagttcttcgtgtggtttactcgtgttgtatgttatgttgttatgtcagtatttaaaaggctactttttttgtaattgtactggagatctacttaacgtccctaagtaactctttccttcctaccatttgaatgattccatgattgcaaaacttaatttataggttcaaggttgaccaattatgttggaatacttagtcaaggactaagaatagcacctcctgaggctcccgtgacaggctatatggtttgctctttgttcacttcataaatggttcaactgtagcactggcaaaagattggttgaatttgattaagctattttcctttcaatcaacagtttgggaaaggcctctactttgcagatttagtaagcaagagtgcacaatattgttacgtggataggaagaatccagttggtttgatgcttctttccgaggttgctctaggtgacatgtatgaactgaagaaagccacggttagatataaagcctctcactaccaaaagagaaattctggttataacattaacttgaacttctatctttgctttgaaatatgatcctgctttaaggaattgaccatggcatttctttcctgatttttttattgtgatctatatttctttgctgattcataattataagaaaaagctcaacgagttactcgagtgcaattacttgttttttttccccatgtttatcttggcttggcaccacactcactggcttactgctggctgctgcagtccatggacaaacctccaagagggaaacactcgaccaagggcttaggcaaaaccgtgccgctcgagtccgagtttgcgaaatggagggatgatgttgtggtgccatgcggaaagccagtgccagcatctatcaagacatctgagcttatgtacaatgagtatattgtctacaatacatcccaggttcagtcaaattgttatccatactcttttgcgcgcttctgttcatcagaagttcagttccttacctttcacgaaaccttatctctggcaggtgaagatgcagtacttgttgaaggttaggttccatcacaagaggtgactagaagacttgaggtaggagtagaaatgtagaattaatcagtggaagtatctccatcgttatcagtagtctgtggtggctacgcttttgatgtgttagaatgatttatccagtagtttcaggttggtaggaggttatgtgctgctcgcgtatgatccgttttggggtatgttgcatgggcatcgcgcgagtggcgcaagtaaatcccctgcgcatgccatgggcatttgatagatgtttgcctaattttctgtggcaatgtgcgcatttggcatctctgtttagcttgctattttatcatcactcgcgttatttgtgcgttgttgcgttttggctatctttctttgtattttgattcgaggtctatgttaggatactgcaatcgaaataaactgaacagcattagtgaatagtgccgtctgtaggatcaaagatagaggcgtgtgactgtctagcggaagtaatattcttctatcctataagtaacggttagtctagcacgacaattcgatgagcatagattgcaatagtttttccccaggtattagtgatttggtaatctccgcttgttttgtgcccttctttcactctggtttgtcgtcgtccttcacccttcgctcggggtgctcccacttcctcttagagagatcacttgacttgatagccacaaagacacgttatgaccagcatttagcctcaaagtaatatttaaccatatgatcaacaatatatagaacttatcattcttgaggtgtggccgtcatgagtttattccaatcatattattagaaaacagtaggcaccgcacgtgaggctcaggcgtccacgggaactgccgacggcgcagcaggggcatgcaggatggccttgggctcgtgctcttccttctcctcgtcctcctccgcctcggcctcatacgcgtcacgttcctggacccagagctccgcgaactcgcagttcttgtactgctcgaaccacggcccgccggaagtgtagtggatggcgcgcggcgccgtcccggccgtgtcggcggggtcgacgcggttgtgccccacgaggaagttccacacgaagggcacctcgccgatgtcggcgtcgtccagccacatgaagcggtgcaggtacgcgccgctctgcgtgctcacggcctcgggcgtcagcgcggcgcggttctttgggtgggcgcagttgaagagcaccatggacgaccagttcttgcgcgggtacaccgtctgcacggcgccgtccatcttggtggcctccttgggcgcgtagtcgtggtgcacgcacagcaccgcgtagcgcgggtcggccatgcgcgccagctccgcgacgtcggcgacgaagaggaagtcgcagtcgacgaagagcgcccagccgcggtagccggccaggtggggcgtcagaaagcgggtgaaggagaactcggtgctctccgtgggcccgcgctcccgccagtacagccccgcagaccggagctcctgctgcacgatcgggatcacggccaccggcacggaggagcgctgcagcagggagcgccggcacacgcggtacgcgatgtcctcgcgcgagtcgtacccgacgaacacgcggaacgtctcagcggcctgcacgtcgccggcgccagctacagggccagtcatcacgacgtcgttggtaggcgtgaccgacatagtatttgttggtgatatataagcagaaggttagtagtactgtttgctagcttccccgcaaaaaaagaaaaaaagagtagtgtttgctagctcctggtgctacgtacgcataggccgtgcgagttatcacaaactcctccgcctttttaataagagcctaagagccctttgtcctttgagtgtggggagcgaattgaaacgaggacatgcgtatatgacgacatgtacgtcaacagcgttacgcttgcattattaggcccagggagatcgatgtccagaattatgcatatgtgtttctcttcttttgttgccaaaatcaacaaaattagataaaggaatcctatagctaaccgattgctgtgtggtccggcgccggcggatgcatggcgacactgcactgtggtgtgggcagcgcgcgggcgggaccgacgacagcgcgcgcgcggttgctaatttgtacgggtaatacgtggtcctgtcgtgtgaactaccacagcagcacggcaggaacacgcgcagctgcatgggcagttgggcactctgcctccctgcgtcgattgctccacagtcgtcgtcatgtcccgatcctaattatcacgtcaaaacagctaggcaagtgttgcttgtttttttttttagataataagtgttgcttgttgctccatcgttttcctttttcaattatatatgttattattcacattttcactcagtattttattactaccttgtagaagtttatcgagaatgcatatagtcaaaaatgtcttattttggatgtccagaaatgtttataatttgagaagatgtagtaaaatttacatccaaaatggacaattataccttcctttcgtggcttcacttccatgtgtataccttatggttgtaaatatttaacatttagaaaaaatattggttaaacctccaattttacaatagcataagtttataaaatatactacatcctattcttttttacttgccgttttagacattgatacggatataatttacatattttatcattactttttctaaacatattttttacaagctataaaaacaataattatatgaaagttttttttacaaatatctactgataccattttcacgtgtcaactcctaatattttagaattaactaattaattaatatttgattttaccattaattttaagacatcatctacttgagaatctacttgagaaacggatagtaataagtttaaagaatggtggtggttttgaaatcgggatcctctggattacagtttgtaatgcatatgaccaagagcagatcatgtcatgcgcttcggtactcaatagtggattacaataaatacagttcgcatgaataatgagcctctgcattactgcagaggatccagatctatggctttgacgcacgtttatgcatgcatactaattttttaaacctaaacatttgataaactattattaatagtgagattacaccagtaccaggcttattttttggtactaacctccgcctcatggaatttttttttcttgtagcacgcatgtaattttttttcttgtcccgagatggctgcgttgcctctcgtacgtttggatggatccgcgagggagaagcgtgaccctcgtggtagcatcccgatgatggaggagcgatgccagttgcttcccttgtcaccatcggaaaacaggtgtgtggtttgagctagggatgacaacgggtcagatcgggcacggcagagtaaaatcatgcctgaacccatgcccatcgtcgcttgtccaaaccttacccactagggttagcgggcaaaactctgtgcccgtacccatgcccgacggacacgggtatacccggcgggtacttaatggatctcatatgaatagtaactcgaaagatatacagtttaacaaagagaaataaaatcaacaatttaacaatttattagttatcaacaataatttgaattacatcataacttattacagtggcgaatccagaatgaaaatagaggcggtgctctaatgaccagtgtcaacgttgggaactagaatatatcgataagtgaaccatgtatatctcactatgtttgtagaaaaatctcacttttttagctctaagaccgtcaatcaaagatcattcatatttgctaatatgaaattaatggtgaagaaccacgttgtctcgttgatttcacacctctctctagccatcaggtctctgcccccatatataactacagctaaaataatttgaaatgtgccatatcatagcaactgtgactggagcacaaaacatccgagaaaacaaagcatgaaagcagtagtccaagtaccatctagtcattttcttcctccaaacggtagctagtcataactactgcagcattagtgacatagggatacttaggacctagtagatggagctggggcttgcgccccaacaagccccaatactaaattcgcccctgacttattattagttagtatcacaaatgaaccaagagaaaggggcataacaattaagagataagtcgaaattagctaatacatatgtatcgggtcgaacatgggttacccagaggcaaaaaaatgaaacccggttgttacccacgatgtctacgggtttcgggcggacgtgcccacgggtaaaaattcacacccacgcccatgcccattgggtcaggtatccgcggatacccggacccataggcaaaattaccatccctagtgcccacgggtaaaaattcacacccacgcccatacctattgggtcaggtatctgcggatacccgggcccatgggcaaaattgtcatccctagtttgagctatactcctagttaacaaacaattataggttagcctggtgatcactcgatcagatatactagtaccgcatatgccacctaccacacacgtacggccgcacccgaccgattgatctttaactgtgttgaggactcggcgacgacatgtcgctgtgggaccacttcgattgatcgatacccggttgttggtcagatcagtttcagcgtcttatcttgatagtcatctttaatttgatagctcgtatgtaggatcaaatcaagtgaactaagctagaggtgaatagtaggaacaccgaaaattagtttttagtgtaactaaaagttacgctcaaaatccgatgacgttaattaactggtatgaccggtctaatcaccctctaaaccactgtcatcgatcgccaccgctggtctagccgctgtgaagccactggtgtgaccaccgtgccctcacaggtgtgatcaccgaaactgagaaaaacacaaatcgaaaaactcttgaaactagatcaactttattgtttctaattgtttttacaaagtgcaacaacagtactactctctcaagtttcgactaaacttgaaatttatactaaactctattttttctctcaactaaactctcaaaattgataccaatagatctcaacccatcttctatttatccccgaaagtagcaacccaaaagccataaatccacattaataagtagtcctaatccactagggaacctacccatatgcacgtacacacactacgccagatcaattcatgtgacggaccaaaatatctcgtcacaaacaatatcacctttgacgggttaaataaatctcgtcatagatgaggctaaaaaaaatgacccgtcacaggtaaatagtatttacctgtgacgggtatatataaggacacgacacatgacgtttgtgacatgtccacgtataaacccatcattgatgagtacttatatgtgacgggttttaagtttgcacccgtcaaaggtgagtaacctcacctcagatattccatcaattttgacttataaataaggaaaccccaaccctcccccactgcccactgccccatctcttttctctcttctctcttctctcttttctcttcctccaccatcgcctctccccccaattgtgcaccagctgccgcggtctccttcccatagcagcgtcgccgcctcctttgcccgccgtcgtcctctaggagctcagggtcgccgcctccttcgcccgccatcggcctccaggaggtcgggcccggtggccttcaacatcgacgccgccgccacctcctgaccgccagtcaccagattcgactgccggtgccttctcccgcctcccggtcgctgacgccgtcgcctcccgaccgccggccttcaacactgacgccgtcaccgcctcctgaccgccgatcgccagatctggcccccgagaagccggatctggccgccggcgccttccctcgcctcccggccgccgacgccgccaagtctggcctccaggacgcggatccagccgccgacactttcgccacctccgcaacctcttcctcgactgccggacaccgcctctttcgccgccaaccgctgaccaccagatccgacctccacgaggttgtgggatgcggatccagcatccgcagcctttccttgactgccggacgccgctgcctccgccaccgaccgccggccgccggatttgtttgtgcttgatgtcgtttgtgcttgatttgctaatgtttgttgcttgtgtggatgtgtagtttgttaaaattgatatgggtacttgtgtgatgtatattgttagattgcttcatgtgtagttttttgttgagatgtatttgatttaaaatacaaagttgttgtatcgtgtgcatcttgagatgtatttgatttttcttcatttcgtacatttggggtgaggaacttctttttttctgggtggtttttgacatctgtgacgggtgggaattaaaaccagtcacagctgttttgtcacctttgatgagttggaaagagtcatccgtcacaggtgtgagtcacgtgtgacgggctatatttttctgcccgtcaaaggttttaattaccagtgacgggctttcacccgtcaaagatgaagtgtagtcattagtgaccactaatctctgaccaggactaaatccgtcaaaggtgagggttagaacccatcacagatgaccggatctggcctagtgacaacttatccctttacaattcaaactttaatcttcctacatttggactctttccaaatttgactctgcttttcattcgcacataatctctcttgtatgccgtatggaatcttcacaaccacgcgtattgttattcagtctgagcattccacatgatctcctgatcatccgaacattaacgtctcccaagtcggctttcaatccatcaccgccaatgttctttcgaggcatcaagacacacctgcacatgaatcaaataacaaaccatattcgagcacaagttatttcccaacttgactcaacattaagataaaacagtattacacacgtatagaaatcataaacatgagataatcgcgagtatccaaagaaaacataaaaccgactctaaacaaagtccaaccgatcttaccgtagccacaacaccagtctaaccggcacaccctagtcgatctgatcgcaagagccaaacaaaaatccctgttttcgtactatcactattcaatatattgcataacagaacttcaccaattatccaccaaatttcaaaaccaatataaatcacatatcaattgttcatcacagaatatataaatgaaaaacattgattttacacgcacgtctacgattcatgagctgccagcaacagatgcacatggaaatatagaaggaaaggatccggtcgatcgaagttttcactaaaacttcaaagtcgttcatgtgaatatatacaatcataaatcatgtagcaaagtcccttcataaatttatgtcatgatgatatatagccacgttgccaacgcactgtgcaactactatatatagtgttattacagccatttttatacgttttatttttgctatttatcattaattagttgaccttttttttctcttgtctgttattcaccccgactgtagtttagacatgcaacttaattttgaatacagataaattgccatttttgtttgctttattttttaataccctaaatttatctagatgtatttatagttatatagataatattctaagtgcttttgtatcactttggtgtaattggttaagttcaacaaaatctttcattatttaaaaagagtaaaatgtgcgggtggtctctaaagttatacatgggtgtcatctaggtctctaaactcttctcaatatatatttttggatccacaaacttatcatgtgtgtcatataggtccaaacgggtttcaacccactctctgtgcactgacgtgacatgacatgaagtatatagatgttctgcatagcacatagacaacaataaattgtttcaaatgggactttctttttttccccttaaagggatatcggcatatctacttttacgagcccacaacaaatcgggacctccacattcatgcatcattagattccccacccacatatgcactttattagcaaattataaactattttttcttacgaattaattatccgatatgtgatctgattgtattattaaatttattgcaattaaattttacagagagatcccacatgaaaatattttggataaaaaatattcgtaacagaaatatttttatatgatatatgaaacattgagttataaccgatgaaacatcacaaaatacttgctgaaacatccaaagaatagcacgtgtaacaatctaaaatgacccattaaagcatcacaaaatacatcccgagacatccccaaaaatagcacgtgcaacattctgaaatgatatagtgaaacatcagctacaattaaacatcgcgaaatacctcctacaacatccaaagaacaccctgtgcaacattcaataatgacatagtgaaacatcctaaaatacttattgtaacattttaaatccattgcaacaaaaaaaaacttctaaaagcaaatcatcaaaatatagtcatgtgagatctaaaaatgtttgtgcggtgcagttgaatggtaccattgcaattgtgaatgatgactccgaccctaggtctttcgagtaggacgggcagtagggagatatcgatgactattcatcactatcttccttagatgatgaaggcccaacttcattttataccgaggaagagttgcagaatcttaagaggacgaaagatgtcttggttgaaattcctattttaggtgattgcttacaatggatttagccatttctgtccttttaaattgcagtgaaaacaaagaacaaggaatcgaatatgcttgaaccattcatatcttcaacagataaatcaagtccatcaaaaccactctaaaatggattcctccaaaccattcattactatggagtttactaatagtaccaattttctaaatacaaacttgttatgttcatcataaaccacaatggtcatgaaattaataaacaaataatcctaacacatgaaattttctaagtgaacaatggaaattatttcttgaaagacacaaaataaatggggctagctgaactgccacggcaacgagctgggcgtggcagttttcagctgccatgtcacggagcctgacgtggcaataggtgctacgtcgaagccggcttgaccttgtcaatgccaatgattgccatggggcaccgttgcccatgccaagaccggtggtgtggcaaggtagtttggccacaccggttacaaatggcatggcaaaaaggttcatttttgaaaataagttcctgggaggccgttaaggttcatttatgttatgttgaaataagtgaaaattatttattaaaatggtctaaaataaaaagattccaccacatgccacctaccacatttttcgtgggatatactagcatccgacgccatttaattaatctaagcatcatgctcacattaataaataatgatactaattaccccgggactccaaccctttagatagactagttagaactagtgcaacatattaaaataattagaccgaagccgtggcatagatcagctagtccaatcaagtgaagcacaaactattcctataacacataactaataaagtagtatatgaactataaacactaataagtgcaaaagataattcctttatgaaactcatagtcttacaaagagagtaaagtactaagaacatacccgaatctccaagaagactatggaaccgaagactattctaagcttatctccactactaaagagaaaacaagtatatgaataagaaaactgctctctgagtgtgtattttgagagtgaaggagtgatttctatttataggctgcttatggcgattgttaagtcggtaatcaagtgcaaccgcctttgagaagaaatcatgagttgccacgtggaggatggagatgagaggtggcgatggtgttggtttgagtgacccatgcatgggccccatctctctctaccacctttctccaaggattgacatgtgggcctctaaggaggtgcacggtggtttggcctcactttaagtcggtttgagctgacttatggggcatcaatccatgtgctcacacatgattcaccggagatgtgtttctttgtatgccggtttatttctccttcactttattgtacaattactgcatccgtagtaattctccgagacaagtgaaactacattatttacaactaatattcatgtaagaaatattagttctccttttattatttgaggaaattgatggttgaaatcggtacttaataaccgtcaatgtaaactattattaacagtaatagtaaaagattacaccatactagacttattttttagccacacgtagcatggtacgtactagattcgttttaaaataaagctatttttaagtatagtactttgtcgtaaaaaagaagaaattttctagcccagtctctcatctaaaccaatgataacattttctatttgatttcttcattcactctcttttcttaatcattcaatcacaatcttactctaaccattaagacctatatttctaatagttatgtttatattaaaatacctatattttagaatattttagaacaaaggtagtagtgagagggattgttgcagcacgcatggaattatttttttctcatcccgacatggctgcgttgcctctcgtttggatggatccgctagggaaagtgtgaccggcgtgtgtggtgcatcccacgatgatggagctagccatgccagttgcttccctaccttgtcaccgtcagaaaaggtgtgtggttcgagctatacgactaattaactgaagtactgtaacaattataggttaccctggtgatcactcgatcagatctactagatcacaccacacgtccgcacccggtcgattctttaactgtgtagaggtctccgacatgtcggtgggaacaactgaccacatcgatcgatccccggccagtcggtcagagatcagtttcagcatcttatcatggtgtgtaatcagtgttatggaaacggaatacggatgtcggatgaagaagatactgacaaacgattaatagaaatacggatgattaatcaaaatttgacgaaaattcaatgtttgtgaatatgtaaatattgttatgcatattatagactcatatattgggaattcactacatataatacgctagaattaattaggaaaaggtgaaaacgatgagagctactatatatatagatatagaaatctgactagtattagtattagtgcattggaaaaatattctataaagattacgaagagaaatttccgctccctgtcgtccacgcgggcgcagggagcgaaccctagtcccaaccgacaccatcctcccttcctctcccctgcctcactgccgctagaaaccgcgcggccgctaggatggcagcgatagggctgaaaccccagcggtggcccattcttcggcgtgaggaggcggcacgcgcggcggatccaccgccgcgggatgtagccccctccccctgcccccgcggatggatctggtgctcctaccgccagatctgaccggagtgcactagcgacgacgtggacgatggcggagggacgacgactggaggcgctagcaatgggaggccgcgaggttattggcttgctgtggccggtaggaggcacaggagatgacgggaggagcgggtgacgactccagctgcccaacgggaggcgccgacgacaacagtggtcggctgatgggaggcgtgggcaacagcagcggttcaccggagggaggtgcgactggtgccggcggacgatggcgcgacacaacgaggagcggctggaggcggtggtggagctcctggtatcagcgcatgcgagcggcagtggtggttgcactctcggtagttgttgggggtggttgcggtcggtgaagcgatggccgatgtaggtcgcaccgggggctatgaggccaacccggcaacgggctaaccgctggtgcgcagcggtggagaagctgccgtgatgggaggacggaggcgacggtgatgcgactaggcagctggttgtgaacacgagcagcctggtcgaggcggcgacaatggtagcgccatgaggggtatgttgaagcctgcaacgagcttcctttccaatcgtttgtccttttgcagcgctggcttgccaccgtaagatggccacgctggacgggctagtgcagggcagaggggatccttctctctcaccattttctatctccaacccaacaacatggatggagttgaagcgcgatgggtgttgagattcttcttagatggctggccaacggtgaggtgtcggcgcagtggctgtgcatcgaaggtggattagcgggtggttttgctgaagctgacatgcactctttggcgcgggagagtataacaatgggtgaaggcctagccttcgggccggcaatggcgatgactgtgggcgcgttttccccttggggtgttgtcgtgttttctgtcctctcccatgggttcttcaggtgaaaactgttaacggtcgttatcaatcagtttcgaccgtcaatattaccaaaacaggagagaactagtgatgcttgcaatgcataaatatgttagaataataatattccactagtacaggtctactgaccttttgcaaagaatgatcataaagtggaggagaatcgacatcaacaccaacgataaatcaatcagacgatgtcgaggatcagacttatgtatgaatgggccaagaacacagaattgacacgatgaattgggccaaaattcacaagtctgcggagtggagcaatagaggaggccaccagccgaaattgggctggattgggccagccccgggttcggctgaacctggtggtttggccgaaccaatcctggcgccgttggatccaggttttggcgtggacgtccaggattgcatcccaatgacggttggagggtacttcggacaattccccttccacaaccgccatacctacctctatataaggagctcactctcttcacttcaacacacacctcaagcaagagctctctcattcctcttaagtttagtttagtagtatctagctgggggaatagaattagaataggaatcaggagtccggaagtcttcgaaagagttcaggtatggctctagtagctttcctttcctctttttgaagctttgtacttttattagaatactcttctaaatacatttctggtattgaaatactttccgagtatatgagtaccaactttacattatgttcttgttatactgaatatacggctagtttatctgggagatgctttggtgcgggtataatgtttctttatgcaattactctttgtcatgacgatggtattagagtagtatctagtagtttaggcgtggtgtctagattacgggatatcattatttggggttatatattgcggatgagaggtgggccgctgatggtgacagcttagtacgggtattcctccgcgcctatatataatcctaagttaatttcctaggggggtattcctctgtatttagccccggttggatggccatgacgggctgtcgtaaggaactcggcagtcaggggtggtttctcgaagtaccaggagagcatcggatatagggtattagctagtatatcaattaactagaatgtatgtatactatgtatattagaagtataggaattgattctctttctcttttctttccacctagcttagattatttattataaggatgagtagaaatgcttgtgtgccattcctcccttggattattttaacccctgcttagaatatgattatcacatgtaatatataaattattagttgagttctctctacatgatcttcccatgggataaaataaatatgatacccttggaatactctcgggtgaaatgctacaatggtatatccgtgcgcttgcggatgaactctgtaaccataatataccagaagtatttctgcgccattgctgggaattatatttctagtaatgtcgttaagaaataccaacaaaaaccacgtcctggatctctaggacaggcggtgacgaagctattggcatcgtttcctccttggaggcgtcgtttagaagacttatttcttaggggtattgtgtgcttgtcctgtatttagcagtaagatcagacatagacgagtggtgtggatgcatattttcttttttcttactatagtcttccaagattatagacttgtgttttattcctactttattaatataaatgtcgcactatcttgtatgggttgttttaaaaaaatatatatggattatcttctgttcttctatttgagtggattgtctatacatttgtcaacaaattttcttctaaaattttgtcagatgtaaatatagtataacaatactataattacattctaactaacttacatgtaataactacagtgtaataactttcgcgtaattttgaaatcgttagatttgctttaagattggtgcaagctgagaagatatataaaagtcgcaacgcacacaagtgaggggatttggtctcgtgacctccgcttcatgaaaatagcaatgttatcgtaagatttttgaaagttgcatacaaattatactgtgttatatgcaagttacaatgtacgtaattacactaccattacactatatttacatttgtaaaaaaatttggagaatttgttgataaatgtatagcaaaactgctatttgagatatacatgaaacatcaaaatgaattttgagatcaagaaaatatggtagattggatttgaaagaggattagatggaaagaactaaccctaacaggttgcagcgacatcagaggaatttagaagggtaatcaacaacgtactggtacagctagcctttatactagaggacaacaaatatgctgggatagtcgttgtgggttggttcggccttttgatcaggccgattagacggaagcggccggggagattatcggaggtgacgggaattttacgttctggaatgattaacgaaggacgccgttttgcaaaaacgtgaccggcttatcaccatcaacgtttcaatggctgtatcaagcgttttccacaacactgtatgtaatcagtgggagtacgttttagacgtgctggtgctaccgaaattgcgactgctaccatcccggctgtacgtctttgatagtcatctttaattcaatttatagcccgtatgtctacgtcgtaattaattcatgaaaatcgatcggtttttttgaaccatgagctttcgatccaggcacatggaaatataaaaggaaaggatccggtcgatcgaagttttcgatataacttcatgtcgttcatgtgaatatataatcataaatcacgtacagcaaagtcctttcataaatttatgtcatgataactgcacataaggtgtagtttagacatgcaaaactttagtatacaaatagattgccatttttgtttgctttattattttaacaccctgattttatctaaatgtatttatagttacatggatcatatttttgtgtgctcagtgttttttttattactttagtgtaattgattgagttcaataaaagctttctaggtttctgaactgttacaatatatttttctggtctctgaacttatcatgagtgttatataggaccaaacgggctccaagccattctatacgctaacgcacacagacagtaatatctatcaaatgtgaacttctattttttttcccattagaggggatgccgtcatatatatttttagctctaaaatacaatacaaatagtattgaaaatctgtaaaaatttatagatagtattaacatctaccactcgaaaaaaataaagtctaagaagggccaatctacaacatcagaacctaaaagataagcgaacttttaccattcttgagaaggtaccaccactccacccggtgctagataccaagaagtaccttttagggcattggcaccgaatgcggtgatgagctggcataaggccagatttgaggcgtctcaattcattcttgatttgcagccgcggcgaggtacacttgaggctgtggtggataaaccgatagaagcaagggtatatgcgaaagttcaattttaccctctcacccacaacacctcctctctcgggagagcagtaccacccggtacaaagcaattctagctcttagattgtacgagatggatggtctagattagtaccatctccactcaaggatgataaaaactctcaaaagataaatacattacatgtacttggtcgtatcattttcatttctcaatgtgcgcattgatttaatttaggcttccatttttagatagtagatacgtactccctccgttttttaatagatgacgccgttgacttttgaacatatatttgaccattcgttttattaaaaaattatatacaaatgtataagatataaattatgcttaaagtactttgagtgataaaacaactcacaacaaaataaattataattatgggtttttttaataaaacgaatggtcaaacgtgtgaaaaaaaagtatattgtatcgatgatcaattttgaaaaaaagaagattgtaactatatatttagatctacttttagaaaatgaaagaacgaattaaccacgtagtgtggtccattaatctgcaccatctaggcatctattggtcctctccagtctccaggactcagctaggaaggaaagaacagagccagatacccagcaaacaggaggcaacaaaacaatttgctggagtacgagtcattcggccacaagcccacaacatgacgctagggccactaattcaccccgtgaccgtcctagagcaatgccatgtctcgccatctccggcgccggcggccggccagccacggtcgctgccgctcacgttcttcgacctcgtcttcttggacttcccgcccgtgcagcgcctcttcttctacgacaacgccgacctccgcgacgcccatgacttcctcctccgcgagcttcccctcttcagggagtccctggccgctgccctgcaccatttctaccccttggtcgggaagctgccgtgcgggatacgggagcgcatgtcgccgccggaggtcgcgtactcggatggctactccgtctgcctgaccgtcgccgtcagcagcgacgacttccaggacctcgccggcgaccacccgcgcgacaccgcgaggctacgcccgctgctgcctccgctgcccaagcatggtagctcgcaggacgtgctcgccgtccaggtcaccgtgttccctcgcgccggcatctgcgtcggcacgacgctgcaccacgccgtggccgacggttcaagatacgtgcactacatcaagacgtgggcccgcattcaccccctcggcgacgagcgcaggaaagcggtggtggtggaccacacgccgccgctgttcgaccgtggcgtcgtgcaggacggcgacggactccggaggccgtttatccgcgaccaccgggatctcgtggagtccggtgacaagcggctcgacgactgggacctcagccggaggccggacaccgtgctcgcgacgttcaggttcacggacgagctgctccgcaagctgggaggacatgtcgagcaggagacctcggcgcggtgctcgccatacgcgctggcgtcaggcnccgcgtggcacggcatcgtgcgcgcgcgaggcgtggcagcagacgacgtcgcgcggttcgggttcgtgaccgggtgcaagccccgcgtgagcccgccgataccgtcgagctacttcggcaactgcctgggggctgtgcttcgtgaaggccaagcgaagacacctcaccgcggcaagcgcatcggcggccatctggcgcgtgatcgcggggctcgccgagcaggggcgggcgctccgtgacgcccacggctgggtgcccggcgcgcgggagtacgcgccggcgcgcgcggttacggtggcgggttcaccgaagctgggcgtgtacgcgacggcggatctcggcgcgacgtgggggggtcggccccggaaggtgcagatagcgtcggtggagcggacgggcgcgctggcgctggcgaagagcggccgccgtggcgaccgggacggcggcggcatcgaggtcggggtggcgctgccgcgcgcggagatgcaggcgttccgcgcgttccacgtcgagctggtccggctgctagacgccactacccactagtgctgagtggtgacgcggcctcccccttgccgccagtgtaaaaaaatcgtgccattattccctctgcttcggtgtttctggaactgggaccattttgggaagcagaggtacggaaggtcctttgccttctgctgtttctgtttgccagttgccatgtgtccgtagtagactagtagtacggttcgtctactccctccgttattaaaaaaacaaatcatgagttttcgtgtccaacgtttgactgtttatcttatataaatttttttataattagtattttcattattgttagatgataaaacatgattaatactttatacgtgactgtctttttaatttttttcttaattttttacaaataagacggacgatcaaacactggacacggaaacctagagtttgtctttttttttggacggaagaagtattactctactactccattagtcccataatataatgtaggaacttaataccggatgtgatatttcatagtataatgaatctagacaccctcctgtccagatttgttgtactataaaatatcccatccggtattagattgctatattatgagacggaaggagtactagttactcccgttctagaatatattttaaagacctgcttgggagcaatcaaaaaaatattgacttgtaattttatttcgcccgtaattgtcgggcaccaaaaataaagtgaaattaaaacccgtgcattcatggtgtttgggaaggaacatcaagaagttcgaattctgatttgacgaaatagggtatcttacgaattcaatcaatggatcaaatcagcatgaccaatcgaggaatcaaatctgaacaaacaatttagaccaaaacatcaaacagaaatcgattggaaaaaaacaacaaaattgatccgatcctgaataaaaatgagctgttcgtgcattattcatcaaacagttccgagcacaacatgaaagagaaaaacaacagagagattgatgagaaatattggccaaaattatcaaaacgatatacactgatctcttctcactacccccaacgagaaatttagaagaagcagaagctgtactcagattgaaagctgtacttaacgagaaatcaaatcaagggcctctttgaagagtttctggcagctgtagctttttccgaaatcagaagctcatcaaaacagtttagcttttcgtttagattctaagaaactgtagttgttgaatccagaaaataaactagagttaggaaactcagttttttcatattctcaaaatctggctatgaacggaggtatttttataagacccaagactacatctagaagtaggtcgtttcaatttggagagagctgatgccaacagcatgcactgaggttgcgatgacgccagaaactgtgaagatgtcggtcgcatgtgagggtgagacggtgccggaaatgcagatcaacagtaggggctgatctacagtagaatggtcggtgtcaggcgacactgacgactttcggcaaaatctatagcaaaactgtttatctatatgttataacaccatgatctaaatataattagcatactgtgacaccgatagatatgttatgataccaattctctgatccgccactgatcggcagtcgagaagatgttgtagatgcagatcgagactgacaccatgacgagaagaggaggccaacgacctggacggattccggccgacccactgggcaaggtcgtagcggcggtgcatggagacggagctaagttcacggtggcggcgcgtggagccggagttgagttcacggggacaacatgtggagctaggtggagcggactgcggagtacggctgaagctgagaacaagcccgactttcgtcgttttctagtgtgattgataggagataatctatttcccggtgtaatgggcctctacgaacgaatttcaatctgacatccggcccatccaagcgcgcaatttcagtccggctcaacaaattttatgggcctgtgaattacacctgttttggaccaaatacaagccttccaaggaggttctaacttcaaccttcaaaatatatttttttctcaatcgatcacaatatttttatcattcaaattccacagttagatttttcttctcaactaatcataacattcttctatttaattccttcaactttcttgatactcatatggaacctaaaactcgtatatgttttggaaggtatttgaaggcggaggaaggtgacgaggagcggatgctacgaggtaggtttgggagaaatcgaaacgcaagtggagattggatagatacttgagctagagagatcagcaaaatggtcgggaagaagaatacagactctagagtaagagcggggatggccatccaaactactcccctccgtttcacaatgtaagtcattctagcatttttcacattcatattaatgttaatgaatctagacatatatatctatctagaatcattaatatcaatacgaatgtgggaaatactagaatgacttacattatgaaatggaggaaggagttgggtttgctcaggtgcacaactaacagcattatcaatatttcgttcaaccaaatatgtttcttaggccttttttagaacgcaagaatttcatagacattttatagtatttttcacgagaacaattcagttccccggaattcacaaacaaaaggctcaccttcggaaggtggccttgaccattaaaaattttaacgttcaaaacagtaagtttacctgcagcaagctttgtagttacagtgtctcaatttcaataagtttaccaggccacgatttctcctctcagggcccacaggaaacaaacggcaagatctaaaaccctacaatctaagttgccttagcattactacatgtactggcggtagttatcatatcaacttaacaactttagggtttttgaaatttgccatgcacccaaacccgttgcatcttcttccccttttttctattcactgatatgacacaacaataccccagttccaactgcacaatgataggcaaatgcaagtcaatggtttcataagttacagacatacaaggaaactggaccaaagcaccaagatgacacaaactgaaatttttacatttttggtccttttttaaaacttattttacaaatggccccttgaaaaacttattacaggaatgatcctttctggtgcaccagagtggctggcgccgtatttcaacatggcggcgccagccaccctggcgccgtgaccgtgccaccgtggcacaaaggcgagcgtggaagggtgacctggcaaaggggg

SEQ ID NO: 4999 - DNA, 1105 bp, Oryza sativa
caatgtcttagaggtaaaaattatttaaccactttgcataacttgacttatgcctaccaaacttctatttttttaattcaaaaggttcgccaaaggtgccgcaaacttgctgcaagattaggttacaggtcggttggattggacaacgtgtaccaaccgcgaagagtaccaccaccactacctcaatcggtgtgtccaagtactgctcgacactccatcaggatagaagagcgtgaacaagttggtggttcgtcgtcgtcacgcattccacaggaaaggggaaagggaaaggcacaggctccacctagcggcgacgacgaggagaaggaggagaaggagaatgagggctacatcgcaccagacgccgaggagataggcatgtcgcagtctccgatgcacctcatgcatcacagcccacccaatacaacttgtgatccactcggccagcgaaaaagaggtaaaatgagcttaccattctcaagtgttacttgatttccctcactttgttttttaaatgttttaaactttggtttttcaaatgtagatatactcagggcttgcaagctattcggcgccaacggaaaaagtgatttctatgaagttgatctatgtgtcatgtgttaacttgtttcacggacttttggatttgttggttgtatgaagtatgtgatggacttgtagtattgtttgatgtgtggaatgtgtgatggagttgtggacttttttcgtcaatctagttagcttgtggactatgcgatatgtgatttggtgtcaatatttgctgtggaacctgttttgtcgatatttgcattttttgcagactgtccaatgaaatttgttgttggcagggaggtagaggtcggcgccagctaccctgacgtcgtgctgggggggcaacaccagcaaatcggccgaggcagaaagcctcaggggtgggagggttgctggcaccgtgctatggggggcggcaccagccacccgctcgaggcagaaggtctacgggttgggggggacggcgccaagcacgcttgcgccgtgcttcggggggctgcaccagcaattcggccgaggcagaaggcctcgagggtgggaaggggggaggggc

SEQ ID NO: 5000 - DNA, 2380 bp, Oryza sativa
cgattcgtcctgtgtttgcatggcgtccatgctctgtgatcctacctgccccgttgaggcgcagctgctacggtttcctgacgggctcaccattgcaggaggaatggtcggctggggatcatgggaccgatgtgcggccatgcgttcatcaaccttccttgccacctcctcttgcatgttgagttcgtagctcgatacccggaactctaggtctgcaatctttgcctcggtatctctcttgctcctcatccgactcctgtacgtgtggatgtcctccttgaaaccaatcttccaaggaatcacccctttccctcgagttcgtcctggatgctctggagtctgcagggcgagtgtcagctcgtccctatctctgtctggtcggaacgtgccctgagaggaggcttccactgcatctgttagttgtcgcgcagcctcttgtatcttatagccgaagaccagtgagccatcagctgggttgagcgttccaccgtgagcatagtaccagaacttcgatcgttccggccaattggctgttgccggttcgatacccctctcaatcaagctagcctccatctgctcccacttcggcatcgcgacgctatagcctcctgaccccaagtggtgatggtacttcttcttggcggcattttctttgtttctttccatcatcgcctgcccttgttcacctgtcttatatcaacaaacctcgtcccagtaatccctaagtttgggaatgtgtcgaacttcggtgtctgccccttcagtataaacttctgggacagatctcctttaaagctctgaaactgttctgccattttcttcagagtccaccttttcactttgtcctctgtacccgcagaaagggtgaatgtctcgagcattgtggtccacagcatctctttctccgaatctgggacaaagctctcatgatctccgcttgcccttgttcttcgccagtacaccgtactgacaggcacgttatcccgcacaacccaaccgctgtgacgtacatagttcttggcggcttcggccggggcactaggacgtccatcttcttccacttccgttatgatgtgccgaccctcaagcttcttcgctgcacctcgttgcccgcgtgccctcttctgtccaatggagggttgactaccactagcctcctcctcctggttcccctccacatccctttccacgtgcccctgttggttcccctccgcatccctctccacgttcccttcctcgttcaagtactggtttggatcctcgttcccctcttcttcattccagtactggctgcttccctccgcgattgtatcgtacaatatctgttcctcatcacggtcagccatctgttgatacaagaaacatctgttaagtcacgagacatttatgttttaacaatctaagtcatgtatgctaagtgtaaatgttgtacattagaaccctacacaaccttacgtgctaagtctaattacaaatcgtgatataagctaagtctaggtgacgtatattatacaaccctagctagtaaataattatatactaagtctaattacaaataaaataatcttatattaaaactcaaataatattacatgctaagactaaaatagtcatgtatatgctaagtgtttcgtgcgtatatgctaagtctaattaagactacaatagtcaattgctacttgtcgcaccaattccgtagtcaataattacataccaagtctaattacaaataaagtaatattatattaaaactcaaataatattacatgctaagactaaaatagtaatgtatgctaagtgtttcgtgcgtatatgctaagtctaattaagactacaatagtcaattcctaggagtcgcaccaattccgtagtcaataatgtcatactaagtctaatttgcaataaaataatcttatattaaaactcaaataatattagaacactacacaatcttatatgataagtctaattacaggtctaataatcttaattaattgcattacaaatataacaatcatttatattattacgtcacttgcctgctccaattccttctagggctagctcttccactcaggcttgacggacgactccgacaacacgtcttttctgcaagataaaaaaaatgtattaggataaatgcgaagtaacatatatatatatatatatatatatacatatatatacatgtatatacatatatatacatgtatatatatatatacatgtatatatatatatatatatatatatattgcatttcacgttaacgttcgtcctcgttcgttcgctcgttgacgttccctagctcgttcacgttcgttcgctcgttctcattcacgttcgttcgcttgttctcattcacgttcgttccctcgtt

SEQ ID NO: 5001 - DNA, 1308 bp, Oryza sativa
ggcgaattcgagctcggtacccccatatgtgcaattccgaagcattgccaaacaaaggtctcgtcttctatccttgcccatccaagtcttctcgtaccaactcagtcttacttgcaccccctcaacgacgagaagaatatgtcacaaaattattcttaatgtaatgaggagacttgtttaggtgaagaacttctttcactcgtgaccttagcttccacctctccagtggtgagtggtgagatgaccatcactcttcaagatgtggctatgatcttggccctcccaatacagggacatggggtgacgggcaagacagagaatcctggatggcgtgcacaagtggagcagttgtttggcattgcactcaacattgagcagggataagggagcaagaagaagcataacggaatacccgtctcttggcttagccagaacttttcagacctggacgacgacgttgagccatggcgtgttgagtgctatgcccgtgtatacatcttgcacttattgggaggggttctttttctagatgctgggggtgacattgcttcggcaatttggatttctttggtcactaaccttgatgatctgggccgttttagttggggctcagcggtgttggcatggacttatagacagctcttcgaggcctgttgtcgccaggcaccatcatccaacattagtggttgtgtgctggtgattcagatgtggatgtggctaagactaccggttggcaggcctaagtggaggcaaagctttaccctttggccctacaatgagccagacatggagaagacagtggcctacctatttgagagtatagccactgcacatgctcaccgggacgtcgcatacaagcagtacatcaacgtgatggactgcctacagcctacacatataagtacttccactatcacttctaattcgtcatttacttatatgattgaaatactaacctacgacaactcttcaacatttatagattgagtggttaccataccacaccactgaggctacaagtcttacactgatctcgttgtgcaatcgaggctccgattacttcatgtaccagtgccaattgatttgtttctgggcagttgagtaccaccttccgtaccatgtcatgcgatagtttgggaagagacaagaatgtcttgttaaggacatctcaactagagttgatctacacaagtaatattttttatctctgcttgctttcattgtcaatgttcaattttgcaccatttgacccttatttgacacatcatcaccttccatttgtcaaggtacgacagggtgagaacaaag

SEQ ID NO: 5002 - DNA, 8242 bp, Oryza sativa
aagaaccaggactaaagattatagccctgcatattattttcgcttacatatgtgtttctaaaatagaagttaatgcattaacattatttaaagtacaaagattaatgacaattaggccgaaaaattatttgtgtctgtaataaattaagtggataaatcgtaataagcaaatatatgacttaaaattaataaaaattccaataatcatatatacttagcatatgaatgatattattaaattggtaaaaactctaattaagatatgtatgtacatactgcatgatttaaaattaataaaaattgtaattatcatatatacttagcgtaggaattatattaaattaaatgttaaaaactctaattaacatatgtaaatgccacatgcatgatttaaaccttttaaaaattcgaatagtcatatataagtagcatatgaaagatagtaaattaaattgtgaaaaactctaattaacatctataaatgccacatgaatgatttaatacttttaaaaattctctagtcaattataattagcatatgaatgatagtcaattaaatgtagcatatgaatgatagtaaattatgccatacatcaattgatttatatggataatcaatacatccaaaatagtttacatcgtgtacacaataattacggcattacatcgccggtgacggttgactgcacataccttttcctcactattgttccctccttgtgatcgctgcgtgagtaaggggtgtcttcatttgataggaggatgctagggtcaatcgtcaccgtgaaagggggttgcccatccaactgatcgtaatcctcgtcagtcttgtcctcaactccgacgatttttcttttgactggtagaaccacttgacgttaggctcgtcaggccctctgcccttctttcctttgatagacatgtccttcacgaaaaagacttgcgttacatcattggcaaggacaaaaggttcgtccgagtatccaaccttgttaaggtcaacagttgtcataccactgtcatcaatcattacgcctccaccagtcaacctaacccattggcaccggaacagaggaaccttgagaggaccatagtcaagttcccatatatcctcgatggcaccgtaatacgtggcagttgttccatcgtgtcccatggcatcgacacgaacaacgctgttttggttcgtgctcttcatgtcttgggctctcgtgtagaatgtgtacccattgatctcatatccctggaatgtcgcgattgacccagacggtcccctcgccaggaaggcaagttgttggttgatctccggcgtgcccatgagatgttgtcgtagccacgtggggaaagtatcaatgtgatgccgtgtaatccatgcatcggacttaccgatgttcctggcgcgaactagagccaagtgctcctcgatgtaaggagctaccaatgaagagtgttgcagaacagtgaaatgggctttacggaataaattgttgtctatcgtcattattactttccttccaagagttccctttccccgtagtctcccttcatggcgtgattcaggtacctcgattgggcgaaggtcttcgataaattctacgcaaaattcaatgacctcctctgttccataacccttggcgatgcttgcctctggacgagcacggttacgaacatacttttttagaacgcccatgtacctctcgaaaggaaacatgttgtgtaggtacataggcccgagaatacggatctctttcacaaggtgacaaagcagatgcgtcattatattgaaaaatgaaggtggaaatatcaactcaaaactgatgagacattgcaccacttcattctgaagggcttctaatctatccggatcgatgaccttctacgaaattctgttcatgaatgcacatagctttgttattgttgcccggacattgtctggaatgataccccttattacaactggtagcagttgtgtcatcaacacgtgatagtcatgagactttaggtttgtgaacttcttctccttcgtgcttattattcgcttgatattcgtggagtatccagacggtacctttatgctctccaagcattcaaacatactttccttctctgccttgctaagagtgtagctggttggactcaagtaatggcttcctttctcctttggttccgggtgaaggtcgccgcgttgttccatatgcttcagatcattacgtgcttccagtgtatctttcgactttccgtatacacctaggaagccaagaaggtttacgcaaaggttcttagtgaggtgcatcatgtcgattgcgtggcgtacgtccaagaattcccaatatggtaactcccaaaatatagagttctttttccacatcgccgcgtgaccatcttcgctctctataggctggcttccaagcccctttccgaacactactttaagatctttaaccatagcaaacactgttttcccgctgcgatgtttaggcttcgtacggtggtcggccttatgttcgaagtgcttgcctttcttccgtaccgggtggtttgctgcaaggaatcgacaatgacccatgtatacaaccttcctacagtgcttaagatacgtactttctgtttcatccatacagtgagtgcaagccttgtaccccttgttggactgtccagataggttgctaagtgcaggccaatcgttgatggttacgaacagcagcgctcgtaggttaaactcctcctgtttgtcctcgtcccacacggggacaccttccttcttccacaactgtttaagatcttcgaccagtggtcttaggtacacatcgatgtcgttaccaggttgcttggggccttgaataataatcggcatcattatgtacttcctcttcatgtatagccaggggggaggttgtagatacacatcgtaatgggccaagtgctatggccgctgctcatctctccaaaaggattcatgccattcgtactcaaaccaaaccgtatgtttcgggcgtcctttcctaattctttaaattttctgtcgatgtttcgccactgcgaaccatcggcggggtgtctcagcatcccgtcctgttgacgctcttcagcgtgccatcgcaacattctaacattccccttgttcctgaacaaacgccttagccgtggtattatagggaaataccacatcaccttagcaggaattctcttcttttgtagctgcccgtcaacttctcctggatcgtctcgtctaatcttgtatcgtagtgttttgcaaacaaggcatgcttctaggttctcatactcctcaccgcgatataggatacaatcgttcggacatgcgtgaatcttatgaacttccagtcctaacgggcagactatcttcttagcctcgtacgttgtctcgggcaatttgtttctccccggaagaatgttcttgacgagtttcaataaatcgccaaatgccttgtcactaacctcattttttgccttccattgcaagaactccagagtggtatccaactttttgtgcccctgctcgcaacctgggtacaacgaagttctgtggtcctccaacatcttgtccaatttatgggcctccttttcactttcgcagtcctccctggcgtcctgcaacatttgaccaagatcatccgcaacgtcgttaccatcagcagctatttcctcctcgcccgtttgattttcttcaaatccaacatactaagcaaagtccggaatattgtcgtcttccacttcatcttcttccatttcaacaccttgctctccgtgggatgtccaacaattatagcttggcatgaaccccgactcaaacaagtggaaatgaatagttctggatgcagaatactccttctgattcttacacttattgcatggacaacaaataaaacccctttgcctgttagcttcggtcactctcaaaaaatagtgcacgccgtcaataaactctttggaccgccggtcagcgtacatccattgccgatccatctacatgagtcaaaaaaaaccgtacacaaataattattcttacaataatgacagtcatacaataattataagatatctttattcatacaaaatcataaaatattacaccaaataattcttaaaaactatttgtaaagttttaaactaattttaatgtgttttacttcttttaattttcattttagtttgttttctattatttaagattaactttcactagagttttccttctcaactattttataaaaccttgtttagcaaatgaactaaatttctatatattctttcttccccacacacattttctctctcatcaacatacaactaaattttggagacaaaaaaagtgtgcaaaacataggtgcaaatgtagtatgacaaaaaaaacattggaggatgaagttgcaaaccttttaggcacctccgatttgcatgtaatcaccaaaataaattcaatagaaattttggcatgacctcccctcttttttgaagaaattttgaagcttgctcgggcagctggaggaggaagaagacatatatataggggtgggactttagtcccggttggtagcaccaaccggggctaaagatcaccgggatctttagccccggttggtaataccaaccgggactaagatctttagccccggttggtaataccaaccgggactaaagttacgatctttagtcccggttggtaataccaaccattaccaaccgggactaaagatcctagaggggcctgacatgccctgacagcattcgaaccgggactaaagatgatccttagtcccggttggtgtgttaccaaccaggactaaagatcaaatatgcccgttacccttttgaaccgggactaaagatcatctttagccccggtttttattgcatccgggactattgtggaaatcgggcgaccgacgaaagatggtttctccaccagtgattatatgcatatctagattgtatattctaatcgtctagtgttgatgtgtttgtacttcatatatgcatatggttctaggcgacaaagtctaactacaatggattacgcaactgcatgtaaacatatatattactaatgtcaaagagaaaatagccaaaatattcaatgattgaagtgtgactccaagagcaatgaacccgggcttgtttgatcaactatttttcacttactaattcgaggaggacgcaatcaacttatgaaagttattttaagagcttgctctcgtctaataaacgaagatagttatgttttggagcctatatataatatcggaatatgtatatatgtagtgttgcatgcgtacggtctagccgtctaggcggctaggcctacaccagtacgtacaacacggcagtcaaacaagcatattatagtcccgataataaaatactactccttccatctgatgaagatttcatttttcagttttcgaaatgaatcttcgtcttatttaaaaaatttctatgattagtactttaattgtcataaataatattttacgcgcgactaatttgtttaaaaaattcaaatatgacgaacggtcaaacgagtactactggagagatgcacatctctcccggtttgtaaccccctttatttctaggtaacgaactgtgagaaagaatctgggaataaagatcgtcatctttagtcccggttaaaatacctagtactaaagatgaatccttagtccctgttggagtcaccaaccgggagtaaaaataaaagcaccacatggagctttctctttctcttttctttttttatttttttttgcttctttcatattgatttcgcaccgaactcaacaacaaattcatccacagacaaaatcattcaacatcacagattcatttgcaacttcatagaaacatctaaaaatcatccataaatttacatcacaaaatcaaccacaaattcacaaaaacatctaaaaatcactcacaaatttacatcacagaattatctccaaaatcatcccagaatcatcacaaagtcatcgcctccggattgcccgccgcttgccacctctcctctgtgtacgccgcctgcggccgcctcccatccgcgccacctccaccgccgcgcggggccgccgcccgctcccgcgcgcaggccgccgcctccctccgccgccgctagccatggccggcacgctgccgccagccacagccatgagcgcctgccgccgctcaccccgccgggcacggccccgccgccgctggccgcctgcctgccatcgtcggccgccaaaattattatttattttcattggaccagattttgttctgttcataaaaatatttttattttgtatagattgtaaatggcttaaaaataataattataattttcactggttacctaggaaaagtatttagtacaaatataaaaaaatataataatgataataacaatataggaccaaacataatattattcggaattaaataaaactgtacttaatcataaaattatattttatttcaaattggaaaaattttatctaggatttgaatatcttggacaattataagcctttcaaaatttaaaaatcatatatacacaagggctccaaaactattttagatttttacaattatgaaattagttcaacaaattatagcacaattcttagtttactattagagtatttaggaactaaataaatcttaactataatcaataatacttatttgtttaacaaaagatgacaaatgcaatttttatttgccaatatatttttttgtgcttgtataaaaattttattacgaaatctccaagattgaataaggattttttttatgaaattgtttaaaatagtttaataaggtgccgcctacgaagatgaattttgcagccggacgatataacgcgccgcctgtaaaattgcatcttcgcaggcggatgacctagtccgcgcgggaaggccgatttcggccgtttgcaaaaatatttctagtagtataaaattgagtaagatatatatagaattcaggaaatgaattagtagccatcaagactcatactcatcaactaatggtgcacttatcatattaataaggcatggatgatattattaaactcccacttctttgttgtcgaattaagccaggaaacacattcccgtccgtacatctgcagttagaagtaaaaaattacaaaaatctggccagttatttcattttaaagtgtcaagttgatgaaattaactactcaggttttggtaattttagccagcgtatgtgttgatcttatgagcctaacgtaaaaacaaggtaattaagtaccgtataattaattaggtattaactatttgttagtgcactaattaaaatagtatgccatgcgtggctttatatgtaattatgtatacgtgagttatatttgtgattccgtaataccgtccaatggcgtaagcaatgatgaatatatgcattagataatcaagtacatacagtacaatatatgtaagatacagatggtggcaatataatatatatgcagcaatttttgttatattctactctctagaatatatccgaaatttggctggcctaccatacatgcacgcacatcactaattcattaatcttcaaaagtctccaacaaaaagaacttaaaattatcaaattaagcttgtttgtatttatattctgcgtgcaagtacggcaaggccggtgcaaggaaagcgatgtgatattgtacggtacgagtacgacatcagtgacagcataaccgagatgttatgtttctgatgaatgttcgaaagaaaataaaaatagtcaagttgcaccgatcgatttcaacaaataccaatatttttgtttgtatcagttttactcaactatcaaccgaggtttgttataatatattttggaatacatatatagcatccacatatatctatgcatacccctttaaaataccctaatagtgatgatgaaagataaatccgccactacccaccactatcgatcatatggatacttaaacatatggatacctaagtagtgtgataggtgaacttttaacccttccaaccacaaaccatcaaacaaggaaagtttattttataccactgtaaaaaatgatggcaagcctatagagttgaagctcttatccaccatttctccttagttcagtgatattaaatttcccctactttcatgtgtcaaataagaacgatatcttcgcacaatggcagggagctgaaaggctttcgttccagcctacatccgaattcatgta

SEQ ID NO: 5003 - DNA, 24610 bp, Oryza sativa
  unsure (1)..(24610): unsure at all n locations
cgctcggatcatcctgaccgagtggtccacccggggcggtaccccctggtactagaccctgtaggttcgcaacgtcaagcttcgcagatccctcatcgatggtggcagtgcctcagcatccttttcgccaagactctggacaacatgcagatccctcgcacggaattaaaaccgagtaatgcgccctttcacggagtcatcccagggctatctgctacaccacttggccagatcactcttccggttactttcggcactcgggagaacttccgcacagaaaacgtttgttttgaagttgctgatttcgagacagcgtctcatgccatactcggacgcccggcgttagccaagtttatggctgtcccgcactatacctacatgatgatgaagatgcctggtcctcgaggagtcatatccctgcggagcgacattaaataagccgtcacatgcgacaaggaaagctgcaagatggcccagacccgcgagatcaccctcgctcgagaagaaatccgactggctgcgtccacagcaagcgaaggagaagtgcctgcaaccaaggtgccaaagagcggagaaagcgacgccaagaccaagaaaattcctctagatccctctgatcctactaagactgctgtaataggcgctgagttagattgtaaataggaaagcgcgctcatcacctttcttcaaaataataaagatatctttgcgtggaaaccatctgatatgccaggtattcccagagaggtgattgagcactctttacatgttaaggaagacgctaaacctatcaagcaacaactccaccgtttcgcacaggataggaaggatgcgatcaaggaagaattgactaagctgttagcagcgggcttcatcaaagaagtccttcatcccgactggctggctaacccagtcctggttcggaagaagacggggcaatggcgcatgtgtgtcgattataccgacctcaacaagtctagtcccaaagacccttttgggttacctcgcattgaccaggtagttgactcaacggccggctgcgagctactcagtttttttggattgctactcaggatatcatcagatccgactaaaagaatcctactgcttgaagacttcattcattacgcccttcggggcctactgctacatcaccatgccctttggattaaagaacgcaggagcaacttatcaacgcatgatccagagatgtttttcaactcagatcggccgcaatgatgaagcttatgtggatgatgtaatcgtgaagaccaaacagaaggatgatttgatcgcggatctagaagagacctttgcaagcatccgcgccttcaggatgaaactaaaccctaaaaagtgcatcttcggagtaccgtcagggaagctgcttggatttatggtgtcccatagaggcatacaagccaacccggagaaaatcaacgccatcctcaacatgaaaccgccgagctcacaaaaagatgtccaaaagctgactggttgcatggcggcgcttagcaagtttgtttcgcgactcgacgagcgggggatgccctttttcaagctgttgaagaagacagancaatttcagtggggactcgaagcacataaagcctttgaagacttaaaaaaacttttcactactccaccagtcctagcttcaccacatccgcaagagccgctgttgttatacatgtcggcaacttcccaggttgtaagcacagtcctggtgttgagcgtgaagaagaaggccatgttcaaaaagtccaacgaccaatctacttcgttagcgaggttttggctaattccaagacaagatatcctcgggttcagaagctattatatggtgttttaattaccgtccggaaattatctcactacttctaaggtcactcggtcacggtggtcacatcgtttccactcggggatatacttcataatcgcgaagcaaatggatgaatcgcaaagtgggccttagaattgatgtctttagatatatccttcaagccgcgaacttcgatcaagtcccaagctttagccgaatttgtcgccgagtggactgagtgccaagaagacatgcccgaggagaagatggagtattggaccatgcattttgacaggtcgaagaggctttcaggcactggagccggggttgttttaatctccccgactggagaaaagattgagctacgtattgtggatacatttttccgcgtcccataacgtggcagaatatgagtcgctgcttcacggattaaggatcgcgatctccttgggcattcggcgtctgatagttcgtggagattctcagttggttgttgatcaagtcatgaaagagtggtcctgccttgatgataacatgaccgcttatcggcaggaggtacgtaagttggaagacaaattcgatagacttgaactcactcatgttcttcggcacaataacgaggcagccgacagactggctaattttggttcaaaacgagaagtagctccttccgacgtgttcgttgaacatctttacgaaccaaccgtgccaaggaaagaaacaattgaagccacggatactcaagacgtaagtatgattgaagccgactagagagagcccctcataagatttctgatcaaacaagaactcccccaagataaagatgaagccgagcggatttccaggcgcagcaaactctatgttattcatgagaccgagttgtacaagaaaagtccatcaggaatcctgcaacgctgtgtgtctttggaggagggaaggcaattgctaaaagatatacattcaggcatctgtggtaatcacgctgctgcacgaaccatcgttggcaaggcttatcggcagggttttttctagcccacagctgtgtccgacactgacaaaattgtgtgaacatgtgagggttgtcaatttttcgcccgacaaactcatttaccagctcaggagttgcaaaccatcctgttgtcttggccgtttgcggtttgggggcttgacatggtcggcccattcaaaaaggcagtcggtggttatactcacctctttgtggctgttgacaaattttccaagtggattgaagctaaaccggtcattacaatcatggcagacaaggctagagatttcttcatcaacattgtgcaccggtttggggtacctaatcgtatcatcactgataatggcacttaattcaccggcggagtatttaaagacttttgtgaagacttcggcattaaaatttgttatgcctccgtagcgcaccccatgagcaatggacaggtcgaacgtgccaatggtatggtacttcaaggaataaaagcgcgagttttcgaccgactgcatccttatgccggcaagtgggtagaacagctgtcgtccgtactttggtccctgcgcaccactcccagtcgagctacgggccagtcgccgtttttcctagtctatggagcagaagcaatgtttccgagtgaggtggaatttgaatctctacgatttcgcaacttcagcgaggagcgctacggagaagaccgagtagatgatatcaaccgactggaagaggcccgtgaagcagccttaattcagtcggctcggtacttgcaaggggtgcgtcattatcacaatcgcaatgttcgctcacgagcttttttagtcggcgacctagttctgagaaaaattcaaactacacgggatcggcacaagttatctcccttgtgggaaggaccgttcataatttctgaagtcactcggccaggttcttatcgactcaagcgtgaggacggtactcatatcgacaactcttggaatattgaacatcttcgtcgtttttatgcttaggcattacttttgtatcttcagctttgactgctaacatcaagcttttccttgagttatcagtcgggggctactataataataatggagtgtgacttttatcaattcaatttgcttacttgatttatcattgccttgtttgattttttggcttagtcaatgaggactgaaagttttttaacaacttttgtgggttttaggctcaaaaaggtttgacaaaaacttttaagaaatcgggagctaagtttgaaatatcaagcacaacataaattcatcagtattgtacaaattgtgcctccatcatcatcatcatcatcagaatcactgttacagtataatatcaatcagtatcagttttctcatcatcggaattattagatccagtcggccggaggtcgttgtcctggaatctctcaactacatcaatggctatcttgtcggcggctttctacgcatcgttgatgaggtcaagggcggcttcttcgctcgtcccgtctgcaaatccatcaatggtgtcaacatcaatcttcggttataaagacttggtcattgccaacgccaggcttgctcccatacttccggcctctttgatattcttaaagtatgtatccggagcgattctcagcttgtcgaagatttcggaagcatcaaatgtactcggaccattgttattgaagaacatggcttggacgagtggggtagcagcgttggcgacttcatccctagccccttcaagccttttgattttattgaccaagacatcgaattgagcctgagacttgattttgcgatctgcgtaaatagatttatatcaacgagtaggcataaagataagaggtattagtcaccagtaccttcaacatctttcagagccgaatccctctgtttcgccaatttggccttgtcattctccagagtttggatccgcttttctagttcagatatcttggcggcttgcactgtattgcttcttgattaattgatattacaaggatggcagcataagtaagttagacatagattgtatttaccttttgacgaaccgctcagttcaaagttggattcttgaagctcggcgatccgatccctcagatcatgctcagttttcctggcaagctccttagccttgtgcagctggtttctggtggtctcaagggttccaagatgaggaactaaattctcaagagtcgcggtcttcgcctcgttcctgagatggattctctgcaatgcgaatttatcggcatttgagcaaagtgggaaacaggatagttgaagctatgtataaggagacttatatttacgatgcgagtagcctggctgagtgcctttttcagcaagcatacttcctcatcttccttttgcttgtttatcacgattccctaaggttgcatatcatcgtcccaccatttgactaaaataggtggacgagaatcctcagctgactgtatccggaggacttcttcttcgtcgccgaccattgggccttaggcatttatgaataaaggtgaaacaattgaagaaagtctgtcagatcaaaatgggttcggaggatgtgtttacttgtgattatttccggtcggggacgagtaggcccttgtaatttaacaagagagccggaccctagatcgacgctggcatcctttttaggagggctgtcagcttgagtttctacttcaggaatatctttgtttggttctgtacccgactggtttccagtcgggggctcctgattagcaccaaccccagtttcggccgactggttcccagtcgggggctcgttgctgggttctacattgtcggtcgccggttgattgtcactcgggtgatcttctgcagtcgggtgatcttcttttgaagaacccgtctccatgtcagtcggttcagagtcttttccagaaagatctatgtcagatggcttcctacgagtttgagttatgctatcagtacaaatcggagcgtcgtttcgtcttccccgccgagactctcgccactttccccatttcccgctacagtgcaaaaccacaccggcggaagctagggttaacaaatccactccaatccatcctcctgagctccacaaaaaccctccacgcaaccaccgcaccgaatccccatccatttccagccatatctcggaccaaatcacaccatccagttcgtattcatgacggaagagagagaaagcttcgagagtcagtgggcgccctccgatgtaacagaggagaatttgaaagagatggtggcgcacggcgttcttctggcgaaggagatcattggatggcgtccagcattcggcgaagcattcccgacccccgacacacatgaagtcgtggtattttctcatttcttctatggcggattttctcttccaacctcgagattcttccgggggatttttgatttctatgggattagtttgcatcacttaaacccgaactccatagttcacatcgccaacttcatacacgcctgcgaagcttttttggacgtcaggccacattttgccttattccgtcgcatcttcttcctcaagccccaaccaaacaagagtaaaccatgcgtagttgggggggctggatttcaattgaggggaactctgagccaaaagtatttctccatgcccttcaaaacctcaaacaaaggctggcatgcaaattggttctatgtacaaaaccccgagcctgcactccccgagtactcctgtctccctccagtttatcaggactcttggaactcacttccaatgggagaggaagccgctcaggcgcttgccctgatggaccgtatgctgaagctgaaggagcaaggtctgcaaggagaacagatcacccggcattttatcaagagccggctagctccaattaaagagagatcctgtacagccttcaaatttgatggcaaacatgacaccaaccgtgaagatcctgaatctcttgaattcaaggttatgaaggaaagaatgtataaaatcttctcgaatgcaattgtagttagttattcgcacttgctgccagtggtgccatacaacgccttcaatccttctccaccggtatgtattcaaacatttcagcctttctcaaaagcatgcctttatctgctgttaagctaattgaaaactcgaaatgttatacccaggaattcgctttgatgaagtcggatcctccaattgctcaacgccgatcaccccgctggcgaactggtcaggcgagtggaggaccaaaaattcagtctgacactcaaacaaacacctcgaaatcaaccagtcagtcggactcccgcaagaggaaattggttctgagtgatgatgaaggcgataatgctagaaaatctggcaataaagaggtgaccgggaaacaaccaaggcaaaccaatccgaagaagaaaacatccagtcgtcccatgccgatttggtccgagatatggctggaaatggatggggattcggtgcggtggttgcgtggagggtttttgtggagctcaggaggatggattggagtggatttgttaacccttgcttccgccggtgtgcttgcttctgccggtggtggtttgcactgtagcgggaaatggggaaagtggcgagagtctcggcggggaagacgaaacgacgctccgattttggcgtttatttcgctagggtatcgggagtactaatgggcctaggcctaaacagtacttcagcccagttttgctatcagcgtgattaagttgtgatccatagggacttaggcatttgtttttgtttcgtcaacacttgctcacaacagtatagcccaatgctgttaaaatcctttttgacgcagttagataattctttggaattactacgatgcaaataaaaaggtgcataacataaaagtgttatactaattttgtaggcctttttaggctgcaaagattgtttgggttttcttgagatgactggttttaatacagtcatccactcggcatgttatatgcttattttgattatgtcatgagtcatagcctaggctatttagactcgtcttttatcagattttatgccacatttgataggtcttttgagagtttttactcggacttttatcatctgtgctgatttatgaacctttggagtgcttctcacttgggtttttctttatatttctttggcacattaaagcagtcggcggaggtttaccagatgctgcatatgcttggccttgagatatttatcctggaatcctttaaagggtgtcgaaggcatattttttggcctacgcctaatatgtctgcagcccatattttcaggtgtggcctatcacgttcttttagggacttaagcactttttgcttatgccaaagtgcgcgtgatcaagtgcccaataccttaaattcttttataccgcagttactcaactttttaggagttggtacaatgcatcttaaaaggtgtcaaacagtaaagctttacatagctggcctactgacttttttatatagtcaaggtgctgtttgggtttataaagcagttgattggatataatatcattgctttttgccacgtaagtgtgcatttttattaactaatattatggctttggctgattatatattgtggtcattttccaggcggttggtaaatcgtttacgagtttatttactcggatgttacaccacatatgccatatattttcaggtgtggtgaaatcatgtgtcttttagggacttaagcacatctgttaaagaagtgtgctcatggtgtatgcccaatactttggaaatttctttattcacaacatcaagctcttctttatagctgttttgctatgtgaatttccaaaaatgttgtcaactttaggttgcacgcatcatattctgcaaagcagtcggtatatcacttggatcatattatttgggggattcacactgcatatgctatatattgatatcaagtcacttggttgataacaattatcaaaaaccactcggttggttggattatttattccttgactatatgcttagtttgttcaactaaccatatagtcgagggctacacctaattaggtgcatctagtcgatgcacctgattttttctatttttcagcccttcacagtctttgattatattactcgggagatcaaaacagatgaagctaaagcactcggattgtcttttcggattatgagagaagattattccgtcgactgtaaaggtctcaggggctactgtggagattatggataccccattcctacacggcatgtatatccgactgggtatggggtgtcatgtatagatagaatatctttaaaaggactcgggttaattaccaaacttgtatgtcaaggaaatacccgggatcctagtcggttacgattgtattttatctgtaattacctattccgttagggatatggtttgtactttgtaatacggaccccttcccctatataaggaggggtccgggtgcctctaggggcacgattttctcccagatcatacgatcaataatacactcggcggatcaatccccggacaggagtagggtattacttcttgattaagaaggcctgaacctgtataaaatcccttgtctctgaacccatccacttttctagcttgatagccacccccttttagtattgccaaaatcttgtttcgacaaaaaggtaaagcttgttatagcggcttgcgttctcgggattagtgcttacatcttcatgacactctaatcctgtttatataaatcgtcgagttatcatatatgctatgtaatctaggtcgatcttgctacctaacctcagcggctagcctctatcatcgaaaacagtcgacatggttagatactgacttcgaattagattacatagtgcatctaccatcttcaaaaggttgccatcgacttgtttaaattttatgcttctttctatgtttaatgttgtatcagttaagtttgatccattaaagcattacctggaatcgtaatatctagcttgtttcatgactgctactagagatactattggggtttcagccgatcttgcctgatttagttgtctcgttacttatatgcttactcgacatactgaatctaccctttatattaagatctcttttgaatgaaatatattaaatttgttggtttattctaatgagtaacgagtggtatcggagtattagtcgatacgcattagatttaccctatcagctatgctatgaatatgtataatctttactccaaagcacttttaagcgcaagtaatttatactgtctcggcacactgcccgatctatcccaatcgcttagcttaaatatattcttgaaatatagattatatatcattgatatctacagccgatcgagtggatctaactcttttctcgttacttacttcattgccgatctgacctgcgttacatcggcttggtgctaaatgatatgtcatcggcagtccagccgatcggctatcgtttatggatttaactttggattctttgtttcttgttggttgcaggatcaaactaactagcacgccctgaacctgaaggcaaatctttggacctgcactagagtaaagcaaacctcgccagtgtgtgtttttcacatcaacaccttccaatccttgtacacatgtatgattagcaggaggttcattttatcgcatgtcgggtgcatttttatccgtaaatggcctgcatacgtatatttaccaaaactagtggaaggggcagtgatgtcgacgcataatgggcgtagctgccaacatgaatttgccgcgttgaacgacggacttgacgcatgcattgcgaacggcacgggtgcagccgcaactacaagccatagctcctttcctttcttcttcttcttcttcttcttccttctttcttctttcttccttctttcttttcttctctctccctccatggctgatgccaaaaagtggctcggtcggccaatgacagcgtgacgaccgatggctcgatgcacgaaggtgcactcgaccatgatgggatgagctcgcacgggcttgtgtctcgcgaacgacgaggccacaagacgagcgtggaggccgactgctagtgcgtgatggcttgctcttttgcctgtccctgtctggaacgatacgacacatcttgtgtggagataccccaatcggcttgcgccggcgactccaagtcgacagttgcggtgttcaccaggaacggcaaaaacaaaacgggatggagagagtatttcattttcgtaattagatcagcgaatgcaaaacggatctacgagttgtcatccttctatgtgaattagaaaaatgtgacggtgatgtcatagatctaattttacaaaatttcagtggcacccagccaatatcacgaatagtagtggtatttttctaatatagaaaatttacgatgatatggatccaatctatactttttataaagttaaagttatagtccactaagttcaacatgctaccacgccacatcattacccactaccaaaaattacatattcaacctcatgcaaatatacaacatcatttacaatttatttaattctacaaatcaacatgcaatcatatccagttatcacctctcacaaatctatctatcatttttatagtattaaacatatagttatcaatatgtttcacattaaaacgcaggtatcatctgtttgttttatgataagtactgataaactctgatgttttattattttttttcttttacttttagcttaattgtcgaaaaaaatattgagaaatacttagtaattttcgtggcaaaacgtgagaaatcatacagttaacccatccaaacagtccgtaaagcccgtaagaaaaatggcatatgagaatacacattcggggaggatatggcacagggttttaaaagaaaaaccatcaaattaactcaactcgccccaaattttcgaggggagattttttttttcctttttaacgtttttacacctcatcatcatcaggcctttcccttccctttctcctttctcgttgtgtgggttctttctaggccctaggacaagccaagaagcggcggaggggaagggaggaagagggcaccagccgcaccggccggcggaatggcggcgccgcccaaggcctggaaggcggagtacgccaagtccgggcggtcctcgtgcaagtcgtgcaggtcccccatcgggaaggaccagctccggctcggcaagatggtccaagccacgcagttcgacggattaatgcccgtccgtatcctttccctccacccgctcttctcgccgacgatctttctccgttcagttgatgaatcttgctttgatctttagggtctgggagggtagggttttggtgtggcaggcattttttcttgggggttttttgtaagttggggtggattctgagaattttctggattgatgggtgatcggttttcatcctgatttgcattgcgggtgtgggtcttgtggtcatctgccacaagaatcttctgctttcatgggtggttgggtttcatcttgatgtgcattgctaatgtgggttttgcggacatttgccataagaatcttctgctttggtgggtggttggttttaaatcttgatgcccgaacaaaatatgtttctgagggtaatttcgcatgattttgtggggtatgatcgaaccaatcttcttcgaatgcggagttcttgatgcatttggnttggtgctctgtcgatttgtcgatgatccgtcaattccagcattgggtttattgctgtttctaatccattatgccatctatatgtgtaacgcaagactagatagaggtgcttttgtgggcaccaactttgacatatgcaatttaactggtatttctcctaagttgtttgatatattaattattatgcggacctgccaattggttgtgctgttttaggcttttagcatggcaatggggcataccaatgacaatgttagtaatctagtgtgttcgctaatctgtttttgttcttatctgatgtgtagtttgcaaattataatctaggtattcgtttgcccgctttattttctagtttgcctcttgtaattgttttgtgggtgcatgtgtattataagtgcttacctgtattaggcaagataaaacttggaggggagtccttattctatttttcattttttatattgcacatttggataatgaatctttatttcttttggtcggatcaactcagtactcatgtggttatgtggactagacactcaaattatttcactgggaaatgtaggatcgtttagggcaacttagggggtacttttggatctgcatgccatttttcacctgaccatatctttttattttctgtgatggcccttattttttacctgaccatgttctttaatatggagtgtttataacgttgtaccttttctatgtttatagtaattgttttattcaagaactataactgtttggaacttttttttggtcatggtagattctcgatggtgcagaagagaaaactcgatggttatatgacatatctttccatatcaattttacgaattgaccacttccaattaattttagtgcccttttctctttttcagatgtggaaccatgccagttgcatcctcagtaagaaaaaccagataaaatcgtatgcaactttatcttttactgtttgcatgagtttcacgctatagtattatggtttattaatctttattgcatctattggaaatctgacctaactcaaagtgtcgattcttcatttcaaattagtgttgatgatgttgaaggaatagacacactcagatgggatgaccaagagaagataagaaattatgttggaagtgcaccagctactgcaagttctgcagctgctatttcagataaatgcaccattgaggttgctaaatctgcccgtacttcctgtagacggtgtggtgaaaagataaaaaagggaacggtctgtatcttttgatctattaattttttatatgctttctaattcgtcccttgaggataggaagttttatgccatgaaaattttatgtttgtactttgttgcttttcaaattatagtcatgaaaataacctcctcttgatgattaacaccttacagtcttatatgagcattcagctaacaatcatagataatcagaagtttcacattcttgaatgaaccttgatgcagcatgtaagaataattaatcataacatgtttcctattccttatagttactccctgggaaaaatactgtattgtccaaaattctgcatgttactttgttgttctatactttatttatttagaacatgaactttagcgctcactaaggatgaaatggatacccgacttggtcctagcacttgaacacttgtagctggggaggttaaatagcttccctaccactatgccattggcatgttcttttattttctgaacttgcatctgggaaatgtatggttctgatacgcagggacaccataggttcttttctgtaccctattccctgtggcctgcatcatgttgcatataatgcccaagcttttgcactggaattccaagtgaccagaaagcctaaaggccacagtttcccatttattttgtagttactctgctacgtgccactagcaagcattagaactctgaattttgtgttaagtttactttatcaaatgaagtaacctgcaaatgtattaattggaagagtatttattatgttcatatttcttattcatccacactcctagttgagtactcctaatgaattacaataattaccgtggagaattatatacaggaaaatgtttgatgatccagaagtactattagtcatgcacttagctaataatgtatgttttgaaaacatatgaattgtaactgtgatatggcaacttgtaatgtaaaaacatggtctttgtcttcactctaagttgtttctgtaatagtattattatttgtttgtctaggttcgtgtttcatctaagcttgaagggcaaggttggtatcacgccagctgttctctggagatgtccccagctgcaactgttgagaatttctcaggctgggagatcctgtcgcatgaggataaaagagctgttcttgatcttgttaagaaagatgcccccagctcaggtaatgaaacatgggcatcaaattttcttcgcgccacttcgtaatctgacttgatattttgtattgttgtttctcaagggcaaacatcttctaagggttccaagcgcaagaataatcagaatgatatacacgactgcaaagctcccaagataatcaggagtatatcagaaggcacagcagaagataaagggaaagctgttgtatcacatgattccaatgctaattcttctgatcttcaagaaaagcttaaagagcagagtgacacactttggaaattgaaggatgaacttaagaagcatgtgtcaactgctgaactaaggaacatgctcgaagcaaatgggcaggatacatctgggccagagcggcatctattagaccgttggtaatattgcatgctatttgtgaaatggtttttaacttcctggcttcctgcactacattatttccatccaatgagtaattgatatttaaacaaactgcactacaaggatcccgcatataaatatatccttggccagttggccgatgctacttgatagaggagggtacgattataactgatgatgaatggtactagtgtacgaaatttgtcaggatagttgttccccaagaccccaattggtcatctatgtaattttttgtcgctagatttattttctgcttgctttctggatcccaaatcccagttgtaacatcctggttatagggtttgtgatactgatcgcttagtggaattcagaattgtcaccgtaacctaatgattgcacactatttgctttggttcttttgtaatctggttcatgtatacaattattatttccttaaaagtggctataccttttctttctaaaaaacacattttaaaaatttgatgtgtgcagagaaatttcaaagtcaggcagcacttaagatatttgttttcaggcaaaaattgttcaatagtatttaggtctgaattttttatgtataattcaagggagacaaacattattgattgcataataagctttacaatattgttggttgcgtagacctgctttgggcatttcctttgttcatctcacatagaagtcagtacacttcgtcgctaactttcttcctcgtctggcagtgctgatgggatgctttttggagcattgggtacttgcccagtttgttctagcttcctatactatcatgggggccagtatcattgcagtggctatgtgtcaaaatggtccaagtgtacatactctacgacagaacccgtgcgcagtaaaaagaaatggaaaattcctgacgaaatggataatggttatcttacaaaggtatgactatggctccccacccccacccccacccccacccaaacccaaaagaatatcgttcttaatgcttggtttctacagttgaggtaagcaaatatgtatgtatcttgcagtggttcaagtctcaaaaggctaagaaaccagagagagttcttccgccaatgtcacctgagaaatcattgtgccaatcaacccagcaaaaccgatctttccttagtgaaggactggataaattgagagtttctatagtaggacaatctaaagatgtggttgtaagtgatcttttactttttggtacagttatcctcaggttctcttgtgagttgtgttcgttaaagcaagcaccaattatgccatgaccttgctgcatgttgtggcatgcaccagacgccctttattttttccaatcacagttactttgcttacattgttatccagattgattcttaccatattatacagattatatatattatgcatatttgttgtgtggcttgttgacatgaaattggaaagtgctcaactgtacatgcttcatatatttgtttgtttaagtcaattccttgaagatagctagtttagtttgttaatttattccttgagttcctcgattatttctttaatctccaaaaattttaatccatggaatatgcagagtgaccacatttagattgcagagcaaaggttaggagagtgtaggttttttccctatgtacttgattcagttcatgttaaattcatgtcatttgttgaataatagatcaaattttatatgatctagcatgctgcttttgcatcaagtggtaagatagatttgcaattatttgcatgggatactgttttcttttattttttcttctctgctgatcagttattgggctatacatttttctttttcttgttttttggtttgtactttgtacattcctctaaactaatcatgtaatccaactactgtaggatggatggaaacagaagctgaaagatgctggtgccaactttaatgccacagttaccaaaggtttttcctcgtgttatcttttttttttctgaactacacaggatttcctcgtgttatccagaactggaactatcttgttcagacatttgaacctttcatatttggttacgtatgacattggaacctatatcttcacccaagtgggtgagcagtttgacaccaccccatgaccaaaagccaccactcaaattcctaaaattggctggctctcacgtatgtgtaattttagactaatacatgacacttaatctaactgatgttttgaaagtataagtaaaatgcattgtctaactcatgattttttatgggagagatggattatggatcacttatgtgcaggtgataattttatgttatctatctgactgtctctatttctgtaagaacatatgggcattgagccagtatttttgtgcagctgatataatgaactgagtcatgtgacttggtcattgtttcataggttaggtaagctcttagtgtttggtgaaatcttttcgcattattttcacatggaagtcttgcactgcagacagcagctgcttagttttatgtagtgagcttgagagtgagaatgctgaagtcaagaaagcaaggtatcacattttactttgcccttatccttttacacttacagtttgacctattgttttgcgaactactgtgttacctattgttttgcgaactactgtgttaaaataccattatatatgctacttcatttcaggaggttgaagataccaattctgcgagaaggttaccttggagaatgcattagaaaaaacagagtgcttccatttgatttgtataaagtagaagctgcattggaatcttcgaaaggaggcacaatgactgttaaagttaaagggcgaagtgctgttcatgagtcctctggtttgcaagatacaggtcatattcttgaagatggaaaaagcatatacaatacaaccctgaacatgtctgacctgacacgaggtgtgaacaggcaaggattttgctcacagcatttcttgtcaaattcaggatttgcacttttaggagtgattgtcaaggcatatttcatatgagtgatatggataaaccgataaaccctccagcaattttagtcaccaaacaaagaacgtggattgcttctcaaatccaacttcccggtcttcccttgaactaacagaatgatataatgctaaatttcccatggttgttaagttataatgttgagtcaagtgcaaccatataaaatagcatgaacattttggaagtactttggtctggtttggtttggtttggttttcattacatatgcccctgaagtcatagccctcgtctcttgttcaagcccaacttagctttggttgtcaatcattccacgatgtctcgtatacatatatgaatcacccgatctagaatgtcttatttactgccattctgcaataaaaaatgttggagcttgcacaaatttctgtttcctttcctctcaatttatgttcgggagcataacacactgttgaaatgagggggaacttttcttctgtagtattaccagttgctaaatttctgttaggttattgcaaataatggtgaccctgcttgccctacttaatcttttaacagttctctctctctctctttttggctgggaagctattatatacttcaggtcattgaagaggataatgggtctgattgttatgtattccgaaagtggggacgagttgggaatgaaaaaattggaggcactaagttggaggagatgtcgaaaattcatgctattcaggaatttagaagattgtttcttgagaagactggaaacccctgggaagcatgggaacaaaaaacaaatttccaaaagcagcctgggaaattttatccacttgacattgtatgttgtgggataatgtttttacctgctggatttttttcccctttttagtggatcatgtggattcaatctgatgtgtttaatatattgcaggactatggtgtaaggcaaggaccaaagcggaaagacattgacaaaatgaaaagttcacttcctccccagttgctggagctcatgaatatgcttttcaatattgaaacatacaggtgcgattttactgttctattttcaggttttgcatgtgcacatgctttgtttttagtattagaaaagaatttcacattattttgtaccagggctgctatgctggaattcaaaattaacatgtctgagatgcccctgggtaaactaagcaaggaaaatatccaaaaaggtgtgatactttgctcattgtggaactcattttgttgatctgtaagtccaaacatatcatgattctcttgcctgcactgcatgcaggttttgaagcattaactgagatacagaatctattgggtaacactaataatcaagaactggcggttagagagagcttgatcgttgccgcgagcaatcgtttcttcacccttattccttctattcatcctcacattatacaagatgaggatgatttgatggtgaaagtatgtgttcattaccttgtgttatattcctgtatattgggaagatattccatgactattcttattttttaaaatcacgacagttttaagtgaaatattttgctataaaaccttccttttgcaaaagaataaaggcgttctatgatcattgctgaaattgaaatgggtccattccacgcacagatcgtacatgacttgtaatgatatcttggcagttaggcatgttccataatgctcaaatggaatcgaaggaacacaaaaattgttatttattttgtcatatataaatttggcttccagtaaactatgttattgaagtaaaaaaatgtattttcgcactactttcatttatggttcaagttctcaatgactctcattttgctatctagttggaacattttagaggatgttataataaaaaactaacatacctatggcatttttccttttcttttcctttggttcttcacatgttctccttgccattagatacagtgctgttcttaaatgcaatgatatctcctgcatattcaaggaaaaatgtgttataactgtccaccgtttaaagggctgttttggttcttgtgttattttcattcttattttctttgactgatcagatgtatttcttattgccaattgtaactttattcagagacccaattgactgtaactttggtgcaatggtgcaggtgaaaatgcttgaagctctgcaagatattgaaattgcttctaaacttgttggcttcgatagtgacaatgatgagtctcttgatgacaagtacaagaaacttcgatgtgccattacgccactccctcatgattgtgaagattacaagctagttgagaagtatcttcttaacactcatgctcctacccacaaggcatgtattttcttctgtatacaaaaaccttatagttttttttttctcttttgtagatagtacaatacagacgattgtttctgttttcttctgtataggtattgacatgtcctctttttaaatcttttttgaaggagtggtcactggaattagaggaagtcttttcgcttgatcgagatggagaattcagcaagtactcaagatataagaataatctacataacaagatgttgttatggcatggtaagcaatctatccaagtaatgcaaacacatttggcttacgcaatatttgaaaaggtttttatactctcagtatttagtgccaaaatctaggtttgagatgaaacttattatccatgcgcagtctttgccatggcagtgcgtaggtgaacagagggttcacagtcaatccaacagttgtaaatgtttattttactagttcttcgtgtggtttactcgtgttgtatgttatgttgttatgtcagtatttaaaaggctactttttttgtaattgtactggagatctacttaacgtccctaagtaactctttccttcctaccatttgaatgattccatgattgcaaaacttaatttataggttcaaggttgaccaattatgttggaatacttagtcaaggactaagaatagcacctcctgaggctcccgtgacaggctatatggtttgctctttgttcacttcataaatggttcaactgtagcactggcaaaagattggttgaatttgattaagctattttcctttcaatcaacagtttgggaaaggcctctactttgcagatttagtaagcaagagtgcacaatattgttacgtggataggaagaatccagttggtttgatgcttctttccgaggttgctctaggtgacatgtatgaactgaagaaagccacggtaagatataaagcctctcactaccaaaagagaaattctggttataacattaacttgaacttctatctttgctttgaaatatgatcctgctttaaggaattgaccatggcatttctttcctgatttttttattgtgatctatatttctttgctgattcataattataagaaaaagctcaacgagttactcgagtgcaattacttgttttttttccccatgtttatcttggcttggcaccacactcactggcttactgctggctgctgcagtccatggacaaacctccaagagggaaacactcgaccaagggcttaggcaaaaccgtgccgctcgagtctgagtttgcgaaatggagggatgatgttgtggtgccatgcggaaagccagtgccagcatctatcaagacatctgagcttatgtacaatgagtatattgtctacaatacatcccaggttcagtcaaattgttatccatactcttttgcgcgcttctgttcatcagaagttcagttccttacctttcacgaaaccttatctctggcaggtgaagatgcagtacttgttgaaggttaggttccatcacaagaggtgactagaagacttgaggtaggagtagaaatgtagaattaatcagtggaagtatctccatcgttatcagtagtctgtggtggctacgcttttgatgtgttagaatgatttatccagtagtttcaggttggtaggaggttatgtgctgctcgcgtatgatccgttttggggtatgttgcatgggcatcgcgcgagtggcgcaagtaaatcccctgcgcatgccatgggcatttgatagatgtttgcctaattttctgtggcaatgtgcgcatttggcatctctgtttagcttgctattttatcatcactcgcgttatttgtgcgttgttgcgttttggctatctttctttgtattttgattcgaggtctatgttaggatactgcaatcgaaataaactgaacagcattagtgaatagtgccgtctgtaggatcaaagatagaggcgtgtgactgtctagcggaagtaatattcttctatcctataagtaacggttagtctagcacgacaattcgatgagcatagattgcaatagtttttccccaggtattagtgatttggtaatctccgcttgttttgtgcccttctttcactctggtttgtcgtcgtccttcacccttcgctcggggtgctcccacttcctcttagagagatcacttgacttgatagccacaaagacacgttatgaccagcatttagcctcaaagtaatatttaaccatatgatcaacaatatatagaacttatcattcttgaggtgtggccgtcatgagtttattccaatcatattattagaaaacagtaggcaccgcacgtgaggctcaggcgtccacgggaactgccgacggcgcagcaggggcatgcaggatggccttgggctcgtgctcttccttctcctcgtcctcctccgcctcggcctcatacgcgtcacgttcctggacccagagctccgcgaactcgcagttcttgtactgctcgaaccacggcccgccggaagtgtaatggatggcgcgcggcgccgtccccgccgtgtcggcggggtcgacgcggttgtgccccacgaggaagttccacacgaagggcacctcgccgatgtcggcgtcgtccagccacatgaagcggtgcaggtacgcgccgctctgcgtgctcacggcatcgggcgtcagcgcggcgcggttctttgagtgggcgcttttgaacagcnccatggacgaccagttcttgcgcgggtccaccgtttgcanggcnccgtccatcttggtggcctccttgggcgcgtagtcgtggtgcacgcacagcaccgcgtagcgcgggtcggccatgcgcgccagctccgccgcggggnaaaaccccgggtttttnccgggggcgcccggggnaancggaagagnnnaagttcgccagtcgacgaagagcgcccagccgcggtagccggccaggtggggcgtcaggaagcgggtgaaggagaactcggtgctctccgtgggcccgcgctcccgccagtacagccccgcagaccggagctcctgctgcacgatcgggatcacggccaccggcacggaggagcgctgcagcagggagcgccggcacacgcggtacgcgatgtcctcgcgcgagtcgtacccgacgaacacgcggaacgtctcagcggcctgcacgtcgccggcgccagctacagggccagtcatcacgacgtcgttggtaggcgtgaccgacatagtatttgttggtgatatataagcagaaggttagtagtactgtttgctagcttccccgcaaaaaaagaaaaaaagagtagtgtttgctagctcctggtgctacgtacgcataggccgtgcgagttatcacaaactcctccgcctttttaataagagcctaagagccctttgtcctttgagtgtggggagcgaattgaaacgaggacatgcgtatatgacgacatgtacgtcaacagcgttacgcttgcattattaggcccagggagatcgatgtccagaattatgcatatgtgtttctcttcttttgttgccaaaatcaacaaaattagataaaggaatcctatagctaaccgattgctgtgtggtccggcgccggcggatgcatggcgacactgcactgtggtgtgggcagcgcgcgggcgggaccgacgacagcgcgcgcgcggttgctaatttgtacgggtaatacgtggtcctgtcgtgtgaactaccacagcagcacggcaggaacacgcgcagctgcatgggcagttgggcactctgcctccctgcgtcgattgctccacagtcgtcgtcatgtcccgatcctaattatcacgtcaaaacagctaggcaagtgttgcttgtttttttttttagataataagtgttgcttgttgctccatcgttttcctttttcaattatatatgttattattcacattttcactcagtattttattactaccttgtagaagtttatcgagaatgcatatagtcaagg

SEQ ID NO: 5004 - DNA, 2039 bp, Oryza sativa
ggagtagcgtttagcagtccctaagtaagctactacacatgttgagaaccatgataatctcaggtctaaggattcaacaccaacactaaatgagatcactgatgacacaacacatagggctcttgtagtgtctcatgttgggtctatccaacaacatgttcaccaacatgtgtccacattattaatttggtatctctataccatgatccatgaggcatgatcatcaattaatacatgtgctgatcatataaacatatttgttccacatatgatatttgatcaaggatcctttagaaatagtaacaaacaacataaagagtctcatgaaagaatcacatattcattaaccaataaggagttatctatttcaaggaacaatgtcaaataaatatgtaaacatagtatgtgatacaatcatctctatgattgcctctagggcatatcactaacagtgcatgcctcgctgacgggtctggagtcgttcctcgctccaacccatattggagaccatcttctctattaaatcaacggttcctcgaaccgttttagagaagaatgctcctccagctgcctcgaccatgtgatggcgggacattggggtgagtctattataaaagttctgcaggattaatcagtcttccatcccatgatgaggacatgcggccacatactcctgcagacgttcccatgcttcccgaatggactcgtcccttgtctgctggaaactggaatccgtccatgaagggcattggttttgcccgttgggaagaatttcgagaggaatgccgtagaacatttgtcctaggtgttgacagcagcatgattggcgtagaaccactgcttcactctcccgaggagggagaacggaaacagccttagcctgacggcgtcgggaccgacgcccttcatggtgcacgtgctacagatctccaggaactgctgtagatgagcgttggcatcctcgttaggcttgccacagaacgggctagcctgtgccaacgtaacgaggctggacttcaagtcgaaatccacgtctcccatgttgatctgtggccaaatggccacattctcagcagagggagcagcgaactcgcgaagggtcttgtcagccatagtcttgaaggatgatggcgttggtacaactggtttctctgtcggtagagttttctgcggagcaatgactcgcgacctgatgctccggatgaaagcttctagattttccttgaagtttcccggcaagttgaaaccagtcatgcacgaccctgttttcacaacaaaagtgaaaacaaccaaggttatacagaggtaaatataaagtattagttcagttaatctctgttatgaatcttccccttcaacggcgctagaaatgctggttggtatttcttaacaacattattagaaatataattcccagcaatggcgcaaaaatacttatggtatattatggttatagagtttatccgcaagcgcacggatataccattgtagcaattcacccgagagtattccaagggtatcatatttattttatcccgtgggaagatcatgtagagagaacttgactaataatttatatattacttgtgataatcatattctaagcaggggttagaataatccaagggtagagtgacacacaagcattagctacttattctcataatatattatctaagctaagtggaaagaaaagagaaagataatctattcctatacttctaatatatatagtatacatacattcttgttatctgatatactagctagtaccctctatccgatgctctcctggtactctgagaagccacccctgactgtcgagttccttacgacagcccattatgaccatacaaccggggctaaataaggaggaatacccctcccagtgaattaacataggattatatacacacgcggaagaatacccgtactgagctattgccatcagcggcccacctctcatccacagcatataaccccaaataatgatatcctgtaatctagacaccacgtctaaactaccaaatactactcta

SEQ ID NO: 5005 - DNA, 10183 bp, Oryza sativa
ttcgaatagttttactctggccagagatgtatcaatgtatcactgtacccacaagacagccccacaacacgttgccaatgtatcactgtacccacaagacagccccacaacacgttgccatgcgcctcaataccaccacgatacctcggaaaggagctgtgacagtacccctcgcataacacaatccaccacaacgcaccgttcctggatcataatcaccccctcaattaccagaggcatggactccccagcgacccccacggacttctcgccacttcacagtctggcgccccataatgaattatactatacaaaaggaaatgccgttacccatgctagcttgtggttggcatggttaatgtttcacaacagtagctcgcgaaccgatccttaattgtcatgagcacgaccatcaaaactatacgctcacaacccaccattatcaagttttaattatcaattgattatcataacacgatttatcatcgtgagctacctttaaatatccagctttaggtaatagtgaagctttaggctgtgttcgcatgttcagcttgggaacatagtgcctccgcacggaaaatggagcgatccattagcgtatgattaattaagtattagctattttttttcaaaaatggattaatttgatttttttaagcaactttcgtatagaaactttttgcaaaaaacacattgtttagtagtttgaaaaacgtgcgctcggaaaacggaaaacgatggagaggggctgggaacatggggttgcaaacacagccacactaatgtttctaagcatatctaagtaactatactaatatatctaattgaaccattatatgaggccaactagtcaaattgtatcccaaggtatcaaggaataaggtaatcaatgcaaattggccgtagcaaaggtataagttcacaccaccggtgacattcgaaaataaatacacagttgaaataaatagagaatttaaatataggatcaacatgctcaaaggagttgtgtttgggatctatgtgacttgccttgcaataatcggtcttcaattaatcttcttgaacacttccgacgcactcacgaatcttcgcaacaacggaaacgatgagctaatacacaaaacgaggaaaaagactaagaaactccaaataaacagtacatataaactaaataaacatgtagatcatgattttagatgaatttagagacttaaacagccttattctgacttcatatgatttagttatgaattttacaagattaatctgattttagccttatatacagaaaaggatttacgatttatcttagaaaaggaaaacgggcgctgacgtcagcgatgatgtcatcacggacaggggcttccaacgatcgccggcgatctagggctcggcggcgcaaatcgaggataccggaagaaagagcacgacgacgggagctcaccgaggggcggcacgacgacgaacgacaacggaagacggccggcggcgaggtagaggcggcgatgagatcgggacggcggcgacggcggctttccgacaacgagcggcggcaacggaggggtggccggggtgcagctcctcctttcgaacccaacggaggtggcgacgaagctgggcgacgacgggaggagcagcggggcttcgccgaagatcaaaacgcgacggcgaactcggccttaacggcgacgaagggcttcccggggtcttcggcttcgggcagatggtggccggtcttccactcttcgctttggtcccattggaggcgacggcgctgaccggagatgtcggagtcgacggctacgaccgactggagcggcggccggcggcggagcgaggagacgagcgcgggcaggcggctaaggttagggaaaagctctggaaaaagatagaaacggaagaggaggtattgatactgctatttataggcaaaggtggaggaaataggctcggacccgtgaggatttggcggcggattggttaaggttcgccgggaaaataggagatgaactccgcttcgaatccaagcgatatacgatgggatttgctccgattcttgaggggaaagaaagaggaggataagggaagaaatcccttcaaccaatttgggaaacgagtcacgggatgcaacggattctacagaggaagcgggggcgtcgagttgcatgggcagtgggcacaggagctcgggttctgtccagagatagaaggagtactgtagcgataggaaggtgaaacagacttttgtctgggctaaaagaaaagaggcgagggacaagaaatagacttcttcgggaaagaaggagacagtaagcaggcaaagaggaagaatgggctgaagactggcccgaaaaggaaaagggaattttatttacttttccatttaaattaatcatggaaatgatctttgaattgttaaaaataattacaatgctcaaataatttcaagaaaaatcctgaaaataatttgtcgtgacacaaggtcacggacaagattggggatagacaggaaaaccccttttcctgcctatcctgagaaatgagcccgaataccaaatgatcacaccctgagtgacaagatttttagtattccaagatgtcctgtctgctacaggctttttgtctgctctatatagtacacagctttacatgtgagattacaattgtgctctttgccaaatgctttgttgggcccacatgaaattacaatcgtgcccctgcatatcaacagaccctaagggcattttggtacattatgggggtcattatagtcttttggtgccagctagatggagtggttgagtggtccctgggaatattctcttggcatctttattgtccaagtcgccttcttcatggccaagagtcttttccaccaacatggatcttctcctcgactaagggtcttttccaccactacgggtcttttccatggcaaatagtcttttccatctcgaccaccatttcggacttatccggtagctgatgtcacagcctgatttccgtttcaggatttataaattatttaataaattattattagaatttatattaaatgttcattaatttacaagtgaagttaaatgtgggaaataaaatttcctaaatataaagcatggctggatttaatttttattaaattctccatgattaattataccctctgaaattttctcggatttttcagagctcaattcctaaatgatacaaagaacagttcagtaattagttaatcaattaatgatctaattataattatgttaagtgcttttcttgtttaaaaatccttaaattataaattgttgtttaaaaggaattattagaaatgatcttaaaagcctaaaagagaagatctaattttaatttgttaaatctcaatataaaagtgggctagataaaattttgttaaatacttctcttgcttctatagttcctagatttttctggaatttatttgagccaaggaagtatttttaatcaatggaatatcatttcatgaataatttaaatagaaaaaggttttaaaatctcccttttggctttgggccgaaagtcggcccaagtctctctctcccttcccccggcctgcgcgtgctcggcccgttcggcccagtccgccgcgccctccctcctctctctcagccgctgacaggtgggacccacctgtcaggtcgtcttcctcctccagccaccaaccgccgactgtagccgcaagccgccgccgatctccttccaaatccggccgcctccttccttctccggccaaatcaattgaggggaaataatctcctcgatctcctcttccttttctctttaggaaaccgagctaattcgtttggaaatcgtcggattcaatgccgatttggttagcatctctttccaaaccctaaaaccttccatctcgctgccggtcgccgtgggcctccgtcgccgcctcctagcccctataaaaggatccctgagacctcctcaatccaccgtcaccttcgccttagcccgccaacgcttgtagcgccgccttcgcgttagctcgtgtgtcgccgtcgtcggcgtgagtccggccgtgccgcgccgctgctctagtcgccgccgtcactcggggaggccctcgccaggttcgcaaggtcgccgccgtccttgtcccgtcctccgtttccgccgcagatcatcggagcgccgccgactccgtcgccccgaagctctccaccgctgccgttggtccagccacgccgcgccgttggtccagccaccaccttcggtcgtcgtcgccaccgtcgggatcgcgaggaggagcagcacctcgtccacccctccgtttccgccgaagatcgctggaacaccaccgtcgtcgttgacccaatcatcgccgccgcttcgacctcgccgccgtcgtcatccgtcgtcgtttgccgtcatccaagagctcggtgagttcgccgcgtcgccctctacccgttggtgccctccgtttgcgtcgccgcgccatcgattgccggcgagcacgaggtgccgagccgccaccggcgatgacgtcatcgtcgacgtcagccgtagacccgtggtggattagatcgatcttggccgtccattttgtttagattagatctcggccgttggtttcgtagaccgcctctatgcacccggtctaccgtggaccatctttgatgacgcaataaatcccttttgcttttcaaaaataattcattattgcgtcataattcaattaaaatctatataaatgctttaatccggtttaatctttaaaaattcataactaattcattgtaactcagtttaatgtggttcaagttgcaaaagttgtataaaataaagatctacatattaaaattatccataaattgaattaaatttatttaatttttttaaatgggctttaattagattaaatcttgtaaaattcataattaattcatatgaagtcagagtgaggccgttcaagtctcctaattcatctaaaattattatctacatgtttgtttacttcttatgtattgtttatttggtttttattagtctttttcctcgttttgcgtgttagcttgtcgtttccgtcgtttcgaaggttctcgagtgcgccggaagtgttcaagaagactaattgaagacccgttattgcaaggcaagtcacacagatcccaaacacaattcctttgaccatgttgatcgtatatttaaattctttatttatttcaactgtgcatttattttcgaatgtcaccgggtggtgtgaacttattcctttgtatggccaatttgcattgattacactgttccttgatacattgggttattataatttgactagttgagctttatatattggttcagctagatgttagatataattgcttagccatgcttagaaacattagcacataattgggataactaatgtttcactattacttaatggtagagatttaatgatagctcacgatggttaatcgtgattggtgaattaattaatgtgccaactaaaacttgataatggtgggttgtgagcacatggttttgatggtagtgctcatgacaattaaggaccggttcacgagtttcggttgtgaaacattaaccgtgtcaaccacaagccagaatgggcaacggctggacactttgcatagcaaggctcatcgtggagtgccagactgagaagtggcagagataagcccacgggggtcgctggggagtccatgcctctggtttttgagggggtgactacgatctaggaacggtgcactgctttgagttgacatatgcgaggggtcttgtcacaactacacaaatggtgacatgtttagcatgggcacatgatgatatggtgacatattgtggagttgtgtcttgtgggtacagtggtacacctctggccagagtaaaactattcgaatagccgtgcccgcggttatgggcgggtcgaacaatgtctttcgtgattagtcctacactactcattaataataatgtggtaattgatggtaattaatttagctcctggtttggaatggtacattcctggtttggagatagatctgtgcagccgggtatggttgttcaggatggttgggcctgtgcagcatgggtgtgctgttcagtgttgattaatattgatgattaattactctactgttttacaattcttaaatattttctaaatgctggttttgcaaatgaaccctatattatgccatcctttggtattcttgtgcacttgcatatttgctgtgtggcttgctgagtatgtcatatgctcaccttgcaataatcaatcaaacctcagttgaagacaagttgcgaaggagaagacgtttggcttatacctcagttgagctgcctgtgggagtggagccggagcttcgctagactgtaattccgctgctatttttcttttcttttgtaagtatttacgttattattatgatgaatctgtatattaattgtcagtttgtgtacctcggctgattcctggacgaggatttaatgcacaaataaattcggaaattgctagttaatttctgggcgtgacagctgacctgttattaactcaagaaatacgcaaaacggataatgagacttagtgacaaggactcactcgaacggtattttccgactcgaatagtgttttccaactcgaacaacattttaccatttccttgttcgaatgaccatttgccactcggatacttagaataaaaactcaatcttacccaatctcttcctctacagtgttttgggccgaatagagaggaacggtggtgacccctagctacaacaagcccctcacgggtaagggcgaagtgtgttttcggccgaaaccgtgttcgaatcaaaagctaggggagaaccgccgtcctcctattcagtcgaaaaacactaggatagaaaattttgaagttcgaaagcggttattcttgtcagtcattatgcatttatttgtttattatatatatatatatatatatatatatatatatatatatatatatatatatattgttatatgtatacatattctttatgtattgaatatgcacatttatgtcaaagtttgctcaacaccatgcggcagtttgatctgtagtcaaagcttttcaagtttggtactggaaaaagaaaagctatgaagatacccttgcttctctctaagcatcgttggcttcgagctcacacaccgcacaatcctcttggagtcaaccagacaacggtggtgacgctcacaaatctgattcacaggtgtgaagttattttagggaaaactaacttggaaaactttttggatatggtcgaaaacgcttgttcttttgctccgtcgaacctattgtggttgggaacttaattatgtatattttctgtggttgggtaccatttgctattttctctgtatgcctgtgcttcatcatcatttcgtttttgtcggggaagcaggtttatttgaaccgaaaagttgtggttcgacgcaacaagtatcattcaactcgaaacatgaagctcgttgcatttcgaacacacgagaagttgctcttttctaaagcaactaaatgtgatgatgaagagaaggaaatacattacgatgacacttgtattttttctttaaaatttttccaatggcaaagagaacatcgagatggtagtttgcgtgacttcgttgtcgagtttagaaaacggcgttcgaataatgcttcgagcagcattaacttttggcaaacttttagaccatctgagcgtcaacttagaatatggaaaaggcgctactcaattgtcccttacacgggaatgccttctcctctcaatgtcatttttcctttttcttttccttttattccgcaaagactcgaatcagaaaagaattcgagcgtttagctttggtttttgaaaaccgccgtccccctttcctttcgaaggagtgacgaggtcaaaatcgcactttatcttgtcgcatggaatttccactttctgctcgaatcggttatgagtgtttgagtgtttcatcgtttttttggtttttggacgatggtaaaacttgttcgaaaaccgccgtcctccttacctttcgaaggagtgacgaggtcgaaatcgcactttacctcgtcgcatggaattttccactttccactcgaatcggatatgagtgttcgggcgctttatcattaggtttttggacgaaggtaaaacttgttcgaaaaccgccgtcctccttacctttcgaaggagcgacgaggtcgaaatcacgttttacctcgttgcgtggaattttccactttccgctcgaatcggatatgagtgtttaagcacttcatcgttaggtttttggacgaaggtaaaacttgttcgaaaaccgccgtcctccttacctttcgaaggagcgacgaggtcgaaatcacgctttacctcgtcgcgtggaattttccactttccgctcgaatcggatatgagtgttcgagcgctttatcgctaggtttttggacgaaggtaaaacttgttcgaaaaccgccgtcctccttacctttcgaaggagcgacgaggttaaaatcacgctttacctcgttgcgtggaattttccactttttgctcgaatcagataagggtgttcgaacgctttatcgttaggtttttggacgaaggtaaaacttgttcgaaaaccgccgtccttcttacctttcgaaggagtgacgaggtcgaaatcacgctttacctcatcgcgtggaattttccactgtttgctcgaatcggataagggtgttcgagcgttttatcgttaggtttttgggcgaaggtaaaacttgtcgaactgcgtggagtgctttttaacctgttgtcaagttggcttttcttctccgaagcgtgcggaggattttctcgatttgttatcgtgttggattttcctctccgaagcgtgcggaggattttctcgatttgttatctagttggattttcctctccaaagcgtgcggaggattttctcgatttgttatcgagttggcttttcttctccgaagcgtgcggatgattttctcgatttgttatcaagttggattttcctctccgtagcgtgcggagtattttctcgatttgttatcgagttggcttttcttctccgaagcgtgcggaggattttcttgattcgcaaacacatatacaatccattattgataacaccctacgtcctgtttatatgtattaacaccgagaagaaaagagaatcttacaaggtggtcggtattgtacacttcgagcaacatgtttcccccttttttttttctcttttttttcttcttccttttcttttttttacacatagaacttcttcaaggaaacagcattccaagtatgcttaattcttctccatcgaggtgtgccagcttgtatgctcctgttttaactttctttttactatgaatggtccttccaacagccacttcatttagtgttttcttgagggccaaatcaccttcttctatttgcctgattttcacttttttgttgtaatagcttttggtttcttctgtgttttttgccattttgtctaatgcttccactcttatctcgtgcaacatttccaaggtgatttcccttccttcttcgtctttttgatcaaacacaattcgaggtgaattcgctcccacctcgcttggtgtcattgcctcatctccatatattagcctgaatggagtcatgccagttgatcgaacaactgttgttcttaaagcccaaaggattgacaacagatcttctggccattttcctttggcagaaccttccagccttttctttatggcttctactattttctcatttgctctttcaacggcaccatttgttcgaggatgacccacagaagcaaagttgatttgcaggttaagacatttacacatatctttgaactttcctgactcggatcgttttccattatccttgggtattccaaatcggcatatgatattcttccaaacgaatctttgtaccgaagcagatgtgattcgtgctactgcctctgcttcaatccaccttgtgaaatactcaattgccacaatgacaaaacgtaaatctccttttgctcttggtggaattggccaaactggtggaattggttgcaactctcttggtggtgcttttgacgttgcaccaaatttttggcatgccttacatgtcttaatgtacttct

SEQ ID NO: 5006 - DNA, 6385 bp, Oryza sativa
  unsure (1)..(6385): unsure at all n locations
atcgagaagaactcgagcgccattcacttggagatggaggcataccacttgatctaagacgttggttgtccccccattggatatcatgaggcacacgccaccggtcctcactggcacttgcccagcttgagactctaatgctgtggcgtggaacttgggtccatccgggtgcatccccagttggttcccaacctgcctcatacatctgcacgagtgttgaggatgatgaactttcccgttcattccttgtcatgttgcgtgtctccctgtatgctccacttgcacgagattcttctatgctctacaggggaatggttagttcatgtcagttatacaaatgataccctgcatttggcaacgggattttatttgtacaaccggggaaaaagtaaatcaaagatccatccactccatacttcagaatatgcccttgcactagataggtctcatccatacacggacgagcggctgagataaaagcaattttgttgctaacgacacctaccccttttgctatctgagtaatcagagaagtgcactcaacaggagcagagaactttatactttctaaccattgtcttatcatacatttcacaggagcaattttgatctttctaaccatggcaaacatgataatcaattcatcccccctaatggtctaagatcacctctaggaaacaaagtcatagcaatccatttgtgcatgagcctaagtgtaggattatggatatcattcatcataggtttcttgcaaattggagcaccagaaatatcttcccaaaacctatttttctcgaacccagaaattcctttctagagatcgattttacagcaatcgtgaaaaccaagaagtgtgcttaagcttttccatgtaagtgtaaactccttacggaaaaagcgaaaggaaaatccatcttctatttctttcaaagtgcatagaaattgcaaagtaagcaaacgagaaccaggctcatctaccacagcaaatctctgccaaccaacagctttccaaatagcacgaaattcaacatccatatctatctttttcagcagctccggagagtattctcgtgtatgagcatactcccggttgctcagcatgtagtaggcttttctctcccgatcacagacaaggtcgaggtcggtgtcgttcaggagtcgtcgcggagcttcggcgtcttccaacgagacatcagctgatgaatgagtactagactcatcatgatgacttgatgaagagccggaccccttggacagatgagacaatcggctcctcattctgcacaatggagcaagaacagactaacccgacgggggttagaatagcaagagtttcacccaccggttagttccaccaaagcaacttgtatatatgcaactagtgtttgaatttgaggaaaactataaaagcttgaatgaacttgagaacaaactttggagagggaatgaaaatgtattgaaatggggtggaattccctctcggccggctggtttttatagggtacccacaactgtcagaaaagacatgtgggacccaatagccgttgcccagccaaaaatggtaggtaactgttgcctggccggttcggtcgaacccctcgtgggcccaaccggcaccactttcggccgttggattccaacggttagtgcagtcgtggcacagtgaattttcgttgaaaattttattttggtttgctctgaaaaattcatttgaagattttcctcaaaactcaaagaatcctaaatggaaattttgaaattcaaacatgtgttgatgcataaattcaaattgttgaaagcaaaaatgcagatacataccaatttcctatggcgaaggtcgcgtcatttaaaatccgacgtgcaagactgtacctccttctgattcagttcgtggattttccacccgtctctggaggtgatggagcgggcgtgtttggcttttccctccacaccttccatggctttggtgcagaaggcggcttcttctcagccgactgctctgacttcttggccggtatagttggttttatcaacgtcctccaataacggttcctaggcatcgttgtttccttctctaggaaattctgcatgaacttcaccaggctatccgtcttgggtggctccacttcgaccacttgaatattctgcgggttcggcccgtactttatcctgaccatggagcattgttcgacccttggttgaaactcaaacttttcctccttcccgttaatatgaaaacggatacttcccgctcccacgtcaatgttggcttccgtagtgctaaggaatgggcgccccaggatgagcgacatctcttttcccgtgtccatgtctagcaccacaaagtcaaccgggatgaagaaatcccgtatcttgactggcacatccaccgccatccctgctgggtaacggactaacgagtcagctagttgtaggcgcatcagtgttggtgccaacaccgtgaagttgagcttgtcaaagacgtcttttggcatgacgctgacactggctccaagatcgcataaggcctggtcgaactgctgtaccccgatcgagcaggacaccccggatctttcttcttctttgggagcttgtggagtatcacgttgctgcattgctccgtcagcttaaccacctccgttgttgggagtggtctcttgttgttgagtatgtccttgagataacgggcatatgttagtacttgcatagcatccaacaacagcacgtttatgtggattttctggattacttcaacaaaacgagcgaattgctcgtctactaacggtttcctactccgttgaagaaacgacagcaaccgtgcgtcgtagtactcctgcggcatggtcttttcttgctaaacctctttgtcagctgagtcactagatagcgcttcttttgtaatcccgttagttcgtgcagggttaggatatggtggatcacgagtggacttacctcccatcgtcgtgatcgccttaacattttcaagggaggagtcgggttgccccggaatcctcccagtttcttttgcagggactaaagatgccaactgagctaggtgggtttctatcattttattaaagctcagttggttttgaaaagcggaagcaaaccatctagcttaacatttatattttcaaggatcttgtcattggcagcgagctttttgtttagcgcatcagtggttttagcttgtgcaatgacgagatccttcaaggagggttggttagaaaagttaccattgttgttacccccttgataatataggcgtggttggttccacccctggcctccttgtggacgatacccgttgttgttgttgttgcccatatacatcgcctcctcacgggtttcccggcagtcgttcctagagtgacccgtgttgccgcagacctcacatgtaacgtgtgagtccagagccttgacagtgtcttgaggccgtttgtcgtggtcgtctaagcgcttcatgaggaggtcaagcttggcagcaagtaattccgtctccttgactatgtgcatgttgggatacgcgtaggctaagatagcataaatcaaaaatttctatcgcgtaaaccaggaaccatgcaagtattagatcatagatcgttaccacttgatagattatataacttgtgattgactcctcaatcacctttgccatggccatgcacttccataatctataacattgagggacccagagatatctctccataggaggggcaaatcccatcttgattattcatatcccacaacatgtttcatagcatacccgaaaactacttttatagctacccatttacggagtagcgtttagcagtccctaagtaagctactacacatgttgagaagcatgataatctcaggtctaaggattcaacaccaacactaaatgagatcactgatgacacaacacatatggctcttgcagtgtctcatgttgggtctatccaacaacatgttcaccaacatgtgtccatattattaatttggtatctctataccatgatccatgagacatgatcatcaattaatatatgtgctgatcatataaacatatttgttccacatatgatatttgatcagggatcctttagaaatagtaacaaacaacataatgattctcatgaaagaatcacatattcattaaccaataaggagttatctatttcaaggaacaatgttggataaatatgtaaacaaagtatgtgatacaatcatctctataattgcctctagggcatatcactaacagtctctcacttgcactagagtcaatcatgaacgtatcatatacccattgccctagtgtgtgcctcatgcttaggctgagggagtggctttgtcaacggatctgcaacattcaaatccgtatgtattttgcatatcttcacatctcctctacccactatctcgcgaatgaggtgataccgccgtaaaatgtgtttggacttttgatgcgatctaggctccttggcttgcgcaatggcaccactattatcgcaatagaggtccattgggctagaagcactagtcaccacacctagtcgagaaatgaatttctttatccaaacagcctcctttgctgcttcagaagaggcaatgtattcggcttctgttgtataattagacactgtatcttgcttggaactcttccaactcacagcgcctccattcaggcagaacacaaatccagactgtgatctaaaatcatctttgtcagtttggaagcttgcgtcggtgtaaccatttacaacgagctcttcctgtcctccattgactaggaacatatccttagttcttctcaagtacttcaggatattctttacagctatccagtgactctcacatggatctgattggtatcggcttgttgcactaagtgaatatgaaacatctggacgtgtacatagcatagcatacatgatgaatctgattgccaaggcatatggaatcacactcatcttgtttcgctcatcagtcgtttgagcacactgattcttgccaagattaatgccatgtgacatcggtaagaaacctttcttagaatcttgcatgttgaacatcttcaacacctttcaatgtatgtactctggcttaatccaattagcctctttgatctatctctatagatccttatgcccagaatatatgttgcttcccctaagtccttcattgaaaaactatttttcaacgatgtcttaacggattcaagcataagaatatcgttcccaatcaataatatgtcatctacatataggattagaaacaccagtgcgctcccactaatcttcttgtatacacaagcctcttcttcgtttttgacaaagcccaacgccttgactactttgtcaagacgaatattccaactccgagatgcttgcttcaacccataaatggatttctgcaatttgcatatctttttagctgattgtggatcaacaaatcccttgggttgtgtcatgtacacatcctcatcgagatttccattgtggatagctattttgatatccatttgccatatctcataatcgaaataggcagcaatcgctaaaacaatccgaatagattttagcatggcgactggtgagaaagtttcatcataatcaacaccttgaatttgtctgaaacctttcgccaccaatcgtgccttgtagatgttaaaatttccatctacatctgtctttttcttaaagacccatttgcactcaatggcttttacaccattaggtggatcaaccaatagttccaaacttgattgacatgcatagattctatttcggatttcatggctccaagccatttctcagagtctggtcccaccattgcttcctcataggtagtaggttcatctttgtctaacaacannngccgctttgtcctgtagttaacaacgcatacctcgcaggtgtacgtcgtatcctatcggatcttcgtgaagccggtgcttccacaactggttcaacaacaacttgttcaacctgttgaacaacatcttgctcagcttgtggttgtgtggacgttgaagcgttttccggtgtttcttgaatttcttcaagttgcaccatgctcccactatcctgtcttgaaataaactctttttccaagaaaacaccgtgtcgggcgacaaacactttgccctcttcccgattataaaaataatatcctttcgtttccttaggatatcccacaaagaagcatttatctgatttaggtgtgagtttgtctgattgcaaacgttttacatagaccacacagccccaaatctttatgaaagacaaactgggacgctttccagtccatatctcatatggtgtcttatccactgattttgatggaaccctgtttagtgtgaacgcaactgtcttagagcgtaaccccaaaagct

SEQ ID NO: 5007 - DNA, 5657 bp, Oryza sativa
  unsure (1)..(5657): unsure at all n locations
gtcttacaatatgaaacagagggagtattgaataacaataatagttttatttttattccagagatatcatactgaattattttttatttattttgtatttttcatgtatcaacaatcttatagagatgtttttatgcttttgatagcatttggcaattccaaaaatcccatgtcagactttttttgcaagttcaaaaaatgattcatgatcattcttcacattcagtcggtgaactgataatcaattgttctttcatggattattaaaacacttaactaatggtagactgattcccttttgtacaatttgctgtgcaaataattgttgaattaccgagttgctcctatgactttttcactgtgccaaaaatgattttgtgagcacctgcgggtgctggtcctcttgaagatggcaacgctatttgtcgatctggccaaattcaaggtgggtctaactgaatgcagaccatactatctctaaaagtgcctttgagcctatagtaagccaacttataataacttatattaaatttggaatgacagtgttttctttttgtgggtttattggcccgagtgaaatctagccagatcaaggccatgtgtgattttggtttctaaataaaagtaatggttatgaacggtatggttttccctttcttctcaggattgaatctttgaaatatgcatgaatggttagctttgaatgaacatttgtactgctgtattatactattaacaagtgcaacttttcaataatgtgacttgggatttagaaattaaggattaaaagtttgcacagaaaaggcatagagaagatattggtagcatttagctaactccaatagagggatggttgtgcaacctataagagagtagttaaaggaaaattggaaattatgtgtataactctgctgcttttcgatgtcatcgatacatcagaaagtaagaaagatgaccaatggttgagatgatgaacagtcattctgtgcatggtttcaaataatcaattattttcaagttatacaaattttaatttgcaatgcttttaaatcctcttttagaggaaccttgaagcagcaatgaggtgacatgcaaaatgcattttgcaccagaacaccttgaactaaaacgggataaatttctgatggtaacactaataggatgttaatttatatatttctcaagatactgtatagtaagagcaagtctccacatttcagaaaattgtgctttccttgcaacaaacggcacttggctagtgtacatctaaaatatcatttctagatcaccatctgtatcgctcgtttagtatgattacaacaatatgcaatttcccccagcaacaaacacaaaaatttggcactgatactactatatcatcctggtttcttctactgttctactcctaggattcaagaaagccaaaagaccgttctttagcagtaacacagaaactaatcaattccacatgaacaaaacaatagtaacttgctaagatttgaccatattatcacggtttcttctactgttctactccagggctcaaagaaagccaaaagaccgttctttagcagtaacacagattagaaactaatcaattccacatgaacaaaaaaataactaacttgctaagagttggaccgcatcatcctggtttcttctactattctactcaggcttcaacaaagccaaaagaccgttcttgaacattaataaaggttagaaactgtagtactaatcaattccacatgaacaaaactacaattaatttgctaagagttgaaacatcagttaatcaagaaaggtagattgaaccgaacgcctcacctagcaggtttcttctcggtagcaagacgcgtcccgctccatgggaacttccccacttcctctccggctctgtctttcaccttggtacctccattcctcttcttccccagcctcccggggttgccgtacaccaccttgccgcggccggccctggagaagcccaccttctcatcctccatccagtgcttccccttgccctccccttccacctcggcgccctccaccgccttcctcctggcggcggcggcgctggccttgcgctccctctcgccgaggacaagcccaatggggaagaggtcgggggagacggggagcggggcgcggagggtgacgtaggccttcttgtagtccggcttggcggcgaggaaggggcccccgcgcaacttcttgcccttcatgttgagggtgcggacctcgccgacggagaagccgtacatggactcgaggcagcgccggatgtcgaccttggaggcggaggggacggtcttgacgccgaactcctgcacgaagaagacggcgcggaaggaagcatgagcttgaggggaaggttggcaaagtggatcacgcggcgacccagccggctccccatggctgtctggctggcnacggcggcggaaggttgggtgtgncgnctgtgaccgtgggtggccagcggcgggaggcgtagggttttaggatccggcgggtccgctgtctagttgcggtgtgactttagcccatatccaccgtccggctcatccgacggaggacgtttggctgtgtgttgtttcgaacgatgtttcatgcgtcgtgcaaaaaaatgtttcatcgataaaaataaggtacataaacttgctcggcgagtgtaaataggtataacaacttgtaaattgctcgttttaatacaatagcttgtctagtttatacgaacctagtacaaaacaacacacatgcaaaattgatctaatgtgtagtactaaataatcatagtgagacatatccacgctagcagttgtttgtacttgtgcagacctgagcacactagcttaattttaaacatatcagtcacaacgatacttatattacaatctcttgtaggctgcatgcactactgtaggatcaagatgtcgactagaggggggtgaataggggatttaaaactaaatgacacctaatcaaaactaacttaagttgctaggcttagtgagggtcaactctaactaagcaactaagttatgttttgcaaacctagggtgatagtggctcaattatatctctaggaaagtaaatcacactcctatgtcaatgtttagcaatcctagggtgaaatgatctctagtatgtctctagaaatgtaaattgcacaaatataaatacaacaagtaaatgagacaaggagacaagagatttttcaccgaggttcggaaactcgccagtttcctactccccgttgaggcgagcccaactccaccgctcaaccacgaagccaccgcacgcccccttcgtcaaggggtgggcaagacgggagcaggcccacggagaggactacccaagcctcggccactagggtagttcttccttcactccgaaggtagtgaactcaaaaccactcacaaaccggcgccgggcctcctccacaatcttcttagagaggtcaccgggcaactcctccacaagccgtctaggaggcggcaacctccaagagtaacaagcaatgacccggcatggagatgataaatcaagtgccacactagctctacaaatagaagcaaatgtacttgactcttgtctagaacaatctcaaccactacaatggatgaacactaagctcaaaggtgtgtgagagaggtgcaaggggtgtatgcaattgaattgggtgccaagagagccctcttgctgctggaaggggagtatttatactcccaccaaccaaaactagccgttgggggcgaaatcccccagctctgtgctctgccggtctgaccggaggtatgtggccggtcagaccgtgctactctgcaacggctagaaaactagccgttgtagccctgtcagagggccccatcggcctggccggtcagaccgacgttgagtggccggtcagttcggcctcggctcggtcagaccgccatcagctcggtctgaccgaatacggctccgtcggctctgtatcggccaccccgagcagcaccatcccggcctccagggggccggtctgaccgcgcatgtgccgccggtcagaccgccgtttcgtggccggtcagactagccagggcacgccggtcagaccgccactatgtggccgatctgaccgcccctggtcaggccgaacccagtgaaaaaaaaagattgtgtgtgtgagatgaaatatgagcacaagtctaaatgcataatgacctaatgtgtcaattaaaatcatctcattgctaggtcattacccccttgatagtacggcgaaacaaaaaaataaactaacaaatttgatcgcccttcacctcgactaattttaaaactaaagcactagttttaccgttttcttttcttcgcttcgcgccatcaaattttaatccatcgatagtcatccatgcgcacacatgacgtggacctaacttaaaatatatctcaatagcaacggttagtccacaattagcgcttgtcattaattaccaaaattaacaacgagggcctagatgcttcaatctgcccctttttggtaattgataacaaacaccacgaatatatataatcaaacatagaacacatggacatatactgtaaaggaaatcaaaagctccccctaaacatgtgcataacaatcacaaatggcaaatatggagccaatgcacatttcaatttcacaattcaacatatcacaaacacaagagcaatatctcaatgtgaacttcaagaaatattcatccatgagcataagatggtcatatatatatcagtatcacatacaccatccatcattgcacaagttcacatcacttaaccattcaactcacataagtcacaaatcatcctaaaagggctcacaaataaacataggctattacaagaccacgaagggtccaaatgacatagagttcaacaaaacgataaagaacacacaatatagagtaacagcccatacccatacataatatagctcaaaccaccttaacctattagatatgaggacactaacctcactaccattagtcccaacccacaatacataaagcacacctaaggacatttttctctcccttttggcatcaagtaccaaaaaggtcttaattcttgtggaggagaaggaggaagcgccaaagaggaaggattaggagtatcacgacgacgatgatatacaaaagcttgggtgctctccaacatttggactcgagaatccaatgcacccactctagtgtgcaatctccccatggaagcattcaagtctccaacatcggtgcgcaagccacgaacatcctcatgcaatgcttcatgcctggtagacaagcgttgaatgctttcacttaaggtattaatagccccaagtaccgggttgaagtattcattgggttgcattccaaagtaagcatagtgaggatgaaagaagcatttggatcatacccatgaggaggaggaggtgctgggcttgagctagctccagggtgagaagagggcaccgtcctaggagcacggggagctctaggctgaaggcggggcttgtactgcttgtgcttcttcaaattttgcccagcagccccaagcttgttcttgaatcaacctcatgatgtaaggggcataatagattccctgagtgaatgtcctcttgaagatagcaatctctggcatcatgagagacacaa

SEQ ID NO: 5008 - DNA, 1075 bp, Oryza sativa
agtgcagtgcactcgtttatccggtctgtgaccagtcacagactggtcagatcgcgggtttggtggcgacaggcgatctgacgcacgcctcgccccatccggtcaggacgagggcttctaggcgctcgtccccagctggagctagcgtgttacctcccagagatggcacgttagtcctagtcagatatatgccaggcttcatcctaaccattacaggcaagatgttgtgtgaagaagggcgaacatgtagattgctaagctgacacgtggtggacaagaatgaccgacgtgactggtctgacaccggtcatgtcgtcagcagacagccacgattccacgtcgcatctgctcccggcgaaagtggaggtagttgtgggccgtctcatcagatggtgactcggacggcaactatacaaatctccgtccatttatgaaaaggtgaggtaagtccccacaaaaaagagagaaatggtgcatgtggtatccccttaagatataaaaggaggaccttgcccactgggaggggggactggacttttccagatggggaacccagaacaagggagaggctggctcatactttgtagctccttcatacacagatctcccaaaacacaggagtagggtattacgcttctcagtggcccgaacctgtatacatcgcccgtgtcttgtgtgtttcctgtctcgcgagccttccacatacagagagcttagaatctcaccctgagtccccggccgaactggcaaaggggggcctgtgcggtctcccggtgaggagccccacgctccgtcaccgtctatcgttgggaaaagatggacataaactttgttggtgcatggtgcctatgagtatgaacacacattttttacacaaataaataaatatactacataagcatgtgattagtattaacgggtttttctttataggatgcaatacatggatgcttagaagaccatggttcccatcggttatctagatccaacaaggatctgtcaatcccagcataccgtaacgctatcagaaaacactgaacagctcaagaacatgacgcctgaagaaatagcggaa

SEQ ID NO: 5009 - DNA, 2053 bp, Oryza sativa
tgacatgtgtgactgaagtgagaagagcaactccttttatagcctcccaatgacggttgtgacggtggaaatggtcgaaaaataccctccacccgtcattgggggctaatccacaccgtccaggcaaagccctggatcggatggcgctgagaaggattcggccgaacctggggccggcccaatccagcccatttttggctggcggcctcctccgttgttcttctctgcagacttgtgaattttggcccggtttgtcgtgtcaattctgagttcttggcccactcatacataagtctaattctcgacatcgcctaattgatttattgtctgtgttgatgtcgattctcctccactttattgttattctctgcaaaaggttagtgaacctaatactagtggaatattattattctaacatgtatatgcattgcaagcattattagttctcctctattttggcaatattgatggtcgaaactgatcgataacgactgtcaacaaaaccccccaagcttgaacctgtgcagctcatttacctcaggttcccagataattgtttgctatttatatttaacctttgagagagcacttacctatgaacctatatataagagatataaaacagagcaactcttcatcatttcaacaaagagaactagcttgtcttacctagcataactcaaacctatcctatctttttttttggtattttctattttgcaaatttttatgttgtcttcaagtttataagatgcaattggaaagcaaatatgtaattggaaagggaaatatgcaattggaaagggaaatatgcaatgtgatacaagttacctcagtggggggagagatatctccccccaagcttggctttccctcagggtccttgataaggattgaacccctgaaagcggaagtacgcttgaacatcatcgtgctgttgctgcatcatgttgttgatgttggcaaactgagcatcagcagattgttgccattcttacgtttgagctatgtgttccgtgaggttgtactggatctcccccgtctgcacatcaagggtatccattctcctagtgatttcacccaagtcccatcgagaagaactcgagcgccattcacttggagatggaggcataccacttgatctaagacgttggttgtccccccattggatatcatgaggcacacgccaccggtcctcactggcacttgcccagcttgagactctaatgctgtggcgtggaacttgggtccatccgggtgcatccccagttggttcccaacctgcctcatacatctgcacgagtgttgaggatgatgaactttcccgttcattccttgtcatgttgcgtgtctccctgtatgctccacttgcacgagattcttctatgctctacaggggaatggttagttcatgtcagttatacaaatgataccctgcatttggcaacgggattttatttgtacaaccggggaaaaagtaaatcaaagatccatccactccatacttcagaatatgcccttgcactagataggtctcatccatacacggacgagcggctgagataaaagcaattttgttgctaacgacacctaccccttttgctatctgagtaatcagagaagtgcactcaacaggagcagagaactttatactttctaaccattgtcttatcatacatttcacaggagcaattttgatctttctaaccatggcaaacatgataatcaattcatcccccctaatggtctaagatcacctctaggaaacaaagtcatagcaatccatttgtgcatgagcctaagtgtaggattatggatatcattcatcataggtttcttgcaaattggagcaccagaaatatcttcccaaaacctatttttctcgaacccagaaattcctttctagagatcgattttacagcaatcgtgaaaaccaagaagtgtgcttaagcttttccatgtaagtgtaaactccttacggaaaaagcgaaaggaaaatccatcttctatttctttcaaagtgcatagaaattgcaaagtaagcaaacgagaa

SEQ ID NO: 5010 - DNA, 18145 bp, Oryza sativa
ttaggatttgtgatgtatttgatctgtgtgtaggatttgtgatgtatttgatctgtgtgtataattaacttaatatttgggatgttgatttggagatatgcatcccatttgattcgggagaaaatacagggattaacactagccattagcaaatcaacaataaaataaaataaaaaagatctcgaggtctttagtcccggttggtaccaaccgggactaaagattccccctctttactcccggttgatggtgttaccaaccaggactaaagatcgatctttagtcccggttatttgaactgggactaaagatagcgatctttaatcccgaattcgtagtcccggttggaaaaccaggactacaaagggttctaaaccgggagtaaaaagcatttttccaccagtgactgttaattgcttgcggagcagtcttgagatcaaggccgtagtgcaaaatgttatgaattctggctgcggtattattagcagtcgtctacttgatgctgtaagctagcttcaagtgaaattggaggtcaatggaatgaaatactctgagatgcagttctgttcgtacaaaactgagggtaaccgaaggtttttgccttctttaaaagttctgttttggatgcttcatgtcacttggacaatatgctggcatagacggtatgtacgattcattgaatataatataacatgattcttggtttttcggatatttcatgtaataatgactcatggatccattaattcttgctatatagctggtacccattactaacaaatattgctataaagcagctctctggtgcagccacatcatcggtatgttgtagccgtggatcgttggtcttgttctgatctgagccatgtgatagcatacgccatctcctgagtcacagatcaattgagcagcctatgtttagcggctaagccaaagttaggaggatgtatggacgtacgacccatccaataatcctcacggtcgcatggcccccttcatccaagtcttgctcttaagacatctaagagcaagttctacataattgaatatcttgactgcaatgggggttacatatttgaaactgtttatgtcattttgaaagtatcaaaatatttcagtagttttcatttgatatcgatatctattgctacgtacaacctgttttttgctacttactacagttgcatatatatcgcagcttgcttgtacggtttcaatatgtaatactcctccctccgtttcacgatgtaagtcattctagcatttcccacatttatattgatgttaataaatctatatgaatgtaagaaatgctaaaatgacttacattgtaaaacggaggaagtaatatctatctcagatctaaaatatagatgtaataccctgcaacaaaatatagatatgataattaatattatgatttttggaaagcacttaatttcctatttagtcattatttgagttagaaatctatgtattaagtcatctatgaggtcctcgaaaaaaaagtcatctataaagcccgcagcaacacagcggggtatctgctagttgggtctggtgtgaatgccacgttttgaacgtgatgctaaatggattggtgttgcaaggctgacttggcagggggctgacttagcagggttgtggggggcgttggggacttgcggtgtattgacctctattttggtcagagcacaagggacgtggtctatgtgacttttttttgtaccgtatgtgcaatcgtaaggacgcaggaaaaagaaaagtctagaggtagctaagtcattttgctcgtgcagattatggtttatcacgggaacgctttgcaagctcttaaatttaaattgtctgacaattatagtatagtaaatgcaataactaaattattttgatcatttttttatacatattcagtttctaaatatacttattttgtattcagtttctagacttattttgtcaatatacttttcgtagatttgtataagcatagtgcttaatttttattattctattaaaagtcaattaattttactatgtggaaaattttgtatttgggttgagatttgagaaggtgaagaaaaaaacaaatccaaattaggggtgcaaattcaatgagcagcatatagatcaaatgcaagattataatgtaggcaaattttgctacaggatatcgcaacttcgtggtattagctgtgggacaccgcacaaagtagcttttggggaaagacagtctcaaaatgtggtcatttgccaatgcacaccgcagacattaaaatattaatttctcgttcaataggagagataaacggtgtaaaaggtcaaaaatgctcctaggcccacttgtcatattgttttcccacacctaactcccggccatatccttcgatcaccgccagcgaccaccccgacaccgacgtcggcaacggcgcgaccgcaccaccattactacttgttctccagcaagcagctcaactcgttcggcgccacggccgtgcttgccttctccaccaccgtgccgctccttgcgctctacatcctcgacagcctccgcttaggcgacacggtgggtgtcaccacggcgtccccgcacgcgttcctcctcgccgcgcagatcttcaccgagggcctccacgctgccgctgggtaggtcgtcgtgctccatctcggcgtgtattggcttgtgtattgtgcgtctatggtgggtgttctctctctccctaggaggccttgtatttataaccatagatgccccattgtctaagtagaactagggagtcaagtatagatacgatccgagtagtccttttcgtttccatatagaactttattggtccttccttatctgaaactccttctgtatacgaggtatgattccgtataagacttggtatatggtgggtcccgtcgagcttagtcgattactattgggtatgtggtatccataacgctgacactattagaatataatccacttgtcaagtcagagcaaagttttgtattatatagtaggaaaaacttataagattacaacattagaggttgtaacctggcaaaaagaaaagaaaacaaacatgccaccactaccacaacacaggatggcagctccacaaaaaacgtgagagggtactagcactaagctgattgctgctaagcttgaccgatcgccaatagacctaagggggtcataggtgccccgccaaacaccgactccacacagaagaacgtcaacgtacgagctcccggttaaactcatgtacaggggttgagaagaggaagagagcgagagagaaggagatccacttggacctacctccaaccttatggcaacaaccaagaaatgtcgatgattaaactgagagaaggcggcaacagtgaggaacgaaagacctcctgggcaatgcctgtggggaggtgacgctagaggctccaccgtcacccatgaaggatgagaaagtggtcgcttgacaatgccctaatagagggtcacgttgctagaaggcatcaccgttgctggctcagggagatgtcgagctaagctttcacctgcagaacccacacccacacctatcgtctccaccttaaagccttgttacccgatcaatctctgctagcacataactccgatgcaccaacaccccaacgccggctagctcattcccgccttcgtcgggtctccacgtgccaaagtcgcctcccgcacccatcggtgtagctcaccaccgacaactgcttatcctgcaatccatgccacgaccaccagcctccattgactcacccgcaatggtcgcctacagctgccggtcgtgctggcctccttgctgtctccaatgtagtcctcttgtcgcgccggctgtgttagcctcccggccgttgcccgtaccctcactggccgctagtggctatcaccacgcgggccttcagatacggtgcggaggtgctagatacggatgcgaggactccagatctagtcatggcgacaccgaccactagctaccgtccctagggccatctgcgggagcgctagaaggtgtcggatccaccgcctgcaccgccctttcttcgtgctgcgtgccacactgtctccgcgtgcgccagcatgccgccttcttcggtgagcacaccattgcgcggtgtttcccccaagccgtgaggtggatgagaggagagagacgagcggtggcggcacctagggttttcccccgagctaccattgggatgtaaataattatatccatatatgtagatatacgagaaatgaatttatatttagaatagagttacataatttgagttggtcaccaggattctatgtttgcactgtggggtgtcgaactagaaaaatgatacgttttgattagtgttcttctctatgcaaacgatgagttcaactcccccgtcttataatatagcaacataatactggatgaaatatatcctaatatactacgaatctagaaagagagatgcatatcatctagtactagcatgagacagagggagtatataattataagagcttgtcccagctcatatcgttgtaattgaagcctgggagagttcgcgtctatcctaattcattttttaattgtaattaattggctatgtgcaccgtgaacttagtgcaaaggtcggaaatatatgctttctataaagtttattaagtctaaaactcaacatgcaaccataccacatcacccactagcaataattacatatttaatcacatgtaagtatacaacatgatctatattttatttaattctacaaaccaaaatgcaagcatatccaatcatcacccctcatatcatcatttacacaatattttaacaaacatatctatcacttttataatatttaacatatagttatcaatatgtttcacactaaagcacaggtatcatttgactgataaaccctgatgtttctcttttatttctttttactcctagcttgattgtaatatatatatatatatatatgtatatatatatatatatgtatatatatatatatatatatatacatatatatatatatatattgaatcgcttagaaattcccgcagcaaagcgcggagaatcacctagtgtgtgtatatataaatatacacttcctattgttttaaaaaacatgcatgtgacgaatgctagcaaatctgaaaacggcgtcccatttttcttcaactcgatcgactctagtagatcccagttaacttttcgcgttcccatatgtagataagtatatatatgaccaaattcgtgtattactgataatatactttgatcattctagatcaggaacacaaatttcaacacacggtcccggcccctttgcacctaccagtcaacaagcagtaccaggtcttcaccctggctgtctcttatcgagtgatcaattaatcctagctagtcccatgtagctcagtcgaaacttcataattcagctgaggtagatgaactcatattcgtcaaaggcaaatttcttgcgttccaggtaatctaataaagaccaggtgatcttctttgtggttgaatcgtgacaagtcgactgccgccagtggtcgatcgtaacagtcaactctaggacaggtgtttcgttgcctagcatagtgatgaacttactatgtcatataaacagaagatttagtacgtagctggtgacgacaaccatatatatcttgaagaaaaatctcaaacacgacgtagaaattaacacacggcgatcgagtatatttgggcagcaataactataaatagaaagccccacctccaaatgagatgcagacacacatctcaaggcattgtgcacgtagacacgagtgagctgtttaattgagacttcgtgcagtcgtgctcctatcttctcattaggatttaacttaatctgatcagaagatagtatatgcacacgtgagtgagtttggcggttaaagtgcggtgacagtctgagagtgcgtgcgtgtagttttcaaaagaaaaaaaaagtgcgtgtttcctagttgaactcgtaatagaataggagtagtaaactaaggatacgtggcactgatggaaggcagccgcggtgacaagggcaaggtagtggtggtgatgggcgccacggccaccggcaagtccaagctggccatcgacctcgcattgcggttcggcggcgaggtgatcaactccgacaagatccaggtgcacgacggcctcgacgtcgtcaccaacaaggtcaccgacgaggagcgcgccggcgtgccgcaccacctcatcggcggggtgccccccgacgccgactacggcgtcgacgacttccgccgcgacgccgcgcgcgccgtggcgtccgtcctcgccaggggccgcgtccccgtcatcgcgggcgggtcgaacaggtacctcgaagcgctgctcgacggcgagggtgggtcgttccgcgagcggcacgagctgtgcttcctgtgggtggactcccgcgcgccggcgctgcacaggtacgtgcgccaccgcgtggaccgcatggtggagcaggggctcgtcggcgaggtgcgggggctgttccggctggacgacgccgactactcccgggggatccggaggtccatcggcgtgccggagatggacgcctacctccggcaggaagccaccggcgccctactgacgcacggagacaagtacaaggtcgcgctgttggcttccgccgtcggcgagatcaaggcgaacacgtggagtctggcacgccgccagctgcggaagatccaccggctccgcggcctgcccggctggagcctccgccggctcgacgtcaccagagtgctggagttgaaggtggaggcccgcagcgaagcggagtgcgccgccgcgtgggaggcagacgtcatcgcgcctgcggcgcgggaggtggggatgtttctgcatggaggagggaatgtggtggagagcggtagggaggagcagccggtggtggtagagaagatggaggttgcggcagtgggtggtgccggtgcggcggcggccgcggagaagtggtgtggtcggcggttgctggagacgacggcggcgtaccatggaatggaggcggccgcggcagtttgaccagttaataacgtcggaagagtagtacatatatattcatgacgtttcatggtttggtttggttaggttagctggcgattattttattaattaattgtttcattttttaataattgttgtatccatttaataaactcaacctgaaggttgattttcggaatgtaagtttgcgtcacctcttctcaatatactggagaatgtcagctcatttttttcatcaaactcaaacaattataaaaaaatcactaccgtagaaaggcaacaagtgccggttgggaaaccctaattggtgctggtttttccaatcggcaccacggaagcagtatggatgacactggtcatcggtgccaccaaaaaccggcacctatatagtcctaataggtgccggttctaagccaaaaagacacgtggctactaaattggtgccggacctagctaataggtgccgattctaatgtaaagagacacgtggctgccaaatagctgccgtctggtaatgaaaaatcggcacctatatgttgggtaaaaaaaataaatattgcaggaaattcatccatacaaccctaattccatacgaccccaatttcatccctaagtcaaaattcaccaagtctaaaaactcatgggtccaaaaattcctatctttaaatcctaaacatttcaatatatattctaactcaaaatatgctaagtttaaatttcctaaatcaaaagattgtaagtctaaaatttttgaagtctaaaagttgtgggctgcggcctgctaacttgtcaaggcctagctcgttaaggctcgcgagcagctcgagctggctcgttatctctaacgagctaaaatcctagcccggcttgttagaaaaatgaagccgagccgggcttgtcacgagccgagcgagctaacgagccacgagcttcctgtccacccctacttacatccattgtaaactagagttttggagtccttcaccatggttgtgatcttgcgatattccctattatcagtgccaaacctctccccatcgcgcagcatctgatctagaataggttcaccatgatcgacacacgtttggtcctcctcctcctcgcagccgtcatttgcatcatgcccgtgatagttgccggcacttccctcaccttgctcctcctcgccaaggaagttgcccacaaaaccccttgtaagaagatgtgcatggacctgttgagccgaaagttgtctgtcttttttgcaatcatgacatggacaccaaatttattccagtgcatcaactaagtttgtgctggtggccacggcaacgagagccacgatccgctgtagttatccattccagatccattacattcaatgggtacctgcgattattatcgtttattacaaaccgtgaaggaaaaaacaatgaagatttcataatttacaattacattagaataaaaacaatgaggaatgaccattttatcctatgataaaattgagatttttgtacacacccacgtcacaatacttagatattcatggctaacgaaaatataaaaaaatttctatttttcgtcaatgcgaaaaaatatttggctaatgtgaaacactaacgacgatggcatagatggaataaaacattaattcaaatttagcataacatccgagaacagatctacgaatgactgatggatccatacaaatgactagtgcattttacatgtattaccacatggcaattcaattcaacgagaaaatgtgaatcggggtgagaaataatgaatatttaccttgtaggcttcaatcttcaactaaaacccaagaaaaatcgagcaaaaccgcttccacctcctctagccgatcgatgggcaccctaagataaatttgagataaatcaagctgtcaatggacatttccgtggccttaaaatagtttgactagcattaatttgactaacgaccatgacatagatggaagaaaacattaacgcaaatttagaatttcatccaacaatagatttaatgagattaatcgagtggcaagggagggaatacatgtactgctgttggaataaaggtgctggttcaaaacccaaaaccggcaccttaatttctcttgtcaaccggcacctatgtgtggggcccaccaacggctaatacatgtactgacaagcattgttggaacataggtgccggttctagacccaaaattggcacctttgtcttaaaatcggcacctatgtgtggggcccagcgacgtctaatttgggagggagaagattaaaggtgacggtttgacggttttttactatgaaccgacacctttctctgacacagattttaggtgtcagttttatttaaaaaccagcacctattgtacataaaggtgccattttttgaaaatttggcacgtgggagcaggtgcataggcacgaaaggtattataggtgccagctttacctactccggcacctatagtgccgacaccgtaaataatacgattgactaatgtaagatataccggagaatgtaagtctcccgtaactttttttatacaaccttccttaccgagctctagctggtaaccttccagattgcttaataatgttgtggtcagagtaaagccatagacgcaaaacctgtatctggtctagacaagagaaagtacaagtctataatctctctaatactgtcacgcccagaaatttagcccaaatttccagactattttgtgtattaaatccctgtccaggaccagccagggtacacaaaacgacaagtaataaacagttccaaacgtaaataaagcgtaaaatacttacagaagaggcacttagtcctcacaccgaaacaaaagcagcaacagcggaaaaaggcgatcctagcggggcttcagctccactccacaggcaaaactcaactggggtctgagccttggtcttctaacttcgtcttcagctcagaagcactacacttctgaaaagggggaataatagcaaggctgagtacaaccaccgtactcagcaagccacaccaatgatgcagacgtgcaaggggatacagggatggtttgtggctatttgcataaaggcggttgtaaaacattttattgagcaaaacagtaaaactgttgagtaattaaagtaacattaaaatctccactgatcaacgctacaccacgttgaacaggcccaaccaacccacctggactacagtgcattgggtcgatttattaaggtgggactaatcacggtgaatctggtcgatcgcccataaccgcgggcacggctattcgaatagttttactctggccagaggtgcacaactgtacccacaagacacaacccaccgacatgtcaccgcgtcatcatgtgcccatgatgcacacatcaccatgtcgagtgattgtgacgagacccttcgcataaccctcccctaaccatccacaccacgctaaggtttcacccccacccctcaaaaggcagtgggcggtcccctcttgcgccgcggtgaatccggcagctggacaaccggacaccccggccgacccaactccatcacgcccaccctcgccaccggtgcctaggaaagggtcgagctatacttcagatcaagcagttacccattcccgcttgtggtaagcactgtaagtcttccagggtttcccgtgaaccggtccttaattgccatgggtgcgactcacaaaaccatgcacccacagcccaccattcagtcgcattttagttggataagcacgaccataaaacatggccaaaagtctcgagcacgcggctcaacaagatactagaatgtctaaaactgcaattatcccatcgactgatctagtggtaattaagcatggctaagcataaagttctagctaggtcacataagtaacacaagctagtcgatttattacccagggttgacaaaggatagatatcaagtaaacatggcacaagcgagcagataggtaaaccctgatcccatgtaattagcaaaacatgcatatttatttgtaaacggtaaaacatttataaattgggatcaacatgctcaaggggaatgtgtgacttgccttgcttcctcactttgatcttctaaactcttttcctcgcgaccgcgatcttccgaaacgacggattctacacgctggcacgcaaaacgaggaaaaaccctaataaaaaccaaggaaacagtacataaaaagtaaacaaacatgtagagcttaattttagatgaattttgaaatttgaatggctcaattcggagttcgaatgaattagatatgaattttagaagttttgagccattttaatgaatttctagaattaaactcgatttattgcgcaattattatttatttttacaaaggaaacggacctcgctgacgtcagcaaaggggaggggcggcgccggcaagcgggccccacacgtcagcgagtcaaagggggagggcgcacggtggaccaagtccacacgtggcctcgggggcacgtccaccacgtggacggcccagatcggcccgagccgatcgggcggccgaggggagcggcggccaggggcacagcacggcacaaggccggcctggtcgagcgatagcgcgcggcggcgtgcggccagacgaccgccggcgacagcggcgcgtcgcggcagcgggcacggggagcggcggaggagggaaaaaggagaagggacggtggggattctcaccgaggacggcgacggtgagacgaccacagggaggcggctggcggcggaaaggatggcggcgactggcacgagaggcggcgggaacggcgttccggcgacacccgaccatggcggagacgcggccgagggccggcggggccctcgagatgacgaagccggaggaggtggcggcacaagtcggcgtcgaccggagaggcggcgcgacgcggctagactcggcggtggcggcggagagagatggtgaacgcggcggcggcgttccaggggcagggaggggaaacggagtaggggccggggtgcggcgaggaacggcgatgccgatggcggtggtagcgcagcgcggcagcgacgggagcggtggtggcgcgcgactggaggtgacgagaggcagctgtggctcgggtgcacggtggatgtggtgtttcggcggagttttgtggaaacggagcggtggccggtgtgcggcaaagagcggcggagccgacggtgcaagcggcgcggcgcggcggcgactaacgcggcgggaaacggcgaccggagtttgccgaagtgtggcagcgcgtgggtgcggcgtggggagagcgagggagagtatgccgggctcgggaaaaaaggggaaacggacgaggggagcacggggatgctttttatgggctcgggaaggcgggatcgaggccggacgtggcggatttgaagcgacaacggccggcgacgtgggcgacatcgtgggcgaagtagggctcgatttggcgccaaaaattggggaaaagtgggggatttggtggaggaggtggaggggatcgtgcccacgtcgttggatgcgagctcgggtgcgggagggcgccgtattttgcggcgacgtggacggcaatggcggttggggtcggccggcgagaggtaggaggaggagctgacgggtgggaccgccggtcccacctgtcggcgaagggagagaaggagggacgcaaagcagacttttgcgagcgggccaagggagaaggccggcccgagagggagagaggggggggggaattgggccgaaaggggcccaaagagaggagggaggattttatttgttttctttttattttaattggttaaatgatcttcgtgactttaaaactatttctcgagctccgaaaattcacggaaaattccggagagtacattagggcacaaagaatattacaaaatattcccggccattgatttttaagggaaaatttcaaattctcccattattttacttgattaaattgatttatcttttatttaatttctagaaaatgtattattaattgatttttattcccgaacgaaaatcggggcgttacagcacagggtacacattttttattatgtgttctatatgcatttactcattgagaattagtgccttcaacccattctactcccctctcatgttacttgccccgtcataaccttgccctcttatgtcttgtaaaaagttaatgtcagacaagacagcacaaattgagttcttaagagtcagtgaagaagtgtccttataagtcctttgttgacaaaccgaagaactattgccatctgctcttttttagatttatctcgagcttcatcaaccattatgcaatacttgctattaccaatttcttctctaactgatttttgcactttttgagcaattatgcttaggatttctttttggacatcggatgatgtatacttttcatttcttggagaattttctagcacaacttctcgcacatctttgctatatgaagccaaaagcttaaccatttcgagaaaattatctcgatttaacgaatttagagattcattatggcctctaaatggacacccttgaaatgttaaccacctacaaggacataatcagcacacaaacacaaggctattagatattataatagtatagcctgtagagtttagatgtaaataatgtgcaaaaaaaaaaaagaacaactcatataattatctaatggattcaatggtagtcgtaagccttagtcttgctccttccaccaatatatcattctgcttaaccatcacctcgtcaatgtgagccataaagttttttatattattgtaacaaccaactcaaaagttatgagcagaagtggcattccccatgtgtttcacaaaagcacattcttttccatcattaactttcttccattttgaaactccttcactgtgaaagtaactaagccgaacttgccaactggttctttgaaaagagaaaacatggcaggcaataagcacggtctgtgtgtggtgaatactctagccaactaaattgtttaaaccaattactttggaatcgacgagcatggaatgcaccattcagtgggtactcttccaagataaattggtatggcccctcagatatataaaatctcctaccatcatctcgttggtcagcagggagtgttgggatacgcataagctacgatagcataaatcaaaattttctaccacgtaaactaggaaccatgcaagtattagatagatcgttaccactcgacgcgctgcgcagcgaaagaaagcgctaagaaggcgaaggaacctcgcgatgtagcgtacgtcgatgtagaggaaatagtcgatctcactggctcgaccttctcctcctcgtgcgttctcctcgccgtactcctacgccgatcagcaccgcaaaccagcggcccctctaccggtatccacatgtacagggatggaacgccacgcgcagatgtgctagcacccgcgcgcggctagggttttgctcggggaggggagtggcggctagggtttctcacgtgatgcaataccttcgccggtcacacccctcacgaatatataggatccatgactcaggtctccaagacccgtaggactcctattcggatccctaaccgaattaagctcattttggatctccatccaatccccttattccggcccattaagcgtgcgaccctgtaggttcatgtacactcggctgtaacccgaaaactccttttcgatccacgtgtcaacagcggcccctagcagaacgtattgacccaccaggcatacataaagatcatatcggctaaacctctagtgtatacttgtatgaacccctttgcctcacgatatcggttaagctcaaggctagatatgtgtcatcctctaataactcaataattcacttgaacctgtgatagattatataacttgtgattgactcctcaatcacctttggcatggccatacgcttccataatctatagcatcgaggagcccagagatatctctccataggaggggcaaatcccatcttgattattcatatcccactacatgtttcgtagcatacccgaaaaatacttttataactacccaattacggagtagcgtttagcaatccctaagtaagctactacacatgttgagaaccatgataatcacaggtctaataattaaacaccaacactaaatgagatcactgatgacacaacacatatagcccttgcagtgtctcatgttgggtctatccaacaacatgttccccaacatgtgtctacattattaatttggtatctctatatcatgatccatgagacatgatcatcaattaatacatgtgctgatcatttaaacatatttgttccacatacgatatttgatcagggattctttagaaatagtaacaatcaacataaagagtctcatgaaagaatcacatattcattaaccaataatgagttatctatttcaagaaataatattggataaatatgtaaacatattatgtgatacaatcttctcaatgattacctctaaggcatatcactaatagggagtgcggagatttgaacatgtttacctgggtccctttcaaatgccgtagttacaattccttgttcagctctaaaggttcagcactgttctgattaggagattgcagattaaccggatcaacagcttccacattagttgggttaggatttttcaacagagcctgcccttggagccactggcttgtaaaagcaatcaatcgttgttatcttcctcttcatcttagctaaacacctagcaattttgatgtagctgaaaatataaataaaggaaaatcacaaaattgattattgattctgctttaccggatcaaggttagtaaaactagagaatatagagtggatttacagggtatttacagtgttcgatttggggataacttaccaaaaagcagcagccaacagataggtggaacctggtccgtgagctcagaagatgtgcgcatgttctgcagaccacctctgttggattgcttgctcctagctcctgcttggtgcctcgagcagccactctatcggcggctggccgcgtcgccacgagactgcaatcggctgatcgccgattagcgccggacgggacgagggagaccggaaacgatgcgtcggtgctgcgtgcttgagaaactgaaggccggcccctagcgatcgcccgttagccatctcgcaagcgatgggacttcacgacgaagccgaggtatcgcttgactctctcccgtatatcgagactccaagtgctaatgggctgggcagctgcgcagatggccagatgggctttgtcgggggtggggaatcgttcatgggccattggggggtgccaggcccagttcggcaccccctatagcttcgacactgctaccggcaatggtcgagtgcaccgtcgccggccatgtcggacgacgagaaggtcctatcctcgcctcctgctccactaacgctgccatctgctgtcggtccgccgctgcggccgacggggcggatgaccttgtttcccacagcggcatgcggcacaacttaaaactactggccctcaccggctcaccgcttgcggctcacctccagctaaggttgtccatgatctgcgcccgctctttcctcctccccactggcgacaccaatggcgaagaagaggggggcaacaatgtcttttgttaaattctctctccagctctaatgaaagtaatagtttaatggttctattgttttgccgtaaattatcatatttttaaagtgtttttgagcaaattaacgttcttaatatgtctaccagtaaatatcatatttttttaatatcctgtagcaaattttgttaaataattattctaattctactatgttaaagaataagcttgtttgtttagggtaattttttaccaagccaaaattttatcaactttaataatgtcgcatgtatatttaatttgctactctatttttctcacagtagttcaaattctatacttaaatttgatattgatagcgccaaaatttattgacgacactaacaaaattttgataaaataaaaatgaactctattccaaacgagctcaataattcatatggatgcgagtcttacgccaccgtgaaatatcctactctacctttgtgcgccccaaccagccgctgtccactcggccgtcaacgacgacgtcgtcatgcgcgagagcgaagcgcacgagcgctgaccctgccgcgctgccgcagccaacacgccacgccaggagcttagcactgagcgcgcacaagagattggctggcatgaattagacacggcttccagttccaaatccgaaggaaaaacacagcactgcacgccccccgccccagcttgatgatcgattaattgtcggcagctcatctttccttgtcacatatcgcaagagaagtcatagatgcactagtcatatatagtacggctccccgggacccggccacggcaggcttagctgtgctgtgtgacccagcgagcttcgccggccggcgcctctccatctccggtccagtttgagctccatgtcagaattcacagtactgcagtggacctaaacgcgctcgatcaatcgccgtctaattaggccttgtttagtttagaaaaattataggtttagttgtcacgtcgaatatatcactggtggagaaatgctttctagtcccggttcataaccccctgtagtcccggtttttcaaccgggactatgaatccgggactaaagatcgctatctttagtcccggttcaaataactgagactaaaaatcaatctttagtcccggttggtgttaccaaccgagactaaagatgggagcatctttagtcccggttgataacaccaaccgagacgaaagatattttttcttttttttctgcttttaatattgaatattgatttcacacaatcccatcccatatccaaatcatcacatattacagaacatctccaaatcctcacacaaatcatctccaaatatatcacaaactcttaaaaaaattacatcacaggattctaaaaaattcatcacagattcacatctcacacaaaaatacatcacagattcacatctcaaaaaa

SEQ ID NO: 5011 - DNA, 3299 bp, Oryza sativa
tatattctgacaaaaaataatagagaaaatgaaccacccttcaatcctaatctaaacattttttatcacacatgcaacatcaagttgtaattgttgaaacattacataatacctatagaaacatcccaatgacgccaggtgcaacatttatgaatgaactagtgaaacataataaaatactcattaaaacattcaaaataacatcatgtgcagcataaaaaaaaagatccattacaacaaaaaaaaattgtagtgcgcaacatacccctcaccctcctccttttcttcctcctccctctattacaccttgccactgtactccttgcctctagctctccacggtggtcctccctagggacgctcccggcaggcagtagagttctctatagatagccaaatgggccatccgacacggcatggcccaggcccggccctgcctcggctgaggttagtcgggtcggcacggcccgacctacatgtcgtgccagcccacgggctgcacacacggcccaggcacgacagcccatcgtgcttcttggccttgctttatatggttatttaagtctattttgcatccctatactatttttcttcgatcgtgtcgtgccgggccagcccatcgtgccaaggttgcagcccaggcatggcccggcatgggaacgaccccagtcgggccgtgccgtgcttgggctgggccaaaatggcgttccttgtgccgagccgcgggccatatggccatctatagagttctccatcaccacaagtgtcttccttcacctactggccacaatgttgatgcttttcaccgcattgtcccacttgccaaccccgtcatttgtcagagctccatgtctagtcaagcttctttcaccttgtagctcctcccctcctatacctagtcagtccatatcaggtcacggggagctctatatgataagtgggaagctggtgatcagatggttggccttgcctggtgctatttagggcgatctacgcctggatacagaggtggtcagcatagtggaacagacatcgacgaaggatcatcttccttagggttgggtccccactttctccttggagctcctaccgtcgtatgtccaatccgtttctcgatctagtcgaggagctccatggtgaggatgaatgtggtggtctgagggccaatgagggttgccgacggagggtaacagcaggagtggagactccttgaagcccatcgtcgagcaggggttggccagcagaggggtgttggtttgtgggccatgtggcgaccatgtgtaggtgatggtgtttggtggtagctgagttgatggatgatgaggccaccacagataagatggcaggcagtcgggctccaggcgaaggtttaggcccagagacaataggccgtgcttagccgtggccgacctggtgctaggctccttcctcagtggcttgtgttgttggcttatggcacgacgtctttccttcttgactatagatagcctcttaggtctgcagtcttggtgtttttttcctactatattttttttcgaggaaccgatgataggagtttctcctgtcagaatttatagaagaagagaaatggcccagttaataagggaaaccgggtccaaaaaccgaacaatcacggttaattgaacaggaaaccggcaaaaacctatacagaaaaggaaaagaaagcaactattgagacctcatacaagtcgtcgttgccgagcttgccaaaggcaagcagcttcaacaaggtctccataaccacccaacatcctctagtggagcagaaaccttctgagcgaagccttcaacaaggaaaacaacattaagaatgttgtcaacgctcgtccccaaatggaacccggttttcacctgaagggagagagagccatcatgacgatacctccaaggaggaaacggcacccacaggcatcgatatcatcagcctaggaaagcactaggcaaggttttcacccgagactctctcaaaaatgctccacctccaaaccctcgtcgcgttgcctggacgtctgttgagggtcatcgttgccgagcttgcaagacaagcagctccgactctgcctcaacagtcaatcacaatgcagctcgaccagagaccacctcacacacaggaacccaactgcagcaaacctacggcgcggccgacgaacaacgagatagaacgccggaatccaactccgcacgccacccctaccacaccaaggagctccccggcaatgactggaagcagcctagcctaagaagggaggagtacctaagatgaggggagcgggcgccgcaccgccggagagcactggaagaagaacaactgaagaagaggagagccggatctggaggaaaaggaaggagggagatggaggcgtcgtccccatcgtcggcaaaccgcagcaggtcggcagcccccggccgggtccgtggcagccggcgccagagcagccgtcgtcgccgacgagcccgcgccggagaagcccatcgtcgccgccgcccggcctcgacgttgctgcgggatcgagggccgccgcccaccgccgtctcgccagtccctcgtcggctcgccgctgccggtggaagtaccagatccggccaagggagggccggatccgagctcaccacgcgctggcctgggctcgtcgccgtcgccaccgcccggcctggtgtcgtgtagcacgcgccgtcgccgccgcccggccacgtcgtcgcgtagctcacgccaacgccgccaccatcccgccagcccctcgtaggttcgctgccgccaagcgagggccggatccgagctcaccggctctagatccgaacatcgtagccggtgccgtgctcccgcctccggtctcgtcgtcgccccaaccgcgttgaccaagtgagggagatggggagccccgccgctgccgtctttgcagctgcccggctttgccggcggctgctcgggcagcggctaggcggggggaggaggggaagggtggggcggcggcgggtttcgccgcccgcgtcgcccctggggcggagcgaccgagcggttttgactacagctcttgatatttttcctactatattagaatttaacttgcattattttgcattgtctgatgcagtttgtaaaaaaaaaaaaactcaaatgggtacattccagcacggggaatttaaccaattgagctatactaacttcgctatcatggtacatataagggttctttagttgaataccacaatttgccaaactcgtggttaggcactttgaccaagttagcctagtgcttagttcattgtcacacttagta

SEQ ID NO: 5012 - DNA, 978 bp, Oryza sativa
ctcagcaactcctcgtgcagcaagtccctgtgaaccctgccatacgcacggccaatcattattggcttgttaccgtctaggtacacgatagtatccttccagacatgttcaatgcagctctccaggcccaggtctggatagcaaaagatcaagagccataagtccatcatgtaccaaattatgatggcaacaatgttattcagtgctgaaaatagtatgctacctttgaattcatcctcccacacaccgtagttgttcgtgaatggaagatcagggccaatgagaccaacattgagccctttcttagctgactctgctgctagggataagccagctggaccgcagccaatgatgaccaaatcaagaactgaattttcatcgggtatgggcagcagctgcacacaaagattcagagcacgtgctttattttcttgagacaccatttatttattcgttccaatgcagagtttcaggaaataaactaaaaaaaatcctgattgggctgacaaaaatgtttcaaaagttcagtacaagttattcgcattcctagcagtctagaaactttgaacaatttccaggatgtccatgtgtcaagaataaatggcatgatttcggggaactgtgcttgtgtttagcctagcacttcacttgttgcttgaatcacatcaagtcaaaggtgtgatgttggactgcaaatgcgacgcacgtacacttcatcaaattcaacatctctgagaaatttgcaagcagacaataattaatgcaacagtacgttccaagttgcatccgaaggtgtaattagtcagcagttgagttgagaacagtatgagatactcttaacttatcccctaattaacaccttttgtacaggcgacgacgtgagctcccattacaggagacatggagaatagtccaagctccacagagatatggcaggcagcagcaagcatgggcaaccagaggctgctcttttttttt

SEQ ID NO: 5013 - DNA, 1793 bp, Oryza sativa
tttcatatccctaatggagttacaaggcttattactcgggaaactcaaaacttcatggtgctgttttgcttttattggtgctctgaaggcatccattatgtaattctcccttcgttccaaattgatctacatatatccattatgtaattctcccttcgttccaaattgatctacatatagttttttctgaaattattcctaaatgatatacatatttgtgttaatttattaagtctattcgttatttatgcattggagtaaatgtacgttgatgcatgcagctatgcacacaagtatttataacccacatgcaatatcttgatttgctattggctaggaaatagtaggaatggtgcctgcattgagtttgttgctagaataaatataggatgagagagttatttgcttttcttggttttggtgtacctatgaaatatatatgtagatcaatttggaatggagggagtagtttttagaaagctagctctggtaggatttttagcagaggttttgggttttattgtatcaggtttttagaattgattattgggaagagaaaaactaggaagtttatctaagaagtcttggtgacttgtagtttacattgaactcatttaatatttctacagaaggtttttatgattttttgtacggaaagtctttagaggtttatttgatttcaaatcctcttctatatagaaagtattatgatctcaaataaaatctatatattattgttaacttatgcacgccaacaattgtttgccttttggcctagggatgaaaatggtcacatgaatttccaactgaccgagcatcgtttacatataaattatatcattttcgattcttgacatatatatttttttaatctcttttagcatcgttattgacattatatatttaaattaataaatatgatcaattctctaccaacggggaattatttctgaagggatgttagtgttttcatccctattttagcgccaaccctagtaggcagtagtactataggatcaaaaacaaaaggaaagtttgcaaaaaaaccaaataaaaggatagttttcaagaggtttgatccctagcttattttcttatgaaatcgagccgtacacatgtttacactaacattttgttttctttcatgtgaactaaaatatgcagtatttagaaagtaccaatatcctccaaaaattaggtcccattttgttttgaaccaaaaacataggaattttatagaattgtaagtttataagatttttttttctatatggccttttggaataaagggttcaaaactattgaatcttatgaaattcctaagaaatgccttaatttatacaagttttgaaggatttttaatatgagatctagaaaatttcctatgagtctatctatctcatctagcatatgtttttcctgcggtccagtcaaagaattatttttgtatttttctgtgttttataatcctctagttagcatttaaatttctattaaaatcgtgtatatatatatatatatatatatatatatatatatatatataaaatccagagtttcgaagtagccctttttatctactcaatcctccattcaaaaggggtccttcgtgctctttttttacctggcgagaggtgtgcgtgtgggcgggaaaaaccaagacgaaggagtgcgggggaaaattgggttaatttgatccatgtctttgcaaatataccatattgaaaaaatattattactattagtgaaggggacatatccggtgaaaacaagctaagtgttggaaactcgtg

SEQ ID NO: 5014 - DNA, 6616 bp, Oryza sativa
ggatgctatataccaagaatcagaatctaacaaaaacaagttcaaattcagttcaaacttgctttcaactagttagtaaagtagttaatattaatacgtcaataattgaaaagtttcatgctcatttgaattgggtatatactcaattacaacaatggtgcccgggcaccatggagcaccaaacaaatttaatatataggacactcatatggggcaccatggtgcccgggcaccatggtatctaatgcacaaaatcactcaaatttttcaaaattttcaaattgtgagtatatacctagttataataatttgattcatacctatacttatcaacaaaacaactcaaatttaactttatttcacaatccatgattacatacctaactaattatatgtatggatgctatatacctagaatcaaaatctaacaaaaacaagttcaaattcagttcaaacttgctttaaactagttagtaaagtagttaatgttaatacctaagtaattgaaaaagtttcatactcatttggattgggtatatactcaatttcaacaatggtgcccgggcaccatggagcaccaaacaaatttaatatatatatataagagggatgtccttaagtggcatagaaagaaaacatctccctagaaatatgccatgcacatgtttagaaatctggacttgttgtcactcttaaattaacacgagttaatttgcagatgaaacctataccaagcagtacgtattgaaaaggacatcgatcgatggatcaaacagttggaacatgcatgctactaacattcaggaaagtcagaacgtctagaagcgaagaagcgaagagatcgagatcgttggcgagcggaaaaaacaattcaattaatggtgaaggaattaatgtgacactgacacacgtcatgtaggatatgttagttctcatcttctagacatgtggaggaatttacgtaatatggtcatatttagtccgttaaaaaaaattaacctcgacgtagaagtattctcttctaatacaataaatatatatatgatcctatcttaaaccgctttcacaaaatgaaatatgtattattatataattaattaagtatcaactatttttttagaaatagcttcgtatgattttataaaataactttcatatagaatatttttaaaaaaacacaccacgcgtgaaaaataagagagatgatgagttggaaaaatagagggaagaatatatacagccatatgtagtcatatcttttttaggttaagtttttctgagactcagagattacctcggtagcaccatcatcgaaaccaccaccgctatttggttgcttttgttggaattaatagatgggctaaaaccattcgaagattaattctttggaaaatcacaaaagcccacctcatgagatggcatgcatgtggagtttagtactaccttgtttattccaggagagggggacctccttaaaagggaggatgccctcctagccacttgaaacatgtgtggtggagagaagaggggaaacacgcgcactcgctggcctggcctggccaggcagggcaggcggcgcgcgtgcacgacgtacgcgtcgaatggtccgcaaaattggctcctcacccttgcgcagatgcagcctccttttgcagttttgttttgctgcggaaaattcggatttgttttgttttggaaacattccgaaaaatccggtgcgtgaaaacggcgtggagtcccgataagttacgcgcgacttatccggttcggttacgcggagtggagatcgtgcgggcgccctgatcaagcgacctatctctatataaaccgagtcgccgccctcacgcaacatacgcgaaatcaatctagggtttacctcctactatgtgctgcgccgtcgctcgtagactactccatcccactcgccagcgtgcaccggcgatcgggagagcaggtcttcggaacctctgccttcgacgtcctgcaccgggagaaggcggcaataaggtttttgggaagcgcttagcgcgactgctccctgttcgtccgcgacggctcgccttcctctccgctcgcgtgctgcgcgccttcatcgacgcccgcaaccgtgagtagttcctgccgagcaaccggtctttccgccacctcggtacatgttcgatatgttacgcatatttgatctgttcatgttttacttcttagtttacatgtgtagatctaatgatgcgttcatgctagtttacatctgcaatgtcatgatttatttgtggaataaattaaatcattatgtgcttataatttcaacaatccaaaaaccttattataggcgctgtgattttaccgtggctagttttgccgatgcactgaggccggataaattcaccggtgtgcactttaagagatggtagatcagggtcactctgtggctgacagctatgaaatgcttctgggtgagtactggcaaacctgaaggaattcttactgctgatcagcagaagcaattcgaggaagccactactctctttgtgggatgcattcttagcgttcttggcgaacgtctggtcgaggtgtatatgcacatgactgacgctaaggagttgtgggatgcactgaatactaaattcgttgctactaatgctagcaatgatctatacatcatggagcagtttcatgactataggatagctgacaaccgttctatagtcgaacaggctcatgagatacaaaccatagctaaggaactcgaactccttaagtgtgtcttacccgacaaatttgtggccgggtgcattattgcgaaactacctccatcttcgagaagtttcggtactgcactcaaacacaagagacaggaatactccgttgaggggttggtagcatctcttaatgttgaggagaaagctcgggaaaaggacgccgcgtctaagggcgatggtgggcagtccagtgccaatgttgtgcacaaggcctagaacaagagcaaggggaaatacaaagctcaacagaacaccaacttcaagaagcagaagaagaacaacaacaatcctaatcaggatgagaggacttgctttgtgtgtggccaacctggtcatctggctaggaagtatccacagcgcaagggtatgaaggcacctgcagggcagacttctaagtctgctaatgtgaccattggcaacactggagatggaagcgggtatagtaatttacctactgttttttcagttaatcaatctactaattggtgggttgatactgcggccaatgtacatgtttgtgctgacatctcattgttttcttcttatcaggtcgcacggagttccaccgtcctaatggggaatgggtcacatgcttctgttcatggtgttggcacagtagatctgaagtttactttgggaaagatcgtgcagctgaagaacgtgcagcatgtcccttctatcgataggaatcttgttagtggctcccgtctaactagagacggatttaagttggtttttgagtctaataaagtagtcgtgtctaaacatggatattttattggtaaaggttatgagtgcggaggcctgttccgcttttccctttctgatttctgcaataagtctgtcaaccatatttgtggcagtgtggatgatgactaatgtttggcactcacgtttatgtcatattaattttggcttgatgtctcggctttccaacatgtgtttaattcctaagttttccattgtcaaaggttctaagtgccatagttgtgtgcaatcaaagcaacctcgcaagcctcacaaggctgccgatgagagaaacttggcaccactagaactactacattcagatctttgtgaaatgaatggggtgttgatgaagggtggaaaacgatatttcatgatgttgattgatgatgctactagatttagctatgtgtacttgtttaaacgaaagacgaggctctagactattttaaaatttataaggcagaagttgaaaatcaacttgacagaaagataaaaagacttaggtctgatcgtggtggagagtttttctcaaatgagtttgaattattctgtgaggaacatggcatcatacatgagaggacgcctctctattctcccgagactaatgggattgctgaaaagaagaaccgcacactgactgacttggtgaatgccatgttggacaccgcgggactacctaaggcatggtggggggggcattgttgacctcgaatcatgtgttaaacagagtttctaaaaaaaataaggacaaaataacatatgagatatggattgggagaaaccatcactttcttatttgcgcacatgagggtgattggcgaaagtcaatgtaccaataacgaagaagcgcaaactgagacctaaaactatggactgtgtctttctgggatatgctcatcacagcattgcctatagatttttaatagttaaatctgaggtacctgacatgcatgttggtacaattatggagtctcgtgatgctaccttctttaagtgctttttcccaatgtaggatacacacagtagttcgagccaaccctctgaaataattcccagttcaatcacaccaccagaacaaactgaacatacacatgaacatgtcactaaggaggatgtcagtgaagctcctcgaaggagtaagagacaaaggacggctaagtcctttggtgataatttcactgtgtaccttgtggatgacactcctaagtcaatttcaaaagcttatgtatctcctgatgcagactactggaaggaggctgtccatagtgaaatggattccattatcgctaacgggacttgggaggtgacagagcaaccctatgggtgtaaacctgtggggtgcaagtgggtgttcaagaagaagcttaggcctgacgttactattgaaaagtacaaggctcggcttgttgctaagggctatactcagaaagaagacgaagatatctttgacacttactcacctgttactagatttactacaattcgtgtgctactttctctagcagcctcacatggtcttctcgttcatcaaatggacgttaagacaacttttcttaatggagagctggatgaggagatctatatggatcaacctgatgggtttgtagttgaaggtcaagaaggcaaagtgtgcaaattgttgaagtctttgtatggtctgaaacaagctcctaagcaatggcatgagaaatttgacaaaacattgacatctgcagtctttgcagtcaatgaggcagataaatgtgtgtactatcgccatggtgggggtgatggagttattctgtgcttgtatgttgatgacatactgatatttgggcaaaccttgaggtgataaatgaggttaaatcattcttgtctcaaaattttgatatgaaggatttgggagtagctgatgttatcttaaacattaagctaattagaggtgagaataggattacactcttgcagtcccattatgtggagaagatcttgaatcactttggctacattgatagtaagccttctccaacaccttatgatcctagcttgttgcttcgcaagaacaagagaattgctacgaatcaactggaatactcccaaatcattggctcgctgatgtacctggctagtgcaactaggccagatatctcctttgttgtgagcaagttgagccggtttacctctaatccaggcgatgatcactggcgtgcgcttaagcgagtaatgcgctgtctgaaaggtactatggaattggggcttcactatactgtgtatcctgcggtactggagggttatagtgattctaactggatctctgatgtggatgagattgttaacaaccaaatttggttatatcagtatcggagatgaggataagaacgaagcagaatcaaaggtggagatcgattcgagaatagagtaagaatcggttggagtccggatcggctacgatcaagatcggctgggtccgaatcagactgggtaagccgatacagccgattctgacaatacgacttggtgtgcaacatcgggttgagttgatatgcttcaagatgattgccgcgcatggatagagtcctgagaagtctaccgcaaagagattccttagagatatgtttgggcaaaagtctgccacaaagactcgtggtatcttagagtttattagagataagagtcgtgtccgatatggacatagtttgtattttcgggtataaatagaccccgaaccccatgtaatcaattaacacacacgttcaatacaatttcggcgcatcgccacccttttgctttagttttatttcgacgagttcttgctttcgggttgagctgcatcggtttcaatcttcaacaagaggtaaaacttgttatgacggcttgcgttctcgggattagtgcttccatctttatgacactctaatcttgtttatgtaattcgttgagttatcatatatcttacataatctttggcaatatcgctatctaacctacaatcggctaacatctatcggtagagggcagccgattaggttagacatcgacgttgacttagattatatgagatatctaccactctatgaaacttccagcgacttgattgtttagatattgttcttcttttcatacttaatgct

SEQ ID NO: 5015 - DNA, 2456 bp, Oryza sativa
gccgacacaggtttaccatatgccgacgagaggggtcccagaccaacaacaggttaggtcccagaccttactgtgccaggaagcccaggggtcctccccgacaccaccccggcgaatccacatgtctctcggcatcaaggctcccctgataagctagttactcagctaggggtgtcccattccacccatgtggtcgtacttgtcttatgtttggatgaaattccaaggaaacggtccttaggtgcaagagcgggaaaccgtatacccggtacgttccccggtccgcggttttggaaattcatttagttcgcaagcaccgacccaggtgtcgggttttccaagtcttttgtaaaacccaagttttacccaagaagtttttcagattttaagtttgaaggcgcccgtcgatactcgcacagggtgcacgaatatcgagacgcaactagatggttacaaggggacacgatataacaattatcaaaggaaggatcaaatgcaacaaattaggtaggtccgccaatctgccttgcagacgggacaacagattaagtgcgatcctatcaatgcataatatttttcaagcaacataattaaatttcaaatataggctcaagatgttcaaaggtggcttgccttgctcgagatctggagcttgatcctcgaaatcctcgcactgcgggtcttcgggctccgaaactacacgcgaaacgggacaactcaacaaacggcgaaaataaagccctattaatgacctctaagcgtgccattagatagatctcgagatttgaggaattttggaagttgaacggagtcaaacggatttacggttgggaagatattgaatttctaagatttttggatttttggtctaaaggaaaaaggatttaattaaattctttttggaaaagaaaaagaaaagaaaaggaaagagggagggattatagacttttcctcgggcggctagggcgtggcccaagggaaaaggagcggaccgaccgagctaaatgggccggccggcccaaggcggcccaagtgcgcgcgcgcgggaggggaggagagagagggccggtggaccgggctcaccgtgcgcggtcccgggtgggacccgcttgtcagcggctcggctcaccgtgcggagggagcacgcggcgtacgcgcgcgggcggggaagggacatggtgcacgcgtgcgattagcggtggaagcggtgcggcgggcccacgcgcagcctcacggctcgcggtggaacgcgcgcacggggaggggctgaccgcggtcggcccgtcccgacctcggctgagctggcgccgacgtggcgcctacgtggctgccacgtgggctggcgggaggtagacgacgacgccggccggaacagacggtggacaacagcggcgagcggcggagcgaaccacggcgatacaggcgaaagcgagcacaccgggtggttgcacgagacgaggggagacgagccaacggctcggattcgccgtaggaagcttgacggcggcgaatcgcggcggcggcaaccggcggggagggaagagggaaacggcgacgaggtcacgaggggtcgattcccggcggtgagagcatctacgcggccacgggaatccgatgctagcgttggattgggcggagctacgccgagcgaggctggcgacgagcgggtgctacggagctcgagcggcgacggcggcgagcacacggcgagcgacggcaacggtcggggcggcgccggctagctacggggaggctactcgtgctaccaccgaaaactaagggggggagatggagcgaggaggaaaaacggagagaggcactaccgagatgaggaggggcgctgtgacgagaggccgacggcgcgggagtgatctctccggcctcgggctgaggaagaggaagaagagggcgcgcccggagtccccttccgtgtccttgctcgtgccggctcctccgacacgcgcaacgacgaacggcgacggcgaacagagcacgggaggcggcggcaatagcgcggaggcgaatgggagaagaaagaaaaaggggggggggagctcgggtttatagggggcggcaatgtcggtttcgaaaccgactttggcggtcaaggcgcgagctggcgctccggctagcggccaaaacggcgacaggagggagggaggatgacgccggcgggaggaaaaaggggaaaaaggagggggagaaaggggcttgtccccttgcctcttcgggaaaaggaggagggagcgggggcgtcgcggcagagggaggagggaggctctgcctctgtcccttggcggcttgcgcgggagtggcggggccgaggcgatgacgacggcgatgacggcggggcggtttggagcggcgcgacgacacgggcgacaggcccgtgcaggggctgacggcggcggcgaccgggcggtcggccaccacggcacgcgcgcgcgggtcgcaac

SEQ ID NO: 5016 - DNA, 2764 bp, Oryza sativa
gcccctccccccttcccaccctcgaggccttctgcctcggcggaattgctggcgcagccccccgaagcacggcgcaagcgtgcttggcgccgtcccccccaacccgtagaccttctgcctcgagcgggtggctggtgccgccccccatagcacggtgccagcaaccctcccacccctgaggctttctgcctcggccgatttgctggtgttgcccccccagcacgacgtcagggtagctggcgccgacctctacctccctgccaacaacaaatttcattggacagtctgcaaaaaatgcaaatatcgacaaaacaggttccacagcaaatattgacaccaaatcacatatcgcatagtccacaagctaactagattgacgaaaaaagtccacaactccatcacacattccacacatcaaacaatactacaagtccatcacatacttcatacaaccaacaaatccaaaagtctgtgaaacaagttaacacatgatacaaagatcaacttcgtagaaatcactttttccgttggcgccgaatagcttgcaagccctgagtatatctacatttgaaaaaccaaagtttagaacatttaaaaaacaaagtgagggaaatcaagtaacacttgagaatggtaagctcattttacctctttttcgctggccgagtggatcgtaagttgtattgggtaggctgtgacgcatgaggcgcatcgggaagttgcgacatgcctatctcctcgacgtctggtgtgatgtagccctcatcctcctcctcatcgtcgccgctaggtggagcctgtgccttcccctttccccttccctgtggaatgcgtgacgatgacaaaccaccaacttgttcacgctcttctatcctgatggagtgtcgagcggtacttggacgcacggattaaggtagtggtagtgatactctccgcagttggtacacgtcgtccaatccaacggacctgcaacctaatcttgcagcaagtttgcggcacctttggctaactttttgaattaaaaaaaaaagaagtttgttatgtataagtcaagtaatgcatagagttaaatcatttttacctctaagacattgcgaagtttgttctccgtatccttaccaccccttggagatcggagggcatgccccatttcattcacactcctaagaagctctctggactaacagcgtgagaagatgtatgttagggtttagggtgcaaataaaaatcactgtgacaaatgcaagaaaacttacgactctgtctctaagtggggcgtgctccatttgatatccaaccctagtccgaacgtcgtagggatgccgcccctcatcagagtcgtggtcttcctctatgtcggcttccgtccaagtagggcgtaggaacagtctatatgtcctatgcagccaacgaaggtactcagtaaaaagatgattttggtgtattgcctcgatgtacctatcattctcccgctgtcctccattcatcaatggatctattatgctctagcacccagtccttcaccttctttgttctcaccctgtcgtaccttcacaagtggaaggtgatgatatgtaaaatagggtcaaatggtgcaaaattgaacattgacaatgaaagcaagcaaagataaaaaatattacttgtgtagatcaactccagttgagatgtcctcaacaagacattcttgtctcttcccgaactatcgcatgacacggtgcggaaggtggtattcaactgcccaaaaacaaatcaattggcactagtacatgaagtaatcggagtctcgattgcataacgagttcagtgtaagacttgtagcctcagtggtgtggtatggtaaccactcaatctataaatgttgaatagttgtcgtaggttagtatctcaatcatagaagtaaatgacgaattagaagtgatagtaaagtacttatatgtgcaggcagtccatctcgttgatgtactgcttgtatgcgatatcccggtgagcatgtgcagtggctatactctcaaacaggtaggccactgtcttctctatatatggctcattgtagggccaaggggtaaagatttgcctccacttaggcctgccaaccggtagtcttagccacatccacatctgaatcaccagcacacaaccactaatgttggatgatggtgcctggcaacaacaggcctcgaagagctgtctataagtccatgccaacaccgttggagccccaactaaaacggcccagatcatcaaggttagtgaccaaagaaatccaaattgccgaagcaatgtcacccccagcatctagaaaaagaacccctcccaataagtgcaagatgtatacacgggcatagcactcaacacgccatggctcaacgtcgtcgtccaggtctgaaaagttctggctaagccaagagacgggtattccgttatgcttcttcttgctcccttatccctgctcaatgttgagtgcaatgccaaacaactgctccacttgtgcacgccatccaggattctctgtcttgcccgtcaccccatgtccctgtattgggagggccaagatcatagccacatcttgaagagtgatggtcatctcaccactcaccactggagaggtggaagctaaggtcacgagtgaaagaagttcttcacctaaacaagtctcctcattacattaagaataattttgtgacatattcttctcgtcgttaagggggtgcaagtaagactgagttggtacgagaagacttggatgggcaaggatagaaga

SEQ ID NO: 5017 - DNA, 8509 bp, Oryza sativa
ttttttccacctctacaggcggtaaaggtttcaccgagttgggtcaatggcgcaatttgggaaaattgcaaaaaccacactaaatgtcatcctgattttgaaattcccctaataagattatttgcaaatacacagtcctaattcaccttgattcgatattcctcaacatttgccgttgttcgcattttttttccttttccctcatgtgttatatgacttagcgcatctaactcagtgtgacatttgggattgtttttacaatttttccacgcaaacaagatagcccatgtgttacgcccacatgtgcgattaggtatgaccgaattaagcaaaatgcccatggtcgagcgccctcctgttccacagctacactcagggccggtcctgggattttgaggccccagggcaaaaacttatatggaggcctctatatatatacataaactaatatatacatatttatatagtcttataaacacacacacaacatttaatattcgatgtgataaaattatctatatataacattttaaaacttcaaagagaaataaatagcagtagcgagcagagaaggtgaccggcggacgatcgacacgagcgtggctactagcgagccgcgatttgccgacttgttgtttccgtttgcaagacgccgagaagtccttgagagcgtaggagcagcgagcggcgtgatgtgatcgaggcggcacgatgcgagtggcgtgatgtgatcgaggcgaagcgacaggagagtcagatgaagatcgcttcggtttcgctgaaacaagcctaacaatggactaaaattcattttctgtattcggctattcagctgcctaacttaatatggacccatggcccatggactttatatactatatgtgtacaggggcccctagatttggggggcctcgagcggccgcacggcctgaccccctcccccccacccaaaacacacacaagggccagccctggctacactcaacctcccacaactctcctctccttcccttgctctaaccacttcattagcaaactttaaatgttttcttctaaattatttatttttcaattaaacccttctattatttgcaatttcatctttataacaatatattggtcgacgggttatatctgactatgatatttgagggacgtaggatatggctcataccaacatatgcatgagtatggaataaaaacatgggagacatgagttttatactggttcaggctctcgtaaagggtattggacctctccaatttatatgtattgagctagggtatatcacaaaagaagaggaagcaggctagctaatctagcctaccaaactaatctcgatgagcaagacaactggtaatactcggtggctagcagaaaaggcttcctcctagtgtgaactcgatgtggcctgatggaaagcttataattcgatacccctcctcggaggccctatatttataagaacatgacccgttgtgtaagtagaactcaggatcccaaataggatatgggcagataagaccttatcatccatatattggactacactgtccctcattaagtggatcagattccttcattgtccatatttttattcatacgtaggaacaccatatcgtataagaatagataaatacggtattcctggtgataataagtgcaagtatattaggtatgtcatatctacaacattgacaatatcacacaattatatcccgctgaaaatgatataaatatttcaaccgttataattcgttaaaattcaatgttccatgtaagagagtgtaatatttcaacataaatactaatatgtttcacacttaatgtttttgtagtgttcttttggatatttcaataactattttctatgttcttgtggttcctgtggatattttataatgtttcgacaagtacaattcgatgttttcatgtataatataaaatacttcaactagaaacataataattttttatccaaaatatatttatgtgagatcttactgtaaagacttatttacaataatagaacagtgtagttagatctcatatcagatagacaatatagtaaaaattagtttaaattttgcttaataaattattaagggaaagaagagagagaatggaagtggagacaagccgtgtgtgagaagtatgcatagcctgatgcacgcagaagtcatcatgcaaagagtggatagagaaagaacaagtgcagggagaggggtgggacaaatatttcgtgtttttattaggccaagtgtgtaggcgtctccgtgaattaatgagcgagatgattaattcgtgttgtgactagagtcatcaggccttcatgcccatatacatgcaatcatttagaatatattaaaagttatctaaataaaatttctatttgcaagacctttttgatatatttgaaaaagaattacaatattttagtcattactgaatatttttaaaatttgggtaaaattttgtaatagatactttttccaaaataaagtttcattttaaatttacaaaattcaattaattttctactaaaattttaaattttcaactcagttgttgaaactttcaactcaaaactcaaaatttgaaaaactctacccaatagttgattcttttcactccaaatataaaactttctaactcatattttaaaacttaactgatatttttaaaataactactatccgttgaggttggaaatggaatcggtattggtatagcgtcgaaaagtctgatgcgcagtcgaacacggtcacaacaagagggggcgaggtggaagaggagccgcactgctagtatgggcatgcataggtcaaggttcacaacagctgcggagctggaacagaacggaggggggtgcaccactttgccgaatatatgggcacattaatctaacagatagtgttttttttcatacatagaggggataataatgctctaactaatggtattttttttctgtagcagcacattgctctaactaatagtattcttgtacaacttttaacataaaaaattgaaatgtgataagcaagaaaaattcttaccaaaaataaagggtagaaggaagcctcgaaggaaaacaccatgaagagaaatttagccagtgcaggttgcaaaagtcctgaagccaggggcgaagccaagataaatgatcgctagggtcattactaaccgggtctatgttttcaaccagaacggattgaaaacaacgcaatttcgatgttccaacttgggacaaaagtagattttgagtgaaatttggaatagtttttcaagaattcaaatttgaaattgtaaaattaaaccaaattaataaaaaaatatcaaattttggtaaaaaaaaaagccatattgctatatttggaatctaattttaaatcgaattggtgaaccctgatacaatctgggtgtgttcagacctagctacgggatctgaacccttccctcccagcacgcaaaatagagcgaggttaccacatgattaattaagcattattagcttataaaaaacttgaaagataatagattaatatggtttttaaaacaattttctatagaaattattttgctagggaatttgaaaagttacgagccgctggccttatgcatggtctcaaatctcaaaaactcaaagtatatgcatattcggctgacatataaccataaatgctaggtaattttctatttgctgctgctagtattgtttctagttgtcaattggaatttaacacaacaatcaacaattaatgtcaccggggtctaatatttgttttcaccggggtcatagctggtaaaataaagaggatatgagaggttaaaataaaatcatcggggtctactgaccctggtaattgactgtacctttgcccctgcctgaagcagatgccttcgtttataatcttacaccagttatttaataaccacaaatttagatgttcaatagttcaaaccctaacctataatatggataaaacgaaaaagcactatcagtattcagtaatcacaataccttttgatttttgagatttatttggaacaaaaagtaaattagattagaagaagagtagaaagtcgatacctttcctgaaaacttttggccttttggagataacactagaggatgtcatgacgagttgagattagagaacacgatgatggagatgtgtatagcttgagatgtgtctaaccacgagatagcaattgatttccactactcggcgtcgacggcgatggccgatcagggctgctgatgtcgaatcgacaagcatcgggtcggcgacaggaaacgattgaggagagcgattcaagtggtatagaaggaagaaaaggagaaaaaaaaaagagaaaggtgaatgggcgggcggggcggggcggcgcgacaaagtcgcggggggatcgaggcgtcgctgccctctctggacgaccacaagatttggtgcttgcgagcccatgcaccagtgccttttgcttatgggaaaaaagtgcacttagactcctttaattgttcaccgaatctaattcgttacccttaactgtaaaaccgggtagaatgactccccgaattattaaaaccagtgcaatttgactcctccagtggttttggagagcggttttgcttacgtggcgctaatgtggcagtgctaacccggttttcattacacgtggcgcttatatagcatttagaattaaaaaaatatatgtggggcccatccgccattcaaacgcaaaatatatcatgggacccaccgacatatggaccacgtgtcatcctttttccttcccttcttcctcctccctctctctctctcccttctctctcttctctctcccccttttctcttccccctttcgaagcatcggtggcggcggcagccgggggctggagtggcgacggcagggtgcgggcgagggctggagcggcgacggcctcgccaccgcctgccccgtctccaagcagtcccgccgccactccccctctaggcccggccggtgctcggatccagcgcgaacccggatgttggaagcaagcagtaattatgcatgtgctacttaattgaatgtggaaatgtagatgaaatcgattttttttgactgaaatgaaatcgattgtgaaaatggatgaagaagcacacaaacctgtgagctgcagctgctgacgcagcgggcaatccgggagcagacagggacgacgagcttgtcgaagtggtgctggtcgaggatctcgacgatctcctcgagctcgtcggtaagcagcacctccttctggcagttggtcgccggccagtggcggaggaagatgtcccggacgacggatgctgccgtagtaggagagctggcggtggcatgtgtgcacccaccgcgtccggtgtagcggcagcagcacgcgcgccatgaacgcccggtgctcctccttgagcggcacgacgaagccattgatgatgctgccgcagatctcaagcagctcgccgacgccgcagtggcgctcgggctccgccggggacgtgccgtagacgaaccggagcagcgcgacggccatggtgcgctgcctaaacgcgcgctcgacggtgagcttggagtagagctggtggtagacggtcttgaggcggtcgcgctcgcgcgggtcctcggaggcgaagagcgccacgaggccggcgaggaagctccggtcgacgtggttacggagcgtcctggcgtccgcggcggcgaccgcggcggtgagcacgtcgtagacgaggtggaggtgcggccaccactggtggagaaaccctttgtagtcccggttcgtaacccccctttagtcccggttttcaaaccgggagtgccaatccgggactaaagatcgctatctttagtcccgggtgaaatacccgggagtaaagatcgatctttagtcccggttggtaatcgatctttagtcccggttggtaacaccacccgggactaaagatcgagctgacctttttttttttgcatgcccctgttgctgcatggtttatatatatatatatatatatatatatatatatatatatatatatatatatatatataaaccatgcatatatatgtttcaatacatatatatgcatacatatatatatgtatttatacatatatatgttatgcaaatgcatatgtatatagatatatatatgaacaaaatatatttacattatagaaaatatgtacacatgcatatagaaacatatatagtcatgtattaattacaatccattatatgtcctagctagctacgatttcgacgtagtagtactcgctgctagctcagaagctaaggaccggtgaattgtgtttccgtcgtagtagaattcacccttgggatcaaggatttcttcgttgatgaatcccatgagttgttcttgaaccgccgcgataaattccttgtgtgtggtcaggttatccctcatgcgaataaactatatgaatgtatgaaattgattagtaattaaacaagaaatcgctacgtaatgaaattttgaatttatttgtacgtacatcgagctctcttgtggtgatgatttggtctgcaaggcagtggcaatactcgcacacgtaatagccgcacaagttagttccctgcttttactttgcgcactacaaataaatgacaaacaacgagagatctaattaatatacacttgtatgtatttgaatcggagaaatataaatgtagagcatgtgtactcacaggaaatttgaacttccgcctaagtctttctctccatttgccgcggaccaaatgacggaaccgataccaagccctacatggagtttaaagctatgattcgtagtagcaattaacataacaagattttcttaattaacaaaggaacttatgacggtacctgtctataagttcgaaaaccttgtcaaacgtagactctttttttccattgagtcatatacgttgacggtgcaggcctccaggtcgatgagtaaaagcacccagtggaatctgcaatgtgcgtgggatgcattacatatgaaacacttagcaagttcgtacgggaatgaaatttggtatgtaggaagacagtaaaattaaactaactctgtgttgtatggcaacagtatgaacgtcttgtaatgctgcgccttcaggagatggacgagattgtcctctgtttcttgtggatattggtcgagcattgcgacgtttactttccgagagtcgatgaatccagtatcgaaaaccctccgccgtcgggccctttgaatctccattctacaacgataaaagggagtatattattttctatggtctacttatatacaaggacctaattaattaaaggagacgtatagtaagaaatctaactgaacgatatacttacaaaatccagcaactcataatagagtcgtcgagggcgtccagctggtatagttcgtagattcccctgaaattgatccagagaatgtcatctccttgcaagaagtccgtgtccctgatcctcgctccgatcatctctctaccggtggcgctcatctccatgtacagctgatggaacttgtacatttgtgtgggtagggactgcagcagctcaggcttgacaagcggtttaccgagttcgtacatgtatttcacttccgacttttcgattggtgcgactcctagcaattgatccgtagttagaccggtgtcagtaataaattgttctatcgtcatttctttaccggtcaccaacggctcgatctcctggtttggttgctctccaagctgagggactggtttggactttccagaagatgctttcttcagcgttcgctcatagtccgatagcttgatggcctccttgacagatgcagacatacccctgaagaagttcctgacactaggtctataggaatcttcttttctggacttcgaggcttgaattgtctcttgacttctgatgcaacgtaagcgtcaagctcctcttgcgtgcaatcgtaccccgggtccttgttcttggcggcgtcaactttcgccttctttgttgcccttgtgtgggcaagcggtggagctgggggggcccttgactttgaaggtgccggaagaggagcttgcgggggagtaggtgtagcagcacgaggaggagtcggtgcaggatcctgaggagtcgatgctggagcctgaggtggagacggtgctggcggagcatgaggaggagacggtgcaggatcctgaggaggagatggcggagccagaggagatggtgcacgagacgccgcttgtcgcccagggaggatgatgtaccgcctgcgccatataataatggcatggcatgtgtttcgtagatgcgtctcaccgtctcctccagggtaatccagctcgaggtcctcgtacgcgcattcgaccaactcaacttcgaccttggagtatcctgctggaatcggcctgcagtggtaagtacctgaagggtccgttgggatggccatgcccgacgccaccttcatgttgtgagagattatttattagtaatcaacatatat

SEQ ID NO: 5018 - DNA, 12302 bp, Oryza sativa
cgagagggccgcactggatcagcgggccgctgagctcgaggcgcgggtgaaggagctggacgcgagggtgcgcagcggcggggcggccgcgggcgacggcgacctagccgcccgcctcgcagctgccgaacacaccatcgccgatctgcagggcgcgttggactcgtccgccggggaggtcgaggccctccgcttggcaggcgaggtagggcccggcatgcttcgggacgccgtctcccgtatagatcgcgccgggcggcaggcgggcctctggggcgagcggaccgcgaagtatgccgccaaccaggggggcctcgcccagcgtctctcagagatggccgggaccctccagcggctccccgaggagctcgaggagacgatcaagtcatcctcgagggacctcgcccggggggcggtggagctcgtactggcaagctaccaggccagggacccggacttctccccgtgggcagcgctggacgagtttcctcccgggaccgaggacaacgcgcgcgcgcaggtccgggacgctgccgaccacatcgtccacagcttcgagggtacggccccccggctcgcgttcgccctcgactacgacgaagagggcggtgacggcggtgcgggcgacagcggcgatgaggccggcgacccgggcgtgtcgtaatgagcccccaggcccctgccaaccttatagagtttttttctttcttcttccgaggctttcgggcccccttcttgtatagactaacttaatctgcaatcaaataaagaggaaattttttgtgtcaattctatttgttgtgtgtatgagacgaggatggtctgtgccgcggtccttctgtgtctcggcttgaacaagggctcgtgcccaggtcccagcctcaaacggcgcgggtcggggctagtgcctggggagatccacatgttgagactggccaggccgggagcgtggtgaccgggggttatgggtgacccgattgtgggcctttgccgattcccccccggagttcaccacgccccggggcacggctcggttctgggccccttttggcgattttagccggcccgggccaccgagggcagaatcgagcacgagcgtgctaattcaagtcaagattcagcaaaaggaaacaatggcacagacacagtccttaggaaatcgaaaaatgcttttattgaaatacagaagagaaaaaagataggtatatgcatatgtggtagcccccggccaaccctgcacgccccggggggggtgcggggttggcccgagcccgagacctgacacccgacccctactaggggtagaagcgacgaaggtgttcgatgttccacgggttaggcagctctgtgtcgtcgcccgtggccagccgaacggagcccggccggggacgccgatcactcgatacggaccctcccacattggtgagagcttgctcaatccagcacgcgtttggacgcggcgtaggacgaggtcgtcgacgcagagtgatcgggcccggacgtggcgctgatggtagcgccgcaggctctgctgatagcgcgcggctcggagggccgcgcgccgccttcgctcttctaagtagtcgaggtcatctctgcgaagctgatcttgatcagcctcgcaatacatggtggcccgaggggaccccagggtgagctcagatgggaggaccgcctccgcgtcgtagacgaggaagaaaggcgtttccccggttgctcggcttggcgtggttcggttcgcccagagcaccgctggtagctcctcgatccacgagtcgccatgcttcttgaggatattgaaggtcttagttttgaggcccttgaggatttccgcgttggcgcgctccacttggccgttgcttctgggatgggcgggtgaggcgaagcagagcttgatgcccatgtcttcgcagtagtcaccgaagagctcactagtgaactgggtgccgttatccgtaatgatacggttaggcaccccaaaccgagcagtgatgcccctgatgaatttaagcgcggagtgcttatcgatcttgacgaccggataagcctcgggccacttagtgaacttgtcgatagcaacatacagatactcgaacccgcccggggcccgcctgaacggacccaggatatcgagcccccagacagcaaacggccacgaaagaggtatgatctgcagggcctgggccggctggtgggtttgcctggcgtggaactggcacgccctgcaccgccagaccaagtcgaccgcatcgttgagagccgtcggccaatagaaacccaggcgaaaggccttgccaaccaaggtgcgtgaggcggagtgggctccacactcgccttcatggatatcggcaagaagctcgacgccttgttcccgaggaatgcacttcaggaggactccgttagccgcgcgccgatagagggtcccttccaccagcacgtagtgcttggagatgcgctggacgcgttcactcccttcgcggtcctcgggtagagtcttatctgtgaggtacgcctggatctcagcgatccaagcgatcaatctaagggagctgggagcgctctcctcgggtcccgaggcctggactccgacgggcctcgggggccgttcaggcgcgtccatctcccctagggggtcaggtcgcgccgacggctgggcaagcctttcttcaaaggcgcccggtggggtctgggctcgcgaggaagcgagccttgagagttcgtcggcgaccgcgttatcccgtctgggcacgtgccgaagctctttcccgtcgaaatggcgttccatacgccgcacctggcgcacgtaagcgtccatctgcgggtcagagcaccgatactccttacagacctggttaacgaccagctgggagtcgcctaacaccaggaggcggcggatccccagtccagctgccaccctaagtcccgcaaggaatccctcgtactctgccatattgttggtcgcccgaaagtcgaggcggaccaggtatctgaggacgtctccgctcggcgaggtcaacgtgacccccgcaccggcgccctgaagagacagggacccgtcgaactgcatcacccagtagacggtgtgaggcggctgcgaggggcccgagctggcctcggggatggagacgggctcgggagctggggtccactctgccacaaagtcagcgagggcctggctcttgatcgcgtggcgtggttcaaagtgcaaatcgaactcagagagttctattgcccatttcaccacccgtccagtaccctctcggttatgcaagatttggccgagggggtaagacgtaaccaccgtgacccgatgcgcctgaaaataatggcgcaacttcctcgaagccatcagaatagcgtaaagcatcttctgggcctgagggtatcgggtcttggcgtcccggagggcctcgctaacgaagtagacgggccgctgcacctttcggcggggccgatcctcttcgccaagggccgcatctccagggcgcttttcgtccgagaggccgcgcggggcgcactcggcttctgtgtcatcgacctcggggtcggagggcgacaagcgcggccttcccgcagtggccccggggccatcctgggagtcgggggggcctggcaccgtcggacaagcgggcagagggccagctccggccgtcgggggcctcgggccgccgttcggctcgggggcctctcctccctggtctctcccgggtcgagtcgacacagagtgggggtgcgcagagcgagggttgtcctcgtcgcgctccacgaccaacgccgctctgaccacctgcggggttgccgccaggtaaagtagcaacggttcatctggtttcggggcgaccaggaccgggggagaactgaggtacgccttcaactgagtgagggcccgttcagcctcctccgtccaggtaaacggcccggaacgtttgaggagcttaaataggggtagcgccttctctcccggcctcgatatgaaccgacttagggcggccatgcagccggtgacgcattgcacatccctaagtttgctgggggggcgcatccgctctatagctcgtatcttctcggggttggcctcgatgcctcgggcagtgaccaagaacccgagaagcttgcccgcaggcacgccgaacacgcacttgtcggggttcagctttatgcgggcggagcggagactttcgaaagtttccgctagatctgagagtaaggtctcttggttgcgcgtcttcacaaccaagtcatcaacataagcctcaacgttgcgtcctaactggctacccaaagaaattcgagtagtacgttgaaaagtaggacctgcattctttaacccaaaaggcattgtcgtataacaataagttcctatgggggtgatgaatgcagttttttctcatcctccctagccatgcgaatctgatgataaccagagtatgcatctagaaaacacaaaaggtcgcaccccgcggtggagtcgacaatctgatctatacgtggcaaggggtaagggtccttaggacatgccttgttgaggtcggtgtagtcgatgcacatccgaagcttgccgttcgccttggggacgacgaccgggttcgccagccactccggatggatgacctcacggatgaatccggcctccagaagtcgcgccacctcctcgcggatgaaggcttgacgttccggggcctgccgccgcactttctgccggaccggccttgcgcccggccgcacggcgagacggtgctcaatcacctccctggggaccccgggcatgtccgccggtctccaggcgaagacgtcggcgtttgcccgcaggaaggagacgagcgcgtcttcctatttgtcgtccagaagaccaccgattcgtgtggtcttggacgggccgtcgcccagggcaacctccttgaccgggacctcgtcgcacatgatcatccgctgcctcggggcggccgggacgaaggcgctgagcctctcgtcgccacactcgggcttggacgccgcggcgagctggtccgcgcgctgctccatacaagcaagcgcgacttggaggtcgccatggacggtgatggggccaccagggcccggcatcttcatctggagataggcgtagtggactgccgccatgaacttcaccaacgcgggtctccccaggaccgcgttgtagggcagactgaggtccgccacatcaaagttcacccgctccgtgcggaaattggcggaaccaccaaaggtgaccgggaggtcgatatgacctagcggccaagtgtgccccggcgtcacaccgatgatcggctgggacggccggaccaccatccccggggccttgatggcgtcaaaggctgcgggagaaagaatgttgagggctgcacccccgtctatgaggacacgccccaacttcacattgcaaatggtgggggaaaccaccatcgcgatctgtcctccccgggcaacgcacggcgggtggtctgtcatgtcgaaggtgagggccacctccgaccatcgcgcccgccgcgtcgcctcatgggtaggggccgcggccagaagctctcgcttcatggccttgaggctccggcgagaagcgtgagcgcacgctcccccatcgacggtggcgaccgtggcctgaggctcctggaaccccaggttatcgtcgccatcgtcgacatcctcggcgggggccttctgcttggcctcacctcgctggttgccggcgggggccgccggggccttgccatcacggcgctcctgtctcctctcctcctcccacttcctcgtccgctcggccaaacttttgaccgcgcggcagtccgcgaggtcgtggagggaggtgttgtgcacggagcaccacttgccggtcgggcgctccctgctgggagcgccggcctccttctttctgttgctcgcaggcctcccctttcgggtggcccgcgaagcgccctcggcagcgaggacgtgcccctcgtcgtcggaaagggccgacctcttcttcctcctcctgtcccgccgccctgatcgagcagcggacccgggggcggccggagctgccacactggaaccggaggagttccaggtccaggcctcctccttgcgagccacacggtccgcaagctgaaaaagctccgcggtggtctggggctccttggaggcgatcttttcgagcatgcgattgtgccgcacgccccccctgaacgcatagatcactgcgtgtgcggggatgcatggtatagtgttgcggacttgacagaaccgctgaatgtacgagcgaagagactcatcgtcccctcgctgtaccgcgtgcaagtccgcttcttcacctgggcgcggatatgtgccctggaagttcatggtgaactgctggcacaaatcctcccaagagtgtaccgacgcgggtggcaagttcatcagccaaccccgcgcctgacctttcaggaccatgggaagaaattcgccatgaccctgtcgttacccccggtggcctcaatcccggtcgtatagatctggagaaactcggcggggttgacgcttccgtcgtatttttcggtgatggtgggccggaaccttgggggtcaacggacgttccgaaggctcgccacaaaggctcgacagccggcaccgccaaccggggacatgggaggctggcccccatgcccagactgaagtggcgctccggacgaggaagcgcactccgttgcgtgggcagcacgacgaccattgcgtcggcgctcaatattgaggcgggcatccggccccccacgcacatcttcttgggtcggaggcgtcgacgagggaataacggacgaacggcgggtaacggccgccgctcgccgcgccctccgcatcgacgacacggagccggtggtagcagcgccagaggccttgggggcgaaggactgcccgccggcgcctaggcgctgctgtgccgtcatgaccaagttggccacatcatccagccaacgtcgagctggagtctctggatcggggacgacgggcgggtgacgtaggagcgcgcccgcagcctggagcgcgccctggggcgtgctgccatcgccgtagacgaggaggcgacgctccccgtctcgccgtccttctccatcacccgtgggtgacgaagtcgcggatctttcgatcccctcgagcgcctccttccgcccaagacttcggcgaaagggggacggtggagtacgagctcgacggcgcgggttctgctccctgtcgtcaccgctagcgctcggagagaggttgtgcgccactgcccgttcggccattgggctgagcgggagaaacttggcgcacacgaaagaggacgagggcttagaaaagcacacgcgccccctaccaggcgcgccagatgacggagcgtggggctcctcaccgggagaccgcgcaggcccccctttgccggttcggccgggggcgctgagtgaggttcttcaccctcgatctgtggaatgtacgcgagagagcaaacgcacgagacacgggcgatgtagacaggttcgggtcgctgagaagcgtaataccctactcctgtgttctggtggatatgtgtgagaaagagttacagagagccggagagcaagagagttcaagctctagaacccctcttttttccttctcttctcagagtcgtcccccttcctttgtgggcaaggtcctccttttatatttcaaggggataccacatgcaccacttctacctactcttcttttgggtggggacccaccctatcttgaccaaatcttgactcgcgcctccgcctggaagctaaatcaccgcttgtccttgagtgatgcccagcgccgtcactcgtcggacacaggggatcaccctgtcatctcttcattaatgggcggagatctgcaatggctgctgtctgaatgaccctccgatgggatgggtcatacctacctccactccgccggaaacagatgcaacgtgggagcacggttgtctgccgatgacgtgaccggcgtcagtccagtcacagaccggtcattcttctccaccacacgtcagtttagcatgccgcacatctgcccttcttcaaacagtgacttccttgcaatggttgcgatgaagcctggcatgaatcgagccgggactgacgtgctaactccaggagttaccacgccggctccagctagggacgagtgccaagaggctctcatcattccgacaggacggggcgaggcgtgtgacaggccgcctgctgccacctaacccgcgatctgaccggtctgtgaccggtcacacactgcgaccggtcacggaccggatatgcgtgcgccgtgctgcattaaatgcggcgtggcgcgcttgtccatcccgcaataaatgcggttaggtgagcgccgctgtgcccacctaacccacacacgtggcgccaataccacagggggtcggggcgccccagccctcggggccgaaacaagagcggcccgacccctcggggagacaaaggagggggtggccacctctccctcgggcccgacccccccgagggggtcaggccacgtgggtgaccgcggctgcccaagcctctagtcatgatacccccgatcccatgtcaccgacataattaataacttagacgcggtgtctaggttagaggttacctttgtttgttgtgtatcccacggttttgtcagaggtaggcggcaggtggtgacagccctgaattctatcccagtgatcctccacgttcggatacatcatagagctatagctggaaccacgctggcagacctgcaggatcggtgcccgaagcagcagataggaaattaactttgcttagcttagataattaaaacccatagaaagtcctctctagcctagcctgcctatcatcagttgttgtccttggatagtcttagccttaggtagattacacacgttccctgagttcgatatccttttggggtcacccgaaggtgaagtgctacagcggtattccgtgcgcttgcggatttatctgtggtcataagaatgaggacggtggttggtactcaatcttactttatcccctccccctccccagaaagcagagattggatcagatgatgagttctttgatgtttgagcttgttccggacgtcaagtattgcctgtggtttatggaggaagcttcgctttggtcgtgaagattaagtctagttttatttgtttttctgctgcgtatgtgagttttattttgttatttttgtaaaacatagatctgtctatcaaattgccgtatgtatactctggctgattctgaacagagatttaatacacattctacttaaaattcgtgttagcgaatttttggacgtgacgaccgatttctcaggatttgtcaacgtttgcggctcaggttgaatgccacggtgttgcactgtaaagaggccctaatacccatctctgctagcttactgcatgtaatttgtcaggttcattctatgaccaaaaaaaaaaatcttctcacacataaagtccacaaattttgaacttcatattgaccatcaggtggcacaacttcatatttaatcccttcaaaatacgattattttttatatttttgaacttttaaaatttttaatttcaaaaataaacacgttcgaaacttatttccaaaccttttggccacgctagttggacatgcatggcaaaacaatactgtcacactggtctggctagcgtggcatcattatttggtcatgcatgtctggttgacatggcggcgttatttggcgacgctggcgtggcaggataaaactatcacgcctgctataggtggcgtattattttaccaggccaggtgagctggcgtggcccaaagattcagaatgtggaaataacttttggaagggtatatttttaaaattttaaaataaaaaagtttaaacaacaaaataaattatcaaactacttgtacttcatatctattgcaattttaagataccgataggaatgtccaactcttgagcagcaactccctaaggtcatacgtgtttattgccagttcaagcagcaggaaatgtatacagcttagatggaatatctgctttgcctattcagtctttgagaaaaaaactcaatgcaattagtaataattacattgttattggcattccatatattcatttacacaagatttaactcttatatttttcattacttaagggaggacctatacaaagcagctcaactacaaacaaaaaatatcgatttcaatgaagactccactgagcaaacgaaaaggtataccctattttgggaaaattggaaccatgccattataattttgcaaaatttgagatattactacatacatcttttcttatcctcttttactataaagttatagccctctaatttccaaagcttaacatgcaaagacaccacatcatcatccactaacaactattacatttaagtataatgcaagcacactatattatctataatttaataatttattaaattttagagatttaaaatgtaagcatgttaaatgattccacataattcacatagtctttcaatatatctctccattattttttttataatatcctatacatctatatagttcatcctcacttagttcatgttgtttttctcttctctcattaagtcatatctcatcaatttatttttctagtccttatatgattaatctatgattcaaattatcccttttctttttcttctctcgttaagccatatcatctcaactttttttagcccttagatgtataatctaaattatcttccttctttttttttctttcataaagccacatcattttactttgacatttgaattatcattctacatattatttaaatttaaatcacaccaacttatgtaaacttatgtttaggtaagcttatgttgtttaagatatctaacacattatgtcagggttacggataaggcatacctcctatcctgcgacttgtgaaatataccgatatggtatacctttacgtatatggattatttacatatacatcgtatggaatttacttcaaattaaggaaaatatctttatgggtcaagtgatttctaaagtcctactcgtaagggataaagtttctgttataccgtcccaggtccgatatcctcaaaacctttcttggggtcaagatgacccacggtataaaagaagaccccttgggagaggttcggatcatcgaatctcttcgccaacacacccaccaaagcttacgaagatggagtacacagaaccaactcgccgggagatctcgtcgaaacctcgactacgatctcgtcgggatcatctttttcgactactctctttgtaatctgttctcatcatcatcaatcccatataaactagactagggctattacctgataaggggcctgaaccagtataatccttgtcttttgtctgttttgatgtcgtactacgtagaccctcgttccaacgtaccccaatactctactcatccggtccacgagtatcactcgtcgacacattatttttacttattgttatcatagtaaacttcaacagcaacgcgtggagtttcacctagttattttaattttaatattttgtgacaaacaaatataggctcaaacccttccttatagtaatttttccctttgtagtaccaaagaactgttattaactattctcaagtgttagaaggacgagcatgtactacttctaacacccctcaaaataacaaaatctaacagaaatactgactgcaatctcttacgaactagtatttcatacagcacatacctctattagcactacaaatctacgcaaaaagggtaattattcttcacattgctaaagacttgctgcattatcatgcaagcatatcctactattttatattaatactaatacattgttgaaccaaatttacgggtcagcatatcctcctcgacctatagaacccatatgattccatacaattacatccttcgattattccaaattatttgtttttttagacatcttctatttttattattgtcatgactatctttcgaaacttacatgtaaccaccagcgaaatatatgtcatattcaaaattttgtttgcatgttcaatggaaacacaagggattcatctggaaatgcttacaatacaaactattgttctcaaaatatttctaaaaattcctgcagaaacgtcccactagtacacatgtgattatgctggacggcggcggctcattttggttccaggcgggccataaatggctccgcctggaaccaggcgaatgtcggggtcgggcagtgggccgcacgggataatcgattattccgtgcggtccgct

SEQ ID NO: 5019 - DNA, 6635 bp, Oryza sativa
ctaacatctatcggtagagggcagccgattaggttagacatcgacgttgacttagattatatgagatatctaccactctatgaaacttccagcgacttgattgtttagatattgttcttcttttcatacttaatgctgcatcagttgagtttgatctattaagtcgttcttagaatatcaatctctagcctgccttctggttgccgattagggtagcatcggagtttcagccgatcttatctgatttaactatatttactctatatgctttgttgatacgttaaatctgccctttatgttaagatattattgcatctaagtatattcagcttatgtttggtatgttctacttgttttaatatcttaatatagagttgtatcggagtattagccgatacatgctagatctactagatcggctatgctatgaacatatatagtcctgttattaatatatatttcgatctaagtgatttatactgtctcggcatggcgaccgatctatcccaatcacttgatttaagtgtatatccatataagaattatatattgtgaatatctatagccgatcgaatagatttagttctttattatctatttacaaccgccgatcgatttacatatgacatcagctcaaagataaatgatatgtcatcggcacttagccgatcggctatcgtttataggtttaactgtggtttctttgtttttatttcttattgattgcaggatcaaatcaactggcacgctagcacacccgaaggcgagttttggacatgcactggagttaagcagatctcacaggcctcgtgttttacgtcaacagagatcaaagctactagtggatatgtcttcacactaggtggtggtgctgtttcgtggaggtcttgcaaacagactattttgacgaggtcaaccatggaagcagagctgacggcattggatactgctactattgaggcagaatggctacgtgatctattaatggatctgcctattgttgaaaaaccggtgccgtctatccttatgaactgtaacaatcaaacggtaattgtcaaagtgaatagttctaaggataatatgaaatcgtctagacatgtgaaaagacgattgaagtctgttaggaaattgagaaactccagagttataacgttggattacatccaaacagctagaaacctggcaaatcccttcacgaagggactatcacgaaatgttatagacaatgcatcgaaggagatgggtttgagaccatgtgagttatactatggtggtaacccagtcaatgtgatcggtgatcggagatcccgtagattagaacctgggaagaacaaaccattagtaaactagaggagagtaccaatctataccctctctaagtgaagatgcatgtactctcgtgagctgcaaggcaggttggctatgccttaatgagttctgttggctttaattagcgaagatgttgtcctgcagtgcattcttgaaagaactcacctttgtgagcttgactgttggtcgcagtctatggagattttgggtgaatcttctaggaagcttactaaagacttaggagtatgacttatacgctccacccgaggggtagtctatagacggtctagtaccagataagactctgagtgaaacttgcttgcacaagacttgcaattcaaggcgtagtccattgttcaagttgtgagtaagtgtagcttggagttttaggtggatgttcaaccttaatcggtcttcatcgaaccgctggtatataaacagtacattggaaaagacaaatctcagtgggattttgagatttggtgggggattgttggaattaatagatgggctaaggcccattcgaagattaattctttggaaaatcacaaaaacccacctcatgggatggcatgcatgtggagtttagtaccaccttgctaattctagaagagggggacctccttaaaagggaggatgccctcctagccacttgaagcatgtgtggtggagagaagaggggaaacacgcgcgcgctcgctggcctggccacccagggcaagcggcgcgcgtgcacgacgtacgcgtcgaatggtctgcaaaattggctcctcacccttgcgcagatgcagccttcttttgcagttttgttttgctgcgggaaattcggatttgttttgttttggaagcatttcgaaaaatcaggtgcgtgaaaatggcgtggagtacggataagttacgcgcgacttatccggttcggttacacggaatggaggtcgtgcgggcgccctaatcaagcgacctatctctatataaaccgagccgccgccttcacgcaacacacgcgaaatcaatctagggtttgcctcctactatgtgctgcgccgtcgctcgtagactactcaatcccgctcgccgacgtgcaccggcgatcaggagagcaggtctccggaacctctgccttcgacgtcctgcaccgggagaaggcgacaataaggtttttgggaagcgcttcgcgcgactgctccctgttcgtccgcgacggctcgccttactctccgctcgcgtgctgcgcgcctttgtcgacgcccgcaaccgcgagtagttcctgccgagcaaccggtctttccgccacctcggtacgtgttcgatatgttacgcatatttgatctgttcatattttattgtttagtttatatgtgtagatctaatgatgtgttcatgctagtttagatctgcaatgtcatgatttatttatagaataaattaaatcattatgtgcttataattttaacagttttctcggggttgccacatctcaaatcgcgcaatcggcagcgtgcgcgctctctctctctgccatggcttccatggccatcatagaagccctgtgttggccgacgatgcctgcttgcgtggtgaatggaggcatctcgtcgatggctgctcatgtggtgaaggaggccgcgatgcttaccgtgccaatgcaagggatgggatcatgtcccgtagcgtttttgagtgggtaaaaattaaaggagagatgggatgtctagtagggtgtgttcgaattcacattttcttaatttatgctcgcccgttcttcatgtacatgctttccgatagaaaatagctttaagaaaatcatattaatttatttttaaattttactaatacttaatttattatgcgctaatccgtatcttcgttttacatgtgctaaaagcatacctaaacctgtccttccgaacacacattgtattcttaaaatacaaatttcaaaggatataaataattatgagtattcttatcgaggttgccctgccatcccacagcccaagtagctgtactaaccataaagacattctcaatgtaggtcattggttggagagatatcataatactccttccatactaataaaggaagtcattttaaatagcgacatggtctccaaaacacaattttgacttcttgttcctataaaaatatttattgaaaagtgatatatgtatacttttatgaaaatatttttcaagataaatatattcatataatttttacattttcaaactcaacaacttgagagttatttatgatttatattcccaagttttgatttaaatattatcctaaacgactttctttacgagtacagagagagtatgtgcatatgtataatggataataagatgaaactcgttgaaaaaattctctaaacgtgagccatgctacaattaaaagaaaaaggcggaacctagtctaaaatacttatacctggtagtaagcttatatcctgatagtaatcgtttaccatctctataatgtattttaactgataacaataatatatttaatacttattacatgctattccatataagttgttgagttgttcgtcggtccggctcaccgagatggaatttggaagaaaacaaaagtagtgtcctcgattcgtctttggatctctctccaggacaggcaacatgttcccactggtttattagtcaaatgctatcccccagcagacgccagcagacggggtactctcgtacgcagccgactgccgacgtgcgtccgtactccgtaggtgctcatctctactacctccgtcacatattactatttgttttgtcaatgtttgatcattcgtcttattaaaaaaatttgaaattattatttattttgtttgtcatttgctttattatcaaaagtactttatggcttatctttttttatatttgcactaatttttcaaataaaacgaatggtcaaatgttacaaataaaaagtaaaaaacgtcacctattatagaacggagggagcaggacgcaagcggctcctgatggatatttaattaggcgatggtccaaatctatcggagaccaaaattatcgaaattctgaaaaaaatcaaaattcaaatattttttaccaaacctgaataaatatagctaattaagttcaaaaaaaataaaaatttaagataaaataagtttaaaaaatatcgaaccgaaatttacaaaccctaccaacgtgacagtggacacgtaagtgtgcttagcagctcgaagcacgtactcctttagtgaaagaaaaaaaaatatatagtattagatgtgacttactattatggatctaatatgattcataatactaaaatgtgtacgtatgtataacacatcgacacgagtattacgcgcgcatagacacgtaatactggtagaaaggggtgcacgtctggtaacttacaaatgggcccgcgggtgtgataggacccacacatcggtgccatcacgctcctctctgacgtaaccctctcgatcggggggatgctgatgagcgactgaccgcgcgcggccgcagtcgcgcggtcagtttttaatcttatcccctatatatactactagtatactatactcttccttatactactatatcccttatactactatactatatactatatgtatttatacacagatatatacacttttaatatatacatgcacaaagtttatatagtatagatttaaaaaccgaagatacttatatattaaaaaaaaccggaaaaagacccaaagaaaaaaccgagaaaagggggaaaacagcagggaaaagaaagaaaaccggaaaaacccggacgcgcctacggatcggtcgcccgatcgatttggagaaaaatcgggcgctgacgtcagcatgccgtcagcgtccgatttacatgcaaaaactactttaaattgatttttctcttaaattacttatccaaattatgatccgattacaccattaaattcgttgcaattaaatcttcaaaacaagaccacacatggatatattctgacgaaatttttttagtttattattgaattatttttaaatgttgcacgatgttccaccaggtatatcggaattgtttcactaagtagatcgaaaatgtttcactcgtttaaatcgggtgttgtttcaccttatataaaaacaatgtttcagcaaataacgaaagattatttcagttcactgtaacatttgatccatacatagtaaaacattataagtacactagatgaaatatttttcggtggaacaaaaataaaacgattcccttaatagggctttccaaaatatgtgagttttttttttgcaatggagtatttcagctcactgcaatattagatctatacatagtgaaacattgtgagtatactaggtgaaacacttttggtggaaaaaaaaataaaccgaattcccttaatagggggttttcaaaatatgtgggttttttattgtaatggagtattttagttcactgcaatattagatctatgcatagtgaaacattgtaagtacactagttgaaacatattttgtggaacaaaaaataaaccaaattcccttaacagaggggttccaaaatatgtgagtgatttattgcaatagtatgtaggagcagagacatggtggggcccagatctgcatgcagcacgtgggggcgtgcgcgggggagcgcccgatccagctcccctgcgtcggtcgcccgggagcaagtattatcggaaaaaccgtagaaaaagaggaaaaaaccgaaaaaaaaaaaggctactggtgcgctctcccgccgccctcctctcccccgcgcgccacgtggctacgccgcgcggaggaatggcgctggtctgaccgctaattagcagtttcgctttcgatctgcctctgttcgtgtggaaagtccacctcccggtgtgacgcgcgcgggcgacgatcggagggtcaaagcgggggaaagttccggaccttaatcctcctctaggtttttcaacgtcacgacccacgagtcgtgaccggcggggatctacgaacgtgctagtggtactacgtcctaacggcatgtggaaattcatggtaccttacggtgtaacgtcacgtacgttttccccacgctggaacgtatttatgacacattttttctactacgagcaaactcaaaaaacaattactatgattcttttttaaaaaccatatatactcactccttctctaaatgtttaaatgtttgacgccgttgacttttttaaacatatttgaccgttcgtcttatttaaaaaatataagtaactactacctctattttttaatagatgacgccg

SEQ ID NO: 5020 - DNA, 13898 bp, Oryza sativa
cttttttttcattaatgaagagccgattagcttcgattgttgcttccagtttagctctctcgcgcatgtctgctattctttgttgtgccctttccagcttgaaacgatgttgctctagatatacagccagggaaatgatgtcggcttcatcttctgggatctggtggtggatctcttcaaacctggccctgattgacccgcagccagtaaccaaggaatccaaggaactccctagccgttgagcaatatccatgagtttggtcttgagatcatcatcaagagggaccaaggctccactggtggtttcctcttcttcttcatctaggaactgtttaacgtcaaaggaaaacatattggccaagacctggagaaaagataaatcgggattattggcaaagaaaatatcgcagccgatatgagaagatttaatagtactaacaggcacaacaagaggtggatgttctggtgttcccaagtgatgactgtccacagccgacggggtgtgctcactagatgctagccgacgaggagatggagatcgaggaggctgaggcaaaaaggggaggagattaagtttttgtggcaactaataggagtaagaacacaagtttaaggttaccaatggaggcggagtggatttcttcttcttagcagcccttggcttcttcgtctgctggaaaaatggcaataaattcatatgatgcacacttaatcggatgataatgtgaagaaagatgcataccaccacttttaggggccggtgttggagcatctggcgtcttgttgggacttggtgtaccagctggaggtgtcccagctcgacccgtagggcttgcggataaggccctggtgtcactcatgccagcagcagcattatcaatggcctcctctatttcttcattctccaggacctcctctacatcacgatccaaaggaggtagatcatcggcagcaaacttttgcttctttgctacctttttcgaggcggcaggaggtttagcagccgatggcttgacatccgattgcttagtgcttttccttttacaagtttcaactggaatcggttcatgagtttgcccatatagtaaattagttgtcttgggggccatatagccgatcactgaaggagctagtccaccaccatttgggataatccctgcagcatagttaatcggcttcccactttggctagtgtaaggcagtgaggaatctgtggtctgcgaacaaggaaaagagatcaagtatcgattaaacatttgctcaaggttagaatttttcaaaaagaaaagtgtacctgaggcatcgagtccgagaagattatcgtgaagaacattgaggctgatagatggaataaatgcttcttccactcagcccaccatcgatcgaagagtgtgctcctgtcacgcccgaaaattcactagtaatttctaaacttatttgtgcataaaatcctcgtataggaatcagctgacgtgcacaaactgataatttaatatacaaatccatcgtaataataacattacatacttacaaaagaaaagaaaacagcagcggattaacggtctagcgatggctttagctccactcccacaggcagctcaactggggtataagccaaacgtcttctccttcgcaacttcctcaattgaggtttgattgattattgcaaggtgagtacatggaatactccgcatgccacacagcaaatatgcaagtgcacaaggataccaaaggatggcataatatagggcttatttgcaaaagcagcatttagcaaatatttgagaatagtaaaacagtagagtaattaatcatcaatattaatcaacactgtacagcacacccatgctgcacaggcccaaccatccttaacaaccatacccggctgtacagatctaactccaaaccaggaatgtaccattccaaaccaggatctaagcaaattattaccagttatagcatcagtgtgagactaatcacgaaaacattgttagacccgcccataactacgggcaaggctattcgaatagttttactctggccagagatgtatcaatgtatcactgtacccacaagacagccccacaacacgttgccaatgtatcactgtacccacaagacagccccacaacacgttgccatgcgcctcaataccaccacgatacctcggaaaggagctgtgacagtacccctcgcataacacaatccaccacaacgcaccgttcctggatcataatcaccccctcaattaccagaggcatggactccccagcgacccccacggacttctcgccacttcacagtctggcgccccataatgaattatactatacaaaaggaaatgccgttacccatgctagcttgtggttggcatggttaatgtttcacaacagtagctcgcgaaccgatccttaattgtcatgagcacgaccatcaaaactatacgctcacaacccaccattatcaagttttaattatcaattgattatcataacacgatttatcatcgtgagctacctttaaatatccagctttaggtaatagtgaagctttaggctgtgttcgcatgttcagcttgggaacatagtgcctccgcacggaaaatggagcgatccattagcgtatgattaattaagtattagctattttttttcaaaaatggattaatttgatttttttaagcaactttcgtatagaaactttttgcaaaaaacacattgtttagtagtttgaaaaacgtgcgctcggaaaacggaaaacgatggagaggggctgggaacatggggttgcaaacacagccacactaatgtttctaagcatatctaagtaactatactaatatatctaattgaaccattatatgaggccaactagtcaaattgtatcccaaggtatcaaggaataaggtaatcaatgcaaattggccgtagcaaaggtataagttcacaccaccggtgacattcgaaaataaatacacagttgaaataaatagagaatttaaatataggatcaacatgctcaaaggagttgtgtttgggatctatgtgacttgccttgcaataatcggtcttcaattaatcttcttgaacacttccgacgcactcacgaatcttcgcaacaacggaaacgatgagctaatacacaaaacgaggaaaaagactaagaaactccaaataaacagtacatataaactaaataaacatgtagatcatgattttagatgaatttagagacttaaacagccttattctgacttcatatgatttagttatgaattttacaagattaatctgattttagccttatatacagaaaaggatttacgatttatcttagaaaaggaaaacgggcgctgacgtcagcgatgatgtcatcacggacaggggcttccaacgatcgccggcgatctagggctcggcggcgcaaatcgaggataccggaagaaagagcacgacgacgggagctcaccgaggggcggcacgacgacgaacgacaacggaagacggccggcggcgaggtagaggcggcgatgagatcgggacggcggcgacggcggctttccgacaacgagcggcggcaacggaggggtggccggggtgcagctcctcctttcgaacccaacggaggtggcgacgaagctgggcgacgacgggaggagcagcggggcttcgccgaagatcaaaacgcgacggcgaactcggccttaacggcgacgaagggcttcccggggtcttcggcttcgggcagatggtggccggtcttccactcttcgctttggtcccattggaggcgacggcgctgaccggagatgtcggagtcgacggctacgaccgactggagcggcggccggcggcggagcgaggagacgagcgcgggcaggcggctaaggttagggaaaagctctggaaaaagatagaaacggaagaggaggtattgatactgctatttataggcaaaggtggaggaaataggctcggacccgtgaggatttggcggcggattggttaaggttcgccgggaaaataggagatgaactccgcttcgaatccaagcgatatacgatgggatttgctccgattcttgaggggaaagaaagaggaggataagggaagaaatcccttcaaccaatttgggaaacgagtcacgggatgcaacggattctacagaggaagcgggggcgtcgagttgcatgggcagtgggcacaggagctcgggttctgtccagagatagaaggagtactgtagcgataggaaggtgaaacagacttttgtctgggctaaaagaaaagaggcgagggacaagaaatagacttcttcgggaaagaaggagacagtaagcaggcaaagaggaagaatgggctgaagactggcccgaaaaggaaaagggaattttatttacttttccatttaaattaatcatggaaatgatctttgaattgttaaaaataattacaatgctcaaataatttcaagaaaaatcctgaaaataatttgtcgtgacacaaggtcacggacaagattggggatagacaggaaaacacccttttcctgcctatcctgagaaatgagcccgaataccaaatgatcacaccctgagtgacaagatttttagtattccaagatgtcctgtctgctacaggctttttgtctgctctatatagtacacagctttacatgtgagattacaattgtgctctttgttgggcccacatgaaattacaatcgtgcccctgcatatcaacagaccctaagggcattttggtacattatgggggtcattatagtcttttggtgccagctagatggagtggttgagtggtccctgggaatattctcttggcatctttattgtccaagtcgccttcttcatggccaagagtcttttccaccaacatggatcttctcctcgactaagggtcttttccaccactacgggtcttttccatggcaaatagtcttttccatctcgaccaccatttccgacttatccggtagctgatgtcacagcctgatttccgtttcaggatttataaattatttaataaattattattagaatttatattaaatgttcattaatttacaagtgaagttaaatgtgggaaataaaatttcctaaatataaagcatggctggatttaatttttattaaattctccatgattaattataccctctgaaattttctcggatttttcagagctcaattcctaaatgatacaaagaacagttcagtaattagttaatcaattaatgatctaattataattatgttaagtgcttttcttgtttaaaaatccttaaattataaattgttgtttaaaaggaattattagaaatgatcttaaaagcctaaaagagaagatctaattttaatttgttaaatctcaatataaaagtgggctagataaaattttgttaaatacttctcttgcttctatagttcctagatttttctggaatttatttgagccaaggaagtatttttaatcaatggaatatcatttcatgaataatttaaatagaaaaaggttttaaaatctcccttttggctttgggccgaaagtcggcccaagtctctctctcccttcccccggcctgcgcgtgctcggcccgttcggcccagtccgccgcgccctccctcctctctctcagccgctgacaggtgggacccacctgtcaggtcgtcttcctcctccagccaccaaccgccgactgtagccgcaagccgccgccgatctccttccaaatccggccgcctccttccttctccggccaaatcaattgaggggaaataatctcctcgatctcctcttccttttctctttaggaaaccgagctaattcgtttggaaatcgtcggattcaatgccgatttggttagcatctctttccaaaccctaaaaccttccatctcgctgccggtcgccgtgggcctccgtcgccgcctcctagcccctataaaaggatccctgagacctcctcaatccaccgtcaccttcgccttagcccgccaacgcttgtagcgccgcctccgcgttagctcgtgtgtcgccgtcgtcgccgtgagtccggccgtgccgcgccgctgctctagtcgccgccgtcactcgggaaggccgtcgccaggttcgcaaggtcgccgccgtccttgtcccgtcctccgtttccgccgcagatcatcggagcgccgccgactccgtcgccccgaagctctccaccgctgccgttggtccagccacgccgcgccgttggtccagccaccaccttcggtcgtcgtcgccaccgtcgggatcgcgaggaggagcagcacctcgtccacccctccgtttccgccgaagatcgctggaacaccaccgtcgtcgttgacccaatcatcgccgccgcttcgacctcgccgccgtcgtcatccgtcgtcgtttgccgtcatccaagagctcggtgagttcgccgcgtcgccctctacccgttggtgccctccgtttgcgtcgccgcgccatcgattgccggcgagcacgaggtgccgagccgccaccggcgatgacgtcatcgtcgacgtcagccgtagacccgtggtggattagatcgatcttggccgtccattttgtttagattagatctcggccgttggtttcgtagaccgcctctatgcacccggtctaccgtggaccatctttgatgacgcaataaatcccttttgcttttcaaaaataattcattattgcgtcataattcaattaaaatctatataaatgctttaatccggtttaatctttaaaaattcataactaattcattgtaactcagtttaatgtggttcaagttgcaaaagttgtataaaataaagatctacatattaaaattatccataaattgaattaaatttatttaatttttttaaatgggctttaattagattaaatcttgtaaaattcataattaattcatatgaagtcagagtgaggccgttcaagtctcctaattcatctaaaattattatctacatgtttgtttacttcttatgtattgtttatttggtttttattagtctttttcctcgttttgcgtgttagcttgtcgtttccgtcgtttcgaaggttctcgagtgcgccggaagtgttcaagaagactaattgaagacccgttattgcaaggcaagtcacacagatcccaaacacaattcctttgaccatgttgatcgtatatttaaattctttatttatttcaactgtgcatttattttcgaatgtcaccgggtggtgtgaacttattcctttgtatggccaatttgcattgattacactgttccttgatacattgggttattataatttgactagttgagctttatatattggttcagctagatgttagatataattgcttagccatgcttagaaacattagcacataattgggataactaatgtttcactattacttaatggtagagatttaatgatagctcacgatggttaatcgtgattggtgaattaattaatgtgccaactaaaacttgataatggtgggttgtgagcacatggttttgatggtagtgctcatgacaattaaggaccggttcacgagtttcggttgtgaaacattaaccgtgtcaaccacaagccagaatgggcaacggctggacactttgcatagcaaggctcatcgtggagtgccagactgagaagtggcagagataagcccacgggggtcgctggggagtccatgcctctggtttttgagggggtgactacgatctaggaacggtgcactgctttgagttgacatatgcgaggggtcttgtcacaactacacaaatggtgacatgtttagcatgggcacatgatgatatggtgacatattgtggagttgtgtcttgtgggtacagtggtacacctctggccagagtaaaactattcgaatagccgtgcccgcggttatgggcgggtcgaacaatgtctttcgtgattagtcctacactactcattaataataatgtggtaattgatggtaattaatttagctcctggtttggaatggtacattcctggtttggagatagatctgtgcagccgggtatggttgttcaggatggttgggcctgtgcagcatgggtgtgctgttcagtgttgattaatattgatgattaattactctactgttttacaattcttaaatattttctaaatgctgcttttgcaaatgaaccctatattatgccatcctttggtattcttgtgcacttgcatatttgctgtgtggcttgctgagtatgtcatatgctcaccttgcaataatcaatcaaacctcagttgaagacaagttgcgaaggagaagacgtttggcttatacctcagttgagctgcctgtgggagtggagccggagcttcgctagactgtaattccgctgctatttttcttttcttttgtaagtatttacgttattattatgatgaatctgtatattaattgtcagtttgtgtacctcggctgattcctggacgaggatttaatgcacaaataagttcggaaattgctagttaatttctgggcgtgacagctgacctgttattaactcaggaaatacgcaaaacggataatgagacttagtgacaaggactcactcgaacggtattttccgactcgaatagtgttttccaactcgaacaacattttaccatttccttgttcgaatgaccatttgccactcggatacttagaataaaaactcaatcttacccaatctcttcctctacagtgttttgggccgaatagagaggaacggtggtgacccctagctacaacaagccccctcacgggtaagggcgaagtgtgttttcggccgaaaccgtgttcgaatcaaaagctaggggagaaccgccgtcctcctattcagtcgaaaaacactaggatagaaaattttgaagttcgaaagcggttattcttgtcagtcattatgcatttatttgtttattatatatatatatatatatatatatatatatatatatatatatatatatatattgttatatgtatacatattctttatgtattgaatatgcacatttatgtcaaagtttgctcaacaccatgcggcagtttgatctgtagtcaaagcttttcaagtttggtactggaaaaagaaaggctatgaagatacccttgcttctctctaagcatcgttggcttcgagctcacacaccgcacaatcctcttcgagtcaaccagacaacggtggtgacgctcacaaatctgattcacaggtgtgaagttattttagggaaaactaacttggaaaactttttggatatggtcgaaaacgcttgttcttttgctccgtcgaacctattgtggttgggaacttaattatgtatattttctgtggttgggtaccatttgctattttctctgtatgcctgtgcttcatcatcatttcgtttttgtcggggaagcaggtttatttgaaccgaaaagttgtggttcgacgcaacaagtatcattcaactcgaaacatgaagctcgttgcatttcgaacacacgagaagttgctcttttctaaagcaactaaatgtgatgatgaagagaaggaaatacattacgatgacacttgtattttttctttaaaatttttccaatggcaaagagaacatcgagatggtagtttgcgtgacttcgttgtcgagtttagaaaacggcgttcgaataatgcttcgagcagcattaacttttggcaaacttttagaccatctgagcgtcaacttagaatatggaaaaggcgctactcaattgtcccttacacgggaatgccttctcctctcaatgtcatttttcctttttcttttccttttattccgcaaagactcgaatcagaaaagaattcgagcgtttagctttggtttttgaaaaccgccgtccccctttcctttcgaaggagtgacgaggtcaaaatcgcactttatcttgtcgcatggaatttccactttctgctcgaatcggttatgagtgtttgagtgtttcatcgtttttttggtttttggacgatggtaaaacttgttcgaaaaccgccgtcctccttacctttcgaaggagtgacgaggtcgaaatcgcactttacctcgtcgcatggaattttccactttccactcgaatcggatatgagtgttcgggcgctttatcattaggtttttggacgaaggtaaaacttgttcgaaaaccgccgtcctccttacctttcgaaggagcgacgaggtcgaaatcacgttttacctcgttgcgtggaattttccactttccgctcgaatcggatatgagtgtttaagcacttcatcgttaggtttttggacgatggtaaaacttgttcgaaaaccgccgtcctccttacctttcgaaggagtgacgaggtcgaaatcgcactttacctcgtcgcgtggaattttccactttccgctcgaatcggatatgagtgttcgagcgctttatcgttaggtttttggacgaaggtaaaacttgttcgaaaaccgccgtcctccttacctttcgaaggagcgacgaggtcgaaatcacgctttacctcatcgcgtggaattttccactttttgctcgaatcggataagggtgttcgagcgttttatcgttaggtttttgggcgaaggtaaaacttgtcgaactgcgtggagtgctttttaacctgttgtcaagttggcttttcttctccgaagcgtgcggaggattttctcgatttgttatcgtgttggattttcctctccgaagcgtgcggaggattttctcgatttgttatctagttggattttcctctccaaagcgtgcggaggattttctcgatttgttatcgagttggcttttcttctccgaagcgtgcggatgattttctcgatttgttatcaagttggattttcctctccgtagcgtgcggagtattttctcgatttgttatcgagttggcttttcttctccgaagcgtgcggaggattttcttgattcgcaaacacatatacaatccattattgataacaccctacgtcctgtttatatgtattaacaccgagaagaaaagagaatcttacaaggtggtcggtattgtacacttcgagcaacatgtttcccccttttttttttctcttttttttcttcttccttttcttttttttacacatagaacttcttcaaggaaacagcattccaagtatgctttaattcttctccatcgaggtgtgccagcttgtatgctcctgttttaactttctttttactatgaatggtccttccaacagccacttcatttagtgttttcttgagggccaaatcaccttcttctatttgcctgattttcacttttttgttgtaatagcttttggtttcttctgtgttttttgccattttgtctaatgcttccactcttatctcgtgcaacatttccaaggtgatttcccttccttcttcgtctttttgatcaaacacaattcgaggtgaattcgctcccacctcgcttggtgtcattgcctcatctccatatattagcctgaatggagtcatgccagttgatcgaacaactgttgttcttaaagcccaaaggattgacaacagatcttctggccattttcctttggcagaaccttccagccttttctttatggcttctactattttctcatttgctctttcaacggcaccatttgttcgaggatgacccacagaagcaaagttgatttgcaggttaagacatttacacatatctttgaactttcctgactcggatcgttttccattatccttgggtattccaaatcggcatatgatattcttccaaacgaatctttgtaccgaagcagatgtgattcgtgctactgcctctgcttcaatccaccttgtgaaatactcaattgccacaatgacaaaacgtaaatctccttttgctcttggtggaattggccaaactggtggaattggttgcaactctcttggtggtgcttttgacgttgcaccaaatttttggcatgccttacatgtcttaatgtacttctctatgtctttgatgatagtaggccaatatactcattgtcttatcaccttcgatgcaactgatcttggtgcttgatgggctccgcacagcccttcatgtatttctaccaccattttcattccttcttctcttgttacacattttagcaaaggggtagtgactccactcttgtacaactgcccttctatcactttgtattttcttgacattaactgtattcttcttgcttcttcttctttttctggaagttgttcactaaccaaatacttcagaattgactctctccaatctatctcgccatgtatgtttgccacttctcttttctcataacttggttgaattaacacatcgaagaatgaattctccaatggttggcctgtggcagctgcttttgcaagctcatcagcttccccattttcttctcttgttatagtttttactgttatcccaaggaagtgtttttcattcagccttgcttcttccaagtactttgccattgtctcttcttttgctttaaatgttttggaaaggtgacctgccaccagctttgaatcagttttgattatcaatcgacgagcccctagtgctcttgcctttctcatggctaataaaaccccttcatattctgccgtgttgtttgttgatgggaaaactagctttgcaaaatattttagtgtttgcttcatcggcgtttttacaaccactgctgcccctacgccagtggcattgcatgctccatcagagtatattatccatagtttttcatcttcttccttttcctccacctcattgggagtccattctgccaaaaaaatctgccagaacttgagactttatagctgttctcgaggtatacttcaaatcaaatggtagaagttccattgcccattttgtaatccttcttgctacctccttatttgtcaatacctctcctatcgggtatgctgacagtatcgttatgtcatctgatattaaataatgtctcaactttcttgaggccatcacaattgcataaatcaacatttccacttctgtgtaccttgtctttggcccttgtaaagcttctaatacgaagtaaactagcatttgcttgttttctttctcttgcactaatgctgcacttactgtccctggtgtcgctgctacatacgttagtaaaggttgacctttctgtggacttgctaaagttggcatattctgtaactacatcttcaaatcatcaaaagccttctggtactcggccgtccactcaaatgtgtttgctccctcttagggttttgaaaaatggcaaaccctgctcttcagatttagaaaggaatctgctcaaagaagccattcttcctgtcagcctttgcatttccctttgtgttttttggtggctccatttggtgaatcgctgcgatcttgtcaggatttgcttctatgcctctcttagatactaagaaaccaagcaactttcctgctcttaccccgaaaacacactttttcgggttaagcttgactgaatattttcttaaattctcaaatgtttcctgcaaatccttgccatgagtgaacgcctgtttgcttttcaccacaatgtcatccacataagcttctacattgcggcctaattgctttgccaatactttgcctattaaccttgcaaaagttgctccagcattctttaaaccaaatggcattcgaataaaacagtaaattccaaacggagtgatgaacgacgttttctcttcatcttcatcacaaaaacttaatgataaccggagtactgcatctaagaaacccatcaactcgcagcaaactgtagcatctactaactactctattcttggcaatgggaaatcatcctttgggca

SEQ ID NO: 5021 - DNA, 15673 bp, Oryza sativa
tctctctctccgccgtcgccgccgagctccggtccgccgccgtcgtcgccccggaccatctcccgcctcggcgccgcctccttcggcttcgccgcatcctcgccgacctcgtccacccctccgtttcgctcgctgaccgccggagcaccgtcgaccccgtccacccgagccgcgccgccgccttcctccgctccggtcgccgttcccgtcgtcgccgtcgacccggggtgagccgtggaccgccgattcgtttcccccttccctcccctctctcggccgccgctccgccgtacctatggccgccgccggcgaccataggggcgcgggcgcgccgcctcccgtcggctgtgccggcgtggccgccttcgggcgcgccccgcggctgccgcgtggggcccggctgtcagccgcccgcgcccttaggtgcggctgacgcgtgggacccacggcgccggccggtgcgagcctgggtgcgcccggtccaccgtggaccgtgaggctgccgcgtgggccccacccccgtggacccggtccgcacgcccctcccctcggctgacgcaataaatccattttaaattaaaatttaaatgaagaaattcgcaaatattcatttaaagagcatataaacttcaaatggccataacttggccatttgaactcggaattggaccgttcaagtctctaatttttccttaagaagtcaagaacccatttttgtgctttgtttctgcttgttatatggagtttattagagtaaaagccttttcttttccgttggtcgtgtagacgctgcagcttcggaagatccgctcttcgtggaagttgaagccgacgtttgggaaagcgagcaaggcaagtcacatcatctttgaacatattgaatcccagtttataaaattatgttgctttaaattattgcattatcgctttatttaaattcccgcgttatcactgttttatctagccatgcctatttacctttgttatgaccttattattgttattgttattatctccttgttcaccctagaataaacaaaaccccaactagtggacactctactcatggtaccactagtatgattttaggtagatgcttcgctattttaattaggtaacattaggtggtttttcaactcttgactttgggaatattcatatcacctggacactatggaatggtttggttattgtggaattggattcacaccgccccctctattcaaaatccccaaaatggttttaggctgggctcggggtgcatggttttgatagtagcacctcggccatataaggaccggtcttcgggcctctgttgcaaagcactaccgtacttccacatgtctagtgggtaaggcttagtttgtggctcagtctggttataaacaaaagtacacggatggagatggaagaagtcgggggtcgatggacatctctaggacaaatgaaggctacacgagctgcggcccggtaatcgagatgtcatggcacagggctggtgtcctgctgctaggggctcagtcctgcctgcctgtcccgggggttccggccgtaggtgggattgggtcggtactcttgtctatggctaggatgggttggaaactatgtcacgtcttccgtccgtataccgtggtggtatgtggcacgtggttacacgtgaggaagatgtgtcttgtgggtaaatatgtacacctctgatcagagtaaaatctattcgaatagccgcgccctcggttatgggcaagccgagcaatgtacccaagttagtgttttaattcttaaaacctgcttaacaactaaaatgtggaatggttggcctgggttggcttgggacgagctgggacccagggtcgggttgccagttcggtctgaatcatcgtaggccttgggttaaggcaggttcgtgtgggttcacggccttgataaataatattgtatagttctagaatcgtgtttccaaaatagctttgcgcaactaagtgtctttaaatgctatttactgcaaccctaaccctttatattataactcctttgtactcccttgcatttattctgcacttgtgggtgtgtcttgttgagtacggtggttgtactcagtcttgctcaatttttcccaaacccagaagaggagttcctggaggatgaaggctttggtgtctagctcgtgcctgccgtcaagcgcctgtggtcgtcgccctagtcttccgctgtttctcgtttgtctttgtgtgtgctgggccttcgttgcccatgtaataaattatctatttacgcttccgcttgttaaactctgaattgtatcaacttttggtgtaccttgcctcctgggacaaggaataatacacgcacgtaaggaacgcccgttgggttatttccggtcgtgacaatcatcctcgtcatcttcatcatcggatagacatccacgaaggacgcatgatcgccgacaacccaccgctcccagcgctgggtgtagagctttcggtcgttcacttcgggatgtccgatggcccgaaagattctgacctggagcaatagagaaatgcgatgggagcaccgacccagaagagttccttcaggtttactccacggtactctacgctgccggagcggacgacaacgcgttggcgaattacttgccaaccgcattgaaaggctctacacgttcatggctgatgcatcttccccccctactcaatctcttcgtgggcagacttgtggcagcaattcgtagccaacttccaaggaacttacaaacgccacgcgatcgaagacgacctacatgcgttgacacagaacccgggcgaatccttgaaggattatgttcggcgctttaacgagtgcagaaacacaatccccgagatcaccaatgcttctataattcgcgctttcaaatccgatgtcagagattgctatactactcaagagttggcaacgaggcgcatcacgactactcggagattattcaaaattgtcgactgatgcgctcatgcggatgacgcattgagacgcaagaacgacaaaccgaagaccggaggagagaagaaaccagccaaggacgcacctaagtcaagcaaaaagaaaaatcgcaagagtgggaaaaggaaagctcaatcagaagttctcgcaacagaatacgcggaccctcccaagcacccagacccacaaggcagcgacacgaagaaagcatggtgccctatacacaagacggacaaacattctctagaagattgcctcgtcttcaaaaagtcgctcgcaaaacacatggcatcggaaaaaggcaagcgagtacgcgtggttgagaaagatgctgaggcgcctactcaggaattggacccagcatacccagattccgatctccatgtctcacacatcttcggaggttccacggcatactcctcaaagtgagaatacaagaaagtggaacgtgaagtctgttcaacgtggcagggggctgcacccaagatgaagtggtccgagcagaagatagaattctcagaagaggacgaccccaagactgctgtcatcccagggcgatatccgatcgtggtcgaacccactatttgtaatatcaaggtcgcccgagtactgatcgacggcggcagctcaatcaaccttctcttcaccagcgccttggacgcgatggggatcccatgaagcgagttgacacccaccgatcaacccttccatggaatcactccttagttatcgtccaaacaattgggcaaaattacgttgcctatgactttcggccaagcaaacaacttccgaatggaacagatcacctttgatgtcgctgaattcgatacagcatataatgccatcattgggagaactgcactcgcgaagtttatagccgcatctcactatgcgtatcaagtgctcaagatgccaggaccgaagggaacaatcactattcaagggaacgctaagctggcagtacaatgcgacaagcggagcctcgacatggtcgagaacacgcccagcccgcctaccacagcagagccacccaagaaagtgagcaagacaaacaagacgccgaaaccagacggcgcaatcaagatcgttccactctccagtgctaaccccgacaagaccgtcaagatcggggcatcactaagcgagaaataggaactcgcgctcatcaccttcctccgcaacaatgctgacgtgttcgcttggcagccgtccaacatgccgggagtacccagggaagtgattgagcacaaactcatggtgcgacccaatgccaagccagtaaagcaaaaactgtggagatttgcaccagatcgaaaacaagccatacgagaagagctcgacaagcttctcaaagccggtttcatcagagaggtactccatctagagtggcaagccaacccagtcatggtacggaaggccaacggaaagtggagaatatgtgtcgatttcaccgacctcaacaaggcgtgtcccaaggatcactttcctcttcctcgaatagaccaactggtggacttaacagccggttgcgagttgttgaacttcctcgacgcttactccggttacgaccaaataagcatagcaaaagaggacgaggagaagacagcattcatcacgccgttcggggtattctgctacgttaagatgccgttcggactaataaccgcaggaaacactttccagcgcacggtccaaggtgcacttagcgaccagctcggaaacaatgtcgaggcctacgttgatgacattgttgtcaagaccaagacaagcgactcattgattgacgatctgcgggaaacgttcgacaacctccgacgatatcgcctcgtgctcaatccagagaagtgcacgtttggagtaccatcaggcaagctactcggcttcctcgtctctgccagaggaatagaagcaaatcccgagaagatcaaggcaatcgagaacatgaagtcacctagaagactcaaggaagtacagaagctaaccggatgcatggcagcactaagcaggtttgtcactaggatgggagagcgaggacaacctttcttcgttctattgaaaaagcaagacaaatttgtatggacacaggaggccaaagaggcattcattgcactcaagcgctacctatcaaatccacctgtacttgttgccccccaacctaataaagaattatttctctatattgccgccacgccatattccgttagcactgtcattgttatcgagagagagaaggtgcaacgaccagtctactatgttagcgaagctctccacgacgcaaagacaagatatccatagatccaaaaactgctctacgcagtaatcatgacatcaagaaagctacgccactactttcaagcccacagggtcacagttgtctcctccttccctctcggcgaagtcatgagaaacaaagacgttgtcggccgcattgcgaaatgggtagtcgagctaagccaatttgatatccacttcgtgccacgaacagccatcaagtcccaggtactcgtcgatttcgtagccgattggaccatgcctgataacaggtcagacaaccaaatcgacaatgaaacgtggacaatggcgttcgaaggcgcactcaacagccagggagcaggggcaggattcatcttgacatcaccttcgggagatcaattcaagcatgcaattcacctcaacttcagggcaaccaataacacagccgaatacgaaggactactcgccgggataagagctgcagctgcactcggagtcaggtgactgatcgtgaaaggggattccgaactagtcgcgaaccaggtgcataaagattacaagtgctctagccccgagttatacaattatctcgcagaagtcaggaagctggaaaaaaggttcgatgggatcgaggtctgacatgtataccgtaaagacaacatcgaaccagatgatctagcatgacgtgcgtccaaacgagaaccacttgaacctggcacctttctggatgtcctgacgaggccatcagtgaaagaggcaagcggcgaagatagcccggtcgcccccgacaccagctcgggggctacggaggtagaggacgccgttgccgatatcgagaccacggacgactggcgcacccgactcattaaattcataagcagcgaagagttgtccgaggacgacgcagaagccgagaaaatatcccgtgaagcaaaagtctactgtatgatcggcaacgatctatacaagaaggcaccaaacggggtactcctaaaatgcgtctcgtccgacgacggcagacacctcctcctcgacatacatgaagggatctatgggtcacatgccgccggtcagacattaatcggaaaagctttccgacaagggtttttctggccaaccgccctcaaagacgcctgcgacatggttcagcggtgtgaagcctatcaattccacagtaaacacacaaagctgccagcgcaagcactccagactatccctctcacttggccgttctcgtgctaggggctagatatacttgggccattcccacgaggacaaggcggctacaggttcctattcgtagcgatcgacaaattcaccaagtggattgaagcgacacccacgggggaaatcaaggccaacaacgccatcaaattcatcaaagggatattttgcagattcggattgccccaccgtatcataacagacaacggctcccagttcatcagtgccgatttccaggattactgcatcaggctgagagtccagatctgattcgcctcggtttctcaccctcagagcaatggacaagtcgagagggcaaacggcatagtactacaaggaatcaagacccgcgtctacgacaggctcatgtcaaacgacaagaagtgggtcgaggaacttccatcagtactatgggccgtgcgtactacaccgacaacgtccaacaaggagacacccttcttcctcgtgtacggctcagaggccatcctccccaccgagctatgacatcaaagtacacgagtacataagtactccgataaggatcaggaggagcagcgatacgacgatgtgaatctactcgaggaacatcgcgaacgagttgctgttcgagcagccagctaccaacaagcccttcgccgttaccacgagaagcgcatccaagcacgcacgctttcgatcggcgactacgtcctccgacgggttcaaagccaagcaggacgcaacaagctctcacccaaatgggaaggaccgtacacgatcacacaagttctgcggccaggcgcattcaaaatcgcagacggcgatggccacgagttggcaaattcctggaacattgatcaagtacgtaaattctatgtttaagtcaatagtatccatacttgtaagacatcttacagcctcaataaagcctattttttaagtacagacgacaatcaaagtgttccttcccgatgatcccttacccagatgacacctagcgttgaaacctatcctcatgtccctttacgccgtcttgacaaggcctccgaggaacctaagggaacttcggctggggacgcccagagccgataaggccttgtcagatcctgtagagacgaaagaccatgtcagatctggtcgtgtaagagttcttgccgtgcatattaaccaagccatgtaatcggaaataaactttccaacttcacggctgaggggctaggatcagtgcttgttcaatcgaggcaggtcaaaggtccaagagccttatcttccgagaagaattctccgatgacaaggctgggggctagggagagtgtataactcaaacgactgatcgaagtcgcgaagttagatagatttctttttctattccacaagtatttcttacaattctatcaaaatccaaaactatattacactttttccaaagacatttgtcacaggacatggagactaccaggaaggccaacaccagtccatcgactggaaaaccatctccgccagcggcgccatcgacttcgccaggccatctatctccgtaggagttctccgagaacgagaaaacccttcgcggaggaactcgaggtacagctgcggacgatgatctcgtatataggccagcacgtgccccccggcatatcggcttgagcgacgacactcctgcttcaaggcctcgtcgatacgttgaccgatgccttcgagctgagcgcaggcccccattcagccacgagatgtatccggccgccgattcctcgggatccccacggggtactcggagctctctacagactctcgacatgaatgtgcagcaactcttcagatacgagttgaaccacacgtcacgaccccggagtgtctctacggcctggtcctttctcacctccagcatagtcctctcgagttccgcaacctcaaacttcgtcctccaatactagatgcgacgatcctggtcaacaagcgcactctcgagatctgctcagcatggaaacgactaagtcaagctgctcttctatcccgagaacacaacaaatcaagtcgatctagacggaagggcaaaggaaatggtaacaaagacaaccaacctaagagagtcgccgccatgctcgtttccacaggcgaacttcgatctacatcgccttccggcacatatggttcggacgcaagtaacggaacgaccactggcaactcaggctgcccgcgctgctggacatcctcgacatcaacatctctacaaaggacaacaaagtactcgagatcaaaatgccaaacaaagctaaggcaatgaccgcacacactagggcggttgggaccaataaaagttttacaaggcatgactaaagagtacaagagagctaagaccctactcttcaaaaagcgggaggacggactcccccagatcgtcgacctcctccatcacatccttgcgcgcgtcgctagccgccccctgatccaagatcttccgcagatcgagttcagggtgcgcaagccttacacacgcaaggacgtggcacgccccggtgtagatcccgttagacgtctcctctccgatcctggccgcatgcttggaggggacctcctccgtcgccatcaccagctccgcaagagaagacgtcagcgagaactcatcgggattcgccgggatggtggacttgataccgcactccccggcgagctggtgcagaccagtataggtgacccgcaacgagccacggatttccaacaagttgttctcaagctctgacatgcggtgctcgagcccctgccgttatcgctcgttgccgggcaccagttccctcatcttctggaggtcctcgcgaacctccgccagatcgcgcgccagtcgattggcgcgctcgttcgccgacaacgcagccgccgccctcgcctccgcgatctcgaggctaacaccgcgaacaccagcctcgaggaggcgccccatctcaacctggagctcctcccaggtgaggacggcagccggcgaaccacgaccagccacgagatcgctggctgggccactaggtgtcgcctcacggctcctgggcacgaccacgacatccgtcgaggccacggcaggagatgcgctggaggtccctccagacccatcttgcgccgcctttgctcgcaccgccctgcgaaaggctacgattgagacagagttcgacgaaatcacgaaacctcaaatttattcacttacttctcgctgagcgtcacaagccgctgctgtcgcggaggcgggagagacgcgtccgaggcctggagtacaatcgatatgatgtgaggtggaagttttccgactaggtgatcaaataacgggagaacttaccgagggagtgggtgtcttccgacgatgtccgactacagaggagaacttcctcccctttttcggaacgtcgccgccactcgtcgtggcagcggcaacagcagcgtcagacgcctccttggcgaccttctccttcagcgacgccgccacctgatggtccacgagcggcccgatgatatcagtcagagggagagcctacgtttcataaagtcataatgcgatcccggaagaaaaatgcaaaaggacagctaagtacacttacattgatggcagcgtcgtgctcggttgcccctttctcgcaaagggggacggggacgttgctcgccgttgtcgggccgctgatcatcagttggccgacgcggcgctccacggttgcgctattcaagcctgtagatcgagaacagaacccgataagccgggaagaacacgcgcataagagagtcaatttaactaaaaaggaaataccccgaggagaaacccgggtcgcgtcctctggcccagaataatcaaaggcgggatgggctcgagcctgaagcggttggatccgcctaccaatgaagtcggcagcaacttcataccccgacaacccccgttctcggaggtcgtcaacgatatcgatgaaagattggagggacggggtcaaggcgggtttggtggtccaagatggaatcttgtctggctgttcctcaggtaaaatgaagacaggatccgaatcctctatctgaagacagaaccacctcccccgccatttgctgcgagatgaggggcactgaaaggggatgtatcgcgacttcaggccatcccgaagtcggaaaccaacacacccggacacctttttggattccatccagcgtaactcatagtaaaagcggaagaggtcaagaaacggctccaccctaatgtaggcctcacaaagatgcgtaaaaatactcaggaaggcgatggagttggggttcaaatggagcaaggaaagaccatagaaattcaagaccaaaaggagaaattcagaaggcggaagaagaaaaccacagagaataaagtcctcaaccgcaaccatgcgacccaggacaggctggggtttagtacctcctacttccctctccgcggccccgcgaccgggaagggcgccatcctcctgcagtttcttcagtgatgcactggtggaggtagacttgtcgagatccatggccaccggagatcgccggagaaaggaccgagacgagttggctatggtttttttgcaggagcgaagaagacgagggacgcttggaagctggagagttttttgaataggctgacctcaaatgggatccccaaaactcccttaaatagacgcacctccgccggtgcgaattcccaggaaaggagagagatggccgccggaaatttttaggtccgttacgcgcggcagtttttcggacttcaatttaaattcactcatgaccgttgagcttcactcgacgttgtcgatcactccttgtctcttggtccccacaccgagaacaacgacaattttgacatcagaagtcgcaatcgatttcacgagttcatttaagcagaagtcgggggctactgtcagggttacgggtaaggtataccctctacccttcgatatacgtcacgtatcgatatggtatgtttgtgtgtatacggacgttctcagcataggttaaggaagtccatcatggagtctacagatggaaagagtcctactcggatagaactgggtcgtcattatatcgtgtcgggtccaatgtctctgagtcttacttagagaccagctgacctacggtaaaaaaagggaccccccgagaggacctaaggcatcgaatctcagagccaacacatccaccacagcctacgaagccggagcttatcgaagccaagtcgccgggagatctagtcggatcaactcaactacgatcttgtcggtatcgtcgagcttcattattccctttgtaatctgtggtttccatcatataatcgcatatcaactggattagggctattacctaccaaggggcctgaaccagtataatccatgtttcctgtttgcttgatgtcgtactatgtagatcctcgtaccagcataccccaatactctctatatccggtctacgggtatccaccgtcgacagttttggaaatggtgcttagaggaatccagggatgaagcccagtagaagcccgtgggtgcagatgaaccccccaaaaaatatcttttagttattacccccatatctcggccctatatgcacccccctcagcccaatatagtgcacccacagcccaaacagcagtccagttaacgtggtaagcccatgagcaggccagtagggtggaagccagatcgatgttttctcctctcgacttcttgtatcgtgtgccgcgccgccgccagtcttgacaactccgcctcgcgtctgtttggcttccacaccgctgctctcaatcagccaatcccagtcagcacttgcccatctcggcatctcaccgtcgccggtcgccctcttctcagttggcgaccgccgcgggcaggaagccgacagctaggcaaccaggagctagcgtcacaagccaacaacgacatcagtccatctccaccaactgatcagcacacaaccacactgtgcgttagtagagccaaggtaagaaaacatgcttcatctatttctttttcaatcaatttgatttattagatacgaagccctaaaatttttattggttgttaatttttatattgtaggattaggaggccaccaagcttcaatttggggtccttcagaatcggagtaagattgcagattggaggaaaaatttgagaatttgaattgaaggtgcaatttggatgtaagtcatgtcaattttcattctatttctttagttgaatgaatgataaaatctctacacatttacatcttcatgaatcatcttttgctcatgggtcagtagccatttatcaatgttattagtggttttcttcattttaaaaaaacaatgttttccacttctttattttattgatgcatgtatgtctctattgttgatgtcaaaaatttatcgatcagcggttgcattgaaaatttagcttgaagttatatatatatatatattgatatacttgtggtacaatcatgaacccctccatttcgctctagcttcgcccttagaggaatccatgcatttgggtgctataagagcaagttcagcagtatagttaattgctagctataaagattaataaatcacttacatctaatctatagcgaactcatataatatatcgctttagatatatatattccatacaacattattaattaatacatatcccacgtctttttcatatagattattggagcacattctacgattggccaaatctatagcccacttttttttctttctcctctctcctccaccttaaacataaatctatttgccatcaagatcaacgagtttatgcgtactagctagaattattatcttttttgtctttgtatgtttttggaattaatatatcagataccaatttttgttaccatttaaaaaaatcaaaattattttgattatatatatatatatatatgagtaaaatacacggccggtccttaaagttgagtgcgggtgtcacttaggtctataatcttgtaaattgcacatctagatccacaatcttatttaagtgactcattgaggaccaaaggatctctgaccaggttgactggcttatgtggcggtccagcgttgcaaaatatttacattttgccccctattttgcttcccgtcttcctaaatctctctctctctcggacacaggtcggcaggtgcgcacggcgaggcgttggtggcgagcggcgaacgccgacatggaggggcgggcggcagatggtggcgcacggggcgggccccgctgccctcccgcgcggcgtcgccgactttgcccttccgctccgagagcagaggaggaggtagtgcgagcggccggcgggggaggcgggcttgctcgggcgccggtggcgcgctcgtgtagccggcagcggaggcggacgtgaaggcgggtagcggcgcgcggggacgggccaacagtcggcgcgcacgacggcagacatggcggagagacggaagtgtcggcgaggcgggcgtggcggagaggcgggtggcggtgtccactcgatggggaagagcggctcgtgcaacaccccgcgcacgtcgccggcgcctcctctctcgccgctctccacccctgagccaaagaaaccgagagggagagctccatcgtgtcctcctcgccttccactccatcgtcggccgccgagaaggatgcattgccgattgtcgtcaagccgcgctcgccattatctctttcctgttccatattctactcaccattccgaagatttctccttttgatttcatcctctatcgtgcagcaaatcaatgggaacgccactgtgtcatcgccggccttgggacgtgctctgcgcgacgtcgtcgtgatctcatcgccgttcccgtcgttctggaccaagtcaagccgagccaccacgccactagtatccccacaccatcacgaccaaaacccctcaagaaccgtggagaatgaagcatcatggacggagatcggcatcatcttctccaactctgactgccggctaccatcgttgattccgcctcctctggtgagccattgtccgattcctcgcgcatacaccatacctgtcacctcactaacctcgtggacgtcatgctagatcttggagccgtttgagctgtcaccgtcatcccggaggttcttaccgccgccgccaatgtccatccatcgccaagtcctcgtcgggcctctccaagccacagtcaatcttcagtgagcctcctggtaaataatagaaccacatgcatgcacgcatttaagcaatacatggtcgtaggcgcacatgcaccaccacccgaaaacgtcttccgctcggactcgccgccggcgctactccgatgtccactaaccgagaaaagtagaggaatggaatcacagtaacatgctcttcattttgtcttttggtcgcaccccgaaacgagccacctatcgccgccggcgagctcgccaagctcacggcctcgaggtgctggtagagcgcggcgacgaggaagagcgcgagcggtgaactcggtgagtgcatacgccggcgacggcgaggacggcgcacggcggagctcctccacagtcggagccagagctcccggatccgcgcggcgacgcagtggcgcttggcgaggcgccacattcggagccagagcggcgcgcaggcgcagttgctgctgcaggggcgggacgacgatgctactattgcggaggggcttgtttgtaaattggtgcttgcgtggcgtgtcacgttggcggtcagacctggtcagaggtcctttagagctcaatgagtcacttaaacaagatagtggatctaaatgtactcgtgcttttatatatatatatatatatatatatatatatatatatatatatatatatatatatatatagcacactcatatggggcaccatggtgcccgggcaccatggtttcaaatgcacaaaatcacttaaatttttcaaaattttcaaattgtgagtatatacctagttataagaattcgattcatacctatacctatcaacaaaacaactcaaatttaactttatttcacaatccatgattacatacctaactaattatatgtatggatgctatatacctagaatcaaaatctaacaaaaacaagttcaaattcagttcaaacttgctttcaactagttagtaaagtagttaatattaatacctaaataattgaaaaagtttcatgctcatttgaattgggtatatactcaatttcaacaatggtgcccgggcaccatggagcaccaaacaa

SEQ ID NO: 5022 - DNA, 6003 bp, Oryza sativa
cacaagaagctagccgatctcccatagtctggcgaagaacaaaaggcaaggctaaaatcggctatcaagaacgtcgctgatatgaccaagtccctaaaagtcatccctggaaccgatgctcaggatgcccaattcattgaagaagtagaacaaattgggcaaagagctatatcggctatccagcgctacttgtctcagtgatattttgtgtaatagactctaggaattttatgccgattcaatataactccatattttgctaaaaaatttgcaattttgcaatttctcatatatgtgccccctaattttataatgtccaaaacattgataaaattataatttgaactaagggcgatataacaatatcagccattgtacatcggcaaaccacaaccgattacaatatgaaaacaactaagggcgatataacaatatcggccatctcaaggcgctgcaaatgcatcggctatcatgtaccggcaacatcagccgatcatgcattaacctaaacacttgggtaatatttcttcaaatattttccatttagtgctcgtccataaacttctccatcgagtccttgcaacatgtaagctcccttagatacaaccttatagatttggaacggtccttcccaattcgttgaccacttgtccgaatttactatcccgagtcccaatcggcaaaattaacttccatacaagttcaccttccaaaataatcttgggtaccaccttcttgttgtaatgccaaacaactcgttccttatccttgggtaccaccttcttattgtcgggttcatcttcaagccatatttcctagttctctcaaaaaccttcctcaaatcggctatatggttctctatctctttagacttaacaaccacatcatcaatatagacttcaaccaaccagccgatcagatcatgatatatataattcatggctctttgatatgttgctccggcacttttcaagccaaaagtcattacaacccactcaaacaagccgattgcaccaggacacctaaaagccattttatggatatcctcttcggccatgaaaatctgattgtatcctgcatttccatccatgaaactcaatatcttgtgtcctgaagcagcatcaaccagctgatcggctactggcattggatactcatcctttggggtagctttgtttaaatctctgaaatcaatgcacaccctaacctcaccatttttcttgataacaggaactatactagaaacccactctgcatatcgacaaggacgaataaaaccagcatcatataaacgtttaatctcagccttgacgggttcaagcatatcggccttgtatcttctcggaggttgttaatgtggtctaacccctggtttgataggtagccgatgttcaacaatagatctgctgagtcctggcatctcataatactcccaagcaaaacaatctctgaattcccttaagagctctatcaacttggttctaaattatggagataagttcttactgataaatgtcggccttggtcagtcacccggacctatatcaatctcttccaaatcatcagccgacatgaaaccctgtccttgcttgtcatcgagatcatctactgtgtccttggtgtagacgtttgaacccttcacgatgccctcaaaataatagcttgggctctcgatcttcaattggctgtcggctggcatgatttcaatcttgtcgccttgccactgaatcaagcattgatgcatggttgaaggaatacaacaattggcatgaatccaatcccttccaagcaacaagctgtaggaacccttcccatcgatgacaaaaaatgttgtagggatagttttgttgccgactgctagctctacatttaaaactcctttggtttccgatggattgccaccaaaatttttgagcaccatatttgcatatgctcttatggcaccagtgtcgctcgctgcccactcaaatgcttcttttgttagtgtatcatctcggccaaccgtagtacatacacatagtagtggtcctcctgcagtcatcgtagacaattccatctgctctttaaagtttggcttatgattctgatgtgaccattcagattcttgcaggtaataggtggacagcttttgaaactacagacaagcaaaggatattaaccacatagcaatatttgcacttttttgcgaatctatgtagcaatatcgttatgctactacacaactcaaatagagatacttttctagtcgcaatgtactcgtcgttttagatatgcatttatactctatttagatttagacaacgcatttagacttactcgtcgttttatgtactcgtcgcaatctaaatatcttaaatttatattccatttagacaatgcatttaagtcataattgtaaatttgttccaaaaaaaataattactacatattttctttattttttctagaattgttatcattttagttgtttaataaatttttaaattatcaattagtggtcttactctctccatccacttacaaagtacatacatgtacttcaaacatttcaacttcatatactttggtcattaattatactaaccaaattatacacattttctgtagacaaattattctgatcgattagtattacctcagtcccaaaatatagttatttttagcacaataccttgtctcgaaatgatgctatttctccacctacctctactcaaccaatcacaacattctctttcacctactttatcttatattaactattcacacattttctccaatcattctcacctactttattaatacacatgccaatctaaaaaatatttgcattttaggacggaggtagtttaaattactttcatatgatgttggtggcttcactataacatatctaggcctttctgaccgattccctgtgatgactgagatatccgtcattaatctaagacgattaaggtccttagttctgcctcggctgattctagtgacagcttaaggtcttggtattggtaagaaaaaaaggtcacggcatcaaacagggtaataacaaatgctttgaaattcgtgttacaagttgggctggcacacagtgatgaacaattccgtcataaaacatggtaagcagggtcctcatgacgcggaccacatttagacagtaccattcatatgtatgagattctttgtaaacattggtcataaaggagccctaattcctataagagtcagagctgcacaacgatgatgaagtagtttcgcaatatatagcagtagctagcaatagttgctaattaagggtctcacgcatgtaagaatgagataacgtagaggaggagacagttttctaatgtttacatggattgtgtgcatatgtttaattagggtttgcttttcaaatcagcatgtgtacgtctcgcgtggtttgtctggtggctacatcctatagtctggcatagtggcctcttgtgaaaacgtgttgatcaaaccatgtagttccctctcctgatcaatagtgaatgtgaaagatacgcccatgctaagtagtcgagcaggcgccattgatgtgatgccccggaaaaaaatggaggtgaaaataaaaataaaacatgagagaaaagaggattgattgggctgctttgctccttgggtttgagatagcgtgtatcaagttgcgcgttagaccgcgttcgaatatctctttttcaatttactacttccttgtttttccgtggcatggtgagtacgaatgtactcaatcgttggttttccccctttccccaacacgagtgaagtgaagttgaaagttagctttttctttcctaattcaaagccgttgcttgtggattgttttctagatactctaaattctgctgctgcttccctgcttgccgattcggggttgttccgaaggtgtggtttactctcaactattattttttacaaatgcccctttttgtccggaaggtgttcatagatggagctatccactatgacgcccttcaattacatggtcatcacagaacaagatatgtgactaaatttcgtttattcttgatgaacatgctttatagttattgatcataatatattgtatcagaaatcaatgatcaaactctaattttgaagattgtgagaagaggaagaaacacatgcaataaaattgagctgatggcgtattactgttacatacctctttctttgtttgagcaacccgatagcggcctttcacccctacttgatcctcaaactctttgaagttgttcataatttcattgtacaacgttttcatatagtccggcaggaaagagatagcactctcatcccatctgcaccagttcgatttgtaaattcaatgaaaattaatcacggcaatggtggaaacaccctatattttctgcaacatataaaaaactacatgaaaaagttcttttaaaaaaacactccttaatttatgtgccttaaaatgtcagggcctgtctgtcccatgcacgaaccatgcatccggacactgcaactttttcatctcctgatctagtaccgctgatgtctgaaggtccaggaggccgaatgtcatgtatcacttccagttaataccacaaatgtccacgtatcgctgctggactaagccgccaaccgccattcatatagtgtatctgtgccggttcaggaaccgacagtgttcctctcgagctacactgtcgctgccctactgccagatcaaaagctggcactaatagctgttttgaaccaacatgatactaataccacatgatcatatacaatttcaagatttaaatcaattcaatttgatagaggcttttgaaaaaaaaactcaaacttcacattattttggttctacactattcattaatctatttttgaattacatattattcaaatgaaagttatctaactagatcttgaattgtgttacacatgcatgtttgtatcacacaaccttctcttcatgcatgtgatattttgttttgaacttttttacatcttctaaacatataatttctggtcttgttttaatcatgttaatgaattgctgggtttcacatgatatttactcctaattggatgtagtaaattttccttaaacctttgtatggcttcatgcaatttccgacattcctcgatgttggcatggcaatcatatgtgtcatccataatgacagctagtacaaataacttggcaaataccatccttatgaccgctaagtcttcctcatagaacaccatgttggaccaaacgtatgactccactgcatggtccctaatgtaacttagccccatgtttccataaagatctttccaccacctgaaaattacgtgattcagatgtgtgctcagtactctatttataatagattagttcctattgactattttaggactagtacatatgaacatatacacatacaaaaaacacatgttaaacaatgtacagaggggtcttaataatattgtctctgtagtgctgtagaggtatgtttaaaagctatgcatatatatgagccagtgaatgcctgctacaaccatagtgacattaattcaatactgttttgcatctagattagggacattatttgaataaatcttgtgtttttcccaaatctctatataattgttcattccacgaaagatattataagaatatattctttgtttcgaaggccttcatacaaattattccttataggattcaaatcctccaagattcttgtgtttttcattatcatattccctgttctgcaggccatatgaattttgaaccgctaatccctttctgaacacacatccatcagtgcttatctttattttccaatttccatcgagtcaaccccagtcactactaaaatacgatttttcatggcgttaccctataattttcactggcggccatacgcaaaaaccgccagcaaaaacataatgagagctggagagcaacggaccgccagtgaaaacagatttttgctggcggccacgttaagaggtccgcca

SEQ ID NO: 5023 - DNA, 5101 bp, Oryza sativa
cggatcctacgccttcttcctccccgccggcgccggcgacgcctccgcgtcttcctccttggagttggacctcgccggcctcttgcctagccccaccgacagggagctggcctacctgctcagcaccggcgccgccgatccggacgccgcccgcaggagcgtcttcatcgtgcactcgtcgtcgtcggccggcctgctgctgtgctgccgaggctatgtcaacccggtgcattactacgtctgcgacccggtggctcgccggtgcgtggccctcccggagctgccatggccgcccgccttcgacaagtccggcatgctctcggtggctgccggcggcggcggcggcttccaagtggtcctctttgaaaagaggggcttcgcgcatggtggagggcacctagacctcgaggttttctcctcggactccggcgagtggccggcgatgcgcatccctcgcccgcaggacctcgccgggttccggtgcttcgcgccgccgcacctccggcacgacggcgccgcggcgtactggctcgggttcgagcccagggaccgggccgtggtgtacggcgccgcggaccactccatccgcctcatcccggtgccacgccgcgtccacgaccccagcgcgctcaaccggttcgtcggggagcggcgcggcggcgcgctcctccggtacgcgcacttcgacgcggcagagttcgaggtgtgggacacggacgacgccacgccgacgcggtgggcgctggtgcaccgggcggcgctcaaggacgtggtggcccgcagcccccgggcggtggccgccaaattcgtgcacggtcgcatcgtccggcacatccaccaccacgacgcgaactggaactggtgctcctccttcaagctcatcggcttcgacccggtccacgacgacgacgtcttcttgttcggggcgaccaatggtagtggatgcgtcgccgcctactccctcacgctcggcaagctgagcctccgctgcaagattgacactgccgacggctcgtcctccttgtgcggctgtgacatgttcccgtacgtacgcgcgtccaccacctcgccccgtgcggacataccaggcatggtgtataccaatgcctagagtggaatatatatcatgcatgtttgtacaccagcgtgtaggttcataaacttgacataatgaacttctctttaaacttattatgcgcatgtttattttactaaaccttttataccaccaaattcgttgggtacaaatatagatggccataggcccaacggcctggcccacggcacaacattttgacccggcccaagcacagcacggcccgtgcctgcccccccccccaaccggcacgaccgggccggcagactaggcccgatacacaaagaatagggagtaaaagtagacatgttatatgccatggtccaaagaatagggacgtcaaatagacttattttagttatatatacatatatatatatacatatatatatatatatatacatatatacatatatacatatatacatatacatatacatatatacacacacatatacataacatatacatatatatacatatatatgtatatatacatatatatatacatatatacatatatatgtatatatacatatatatacatatatatacgtatatatacatatatatacgtatatatacatatatatacatacgtatatacgtatacatacgtatatatacatatatatacatacgtatatatacatatatatacatacgtatatatacatatatatacatatatatatatatatacatatatatacatatatatatatatatattggatcatccaatagaatccagtttaccggattgaaaaaacaaaataattaatacttgatgtaacaatcgatgcatgcatgcagctactaatttaaaaattactgttgcatgcaaattagttaggtatgcagtgtgcttttttttcttcataatattcggtatgtagctgatccaacgttgaaagaacatatgtcttttttgcaggatccagtatatactgttttttttgtatgacttagtatgtactagtacgtagtacatttttggttgctggactatgtgcttttttgttgtaatatccagtacgtatgtacttgatttctttatgtatggtatatacttttataagttagtaacagtatgcatctttttaaattagtagagcagtatataccttttttatgttaatagcggtatgtacttttttaaattagtagaacagtatataccttttttaagttagtagcagtatatacctttttatattattaaaacagtatatacctattttaagttagtagcggtatgtacctttttatattattagaaaggtatataccttttatattttttaagttagtagcggtatatatctttttaaattattagaacactatatattttttaagtcaagagcagagtatatacttcttttaaagttagtatcagtatatactgttctttttcttttcttaaggtagtggcagtatatacttaattataagttagtaggcaggatatgcatttttaagtacatgctattttaaaattaggagtagtaagtatatatatatatatatatatatatatatatatatatatatatatatatatatatatatatatatatatatatatatatatataaacaagagatgcaaaagtatcggtacattctctaagatgcagaagacagcatgtattgagatgggaatatgaagaatagaaaatgtttgaatgtgccattctaatctagatataaacgaaaccatatgctgactataaaccagagcatacaatccaggcagtatatcccattcacttcatgtataccgattctgtctaaacagaatatccaatacgagaagcacaaagctctgttttcttttcggagcaatatactcgactttcataatacttcaaaacaaaataatgccactaaatcacagtttccaaacaaaggctttttcccatggcgcagaccctctacgtagcttgttgcagggttgaggtaagcatttgagtcattggagttaacatgttctgacggcggttggcaaccatctgcatgcaacaaagggcacccacaatggttatctataggctctctacaagagatacatgtcagcatattttcctacttggaagagattaaatgaagagagagagagtaaagctatctactaacctggagatagtctatagagaaaaacgaggcaatgcattagagagctatagatatccatgtagacataccattgaagtggtttactattaatctagtctattgctgagatgtaaatgttttatagatagcaccttactttaccattgcgggtgctctgagaggcttaatcaatgaactaacagaagaataaaatggaattgccatagaaagaatgcataaaaaaaaatccctaccgttttgtgcagcatcgggctagctgccacatcaatcttgcctcatcaatgccgtggatgaaagattgattaacgttgtgacctatgaatcaccgcatcgacctgctgatgagaggtcgctgcctacgacgccatcatggtaaagcccaaagcttgcttgccaatgacgccgctggggggacgatcgtgtcgtcggttagatggacgatgggttgccccgtgagtatgccgccgcgccgccgccgccgatttcgttcgtatcaagcaaagcctcgtttgatctgcatgtgggatttggattaggacgggataacttgttcaagcaattaatctgattagaatcacaagcggattaataattgatctacaagagaggacttaccagcatcgttttagccgcccatcggtgcaacggatgtacatgatgctgcctctatctccctgttggacgctgaatcggaccaaccgtcgagccagtgcgctgcgcgccgcctaggaacgacgatctggagtcgatcttgccgccgcctagaaatgtcaaatggcagggcagtagagtgctgccgctggatttatgtgagttgttagttccagatccgagttgtatgggataattaaggatcatgtgaattcatttttcacgtaaaattgaaacgggttcgttcgatgggatccgatagtaaaatcgtgcaggctcattgagatgctttggatcgacggtggatatagcaggagtacgtactcccaggagtatataatcattttcgtatatatatatatatatatatatatatatatatgtatatatatatatgtatatatatatatatatgtatatatatatatatgtatatatatataggacactcatatggggcaccatggtgcccgggcaccatggtatctaatgcacaaaatcactcaaatttttcaaatttttcaaattgtgagtatatacctagttataataatttgattcatacctatacttatcaacaaaacaactcaaatttaactttatttcacaatccatgattacatacctaactaattatatgtatggatgctatatacctagaatcaaaatctaacaaaaacaagttcaaattcagttcaaacttgctttaaactagttagtaaagtagttaatgttaatacctaagtaattgaaaaagtttcatactcatttgaattgggtatatactcaatttcaacaatggtgcccgggcaccatggagcaccaaacaaatttactatatatatatatatatatgtatatatatatatatgtatatatatatatgtatatatatatatgtatatatatatatatatgtatatgtatatatatatatgtatatatgtcagcccaaagaggagggaaaatagacttattttaaaaaaaggcacgatgggctacccgtgccttcgggctggcacggcacggcaagtcctgactgctggttggccgtgcctaggccggaggtgcagcccatgggccggcatggcacggcccggtgtgttggtcggcccgacagattttggtccgagcacggctgtgcctgggccgtgccgggccaggccgcctgtttggccatctatagctacaaatataatgtggcaagttgggga

SEQ ID NO: 5024 - DNA, 5157 bp, Oryza sativa
agaagcagcataagggatgatcatcctgaacagttgttgtaatcatatctgataagaatatcctcacaactaggcattaccaaccttgcatcgtgccgtgaatcatataggtttctgcaaatacaccacagggtattttttttgtctctgattttttctatgttatatacaatatgttgctgggtttgccaagttctaatatgccattgcatttttctgaatttttatgatatactatagtcgtctggtttgtctttgttaaaattgtacaattttattataatgaccaaaataccgcttggatgaaaaattccaaatatcagacgaacaacttttttgcatagtttataatatgatatttaagttgagcgtatgattgaaatcatcagtgagaaaatcagggaaatttctttttcgtgcggtttgagtttcgacaaatggttttgaaatccccctgtgatcgtagcggggggtgtaagtgattaacccaacaaactcaactaattagatcaaaataaaataaagtgattttggtttatttgaagaatttatagtcactccccacctgtatgtacccttggtacggagcgttatgcagccactggtgagcacatccgccgcagcagctgcgattccctccccttcttctcccgcgctcactcttccgccttcacgccggcgaatccccccgcccctcaccgccggagccctcctctgcaaccgcaccggctccggccacgccagcccgcggggaagacgacccctacccccgccggcgatgtcccacccgctctcctcagaacctcgtaagcgccgcccctcccctccatgcgccgtgtcgtgtcaggcatccttcaacaatcaaaagcaagcaagagattagttgatatatggggcatatcatatatatggcctcaactagcaaaactttggcagttgattgctatcaggtttcggctgattttggtcacaactgatattcagttcagtcagagttgctgaaatatgtgctgtccactcttttgctgtgagatttggtaatttaacacttcttaaaatgggtttcgattgtttgattatcaaatcttttcttttggtcagatgctttggaacaaagggcagtggtagtaaccaacaagcatggggagaagctcgtgggagtgctgcatcacacgggttcaagcaagatcgtcgtattgtgtcatggttttatatctaccaaggtaacatttggaaaaatgcgtttgtaataagtttaaagtgagatgcgaacaaatgtttgtttagcagaaatgcaagcgacataaatttgtgtggagatagtttgtcttgttgcttcccaatgtaaattcacttctgttttccagaacgacagtctcattcttgacctgatggctgcattgacaaagaaagggattagtgtctttcgctttgatttcagtggaaatgggtaagtttgctccagaaaaccatgtcttcccccagcaatttcagttcttagaagaagctatagtaatactgctttaatcttagactatgggcatggttctttttcgcatgagtatgtcttagaatggggagaatagctactgtagtccctaaagtttctatgtaggatcattttagtccctaaccttttaaatagttcaaagaaatccttaaactttgtcataaggcctagaataatccttgggtccaccaaaatcgtcatatggatatgccatgtcatcattcatgcaaaatctatgataaattgtctagtttacctttatgtatatcatagaaaaataaatgtaagggtgaattagacataaccatagggaaaaaaatacttttcctttttttcacccttttgacgtatatttttgctcttacatataccatatattttttaatttttccttttgttttttattttcctatgatatatgtaaatataaattggacaaatcatatagattttgcataggagggtgacatggcatgtccatgtggcgattttgatgggaccaaggactatatcagcccatgtgacaaatttaaaggacttgtttgaacaatatgaaaaattaaggactaaaatggcccaggagcgaaactttagggaccatcttggctattctccctcttagaatgtacaactaatgatggactgagacttgatcttcttgtatctgagggaggtgcttctgtaattccgttgttctttaaaatgtaatccattatgaaatgcacttagtgaagcattatagtacacactatctgacttttacttgcataaatcttgttaattgctgtcttttattgttgcaatccgtgctgcttgacaaatatttcagagaaagtgaaggagaattcgagtatggaaactacaggaaagaggctgatgatttgcactccgttgtatcatatctttgtaaggaaaagtatgatgtaacagcaattgttggccatagtaaaggtaggtgatatatgccattttgtagatctggtctggtaattctcatttctgttgagttattccattcagttttcatcattagcaagttaaaaaagatcgtccagttctttaacaagaacttgcctattacgctcctctgtgttcgatagcaaattagtgataatgttaaaaccttgttgcagcatctgtttggagatatattgctttgatggttttgtcttggcattcatttgaacagaacatgacattcttatattatttgttctgtggaacacatggagcatatcatatccaatttgttttactcccattatgaatttatgataaattttgcatctttccactaagcaaaataccaacatgatgtccctaatccgcaataccttttctttaatggtgctcttttctttttgttgcacagaatgtatatgtcctctcttctttgttgccatatattactaagttaaatttgaatatgtatctatttttccagggggagatgtagtaactctatatgcttctatttatgatgatgtacgcttggttattaatgtatctggtagatttgacttagagaaaggcattgaagaacgtataggggaaggatcaattgatagaataaataaagaaggctaccttgatgtcaaggataaatcaggtaaggcagcatgtgcgattgtgcaaccttaatcttccaagtttcttgcagcatgtatgcctcgagctttgcatatctgtttacattttgttgtcactttcatgggcatctgtcctacctggtgcaggaaatgtacagtacagggtaactaaagagagtttgatggagcggctcaacaccgatatacgtgctgtaagcatgtccattaccaaggaatgcaggttaggaaactatcctgggccctacttgtcccttgcttttgaacttgtaaactgaaacagcaaattactgcagcattagtgtttacggtttataacatagacgtgtatactaaaaaacttagaagtcaacaatgttaccttgtgctataatataacaaagatgccatgcacatattcagataacttgccgtctttgttcaggttcttcacagttcacggttcagcagatgagactatacctgtggaagacgcctataagtttgcgaagcatataccgaatcacaagctgcaagttattgagggagcaaatcataactacaccgcgcatcgcgaagaattggctgatgctgtagtggatttcatcacatctaattaggtatagaaaacctatctgttgaattattcatcctggtctctatgggcccttcagaaattactcttttctccacagttctgcatgtctgagagactgagacaacctcattcacgagagatgacttcttgtgatggaggatccttgtgtaggttttgtgccatttctctgccttttctcctctaaacaggtataaatctttggggaatcaaataagcagaaagcaggtgtatccgtgtatattagtgtaccatttcgtaggtccatattgaattactgatatgaattgtttcttgcagatgtctgtgtacctacaggattcctgtaaatatcaaactctatagtagaaccgtataaaatttcaggtttttactttgtactaagaattctgcgtgcaaaaggtttcagagcacaactgctgctgcttcctgatttcctggtagctggagtttttatctgggccgctattgagccagtttgatgtgatcattagttgggctgcttccttatgggccaagtccttatatacacgtggatagcctaggattcgagcctatccaaacaaggcctctagccaactactagcttcaattcatctatagctaatctaatagctcattcatacaatagttacatactacactattaatatctggtcccacctgtcatatacacactacgtcttagagtccgtgctacagctcgctacaaatctgtagcccgctgctcttctctctccttatttatcttcttaaaatatgtttgcagttagcttatagcttgctattgtacctgctcttatgtggaccaaaaattggttggccgtggttttcggtgattgtaattgagttgatcaagggccttcctaactggcgcagccgcgcacgctctctctctctctcgacctctcctcagtgctaataacacttattatagttgatgatattaattagcggtaatgataactgttagtattagtatttttttaaaaaaaatacataatagaacttttaactcagatttagaaaactttcaacttggatttgaaacttttaacccagctttgaaaacattcaatccagatttaaaaactttcaactcaaatttgaaaactttcaacttagatttaaaaactatcgacttagacttgaaaactttcaagtcaagattttttaaaaaacttttaacttagatttgaaaattttcaagtgaatactttcaatttatttttttaaaaaaatcaacttacattttgaaacttccatatctagttttgaaaattttcaagtcaagatttgaaaactttcaacttggatttgaaaactttcatctaaaaattcaaaacatttaactcaaatttgaaaattttcatctcaaaattcaaaatttcaactcaaattcaaaatttcaacatgaaaggttcaacttctaaaataaaaaaaat

SEQ ID NO: 5025 - DNA, 17509 bp, Oryza sativa
  unsure (1)..(17509): unsure at all n locations
tatattcgacccagtacttcgccatgggcagcaccagtcatctttgtggagaagaaagatcatactcagagaatgtgcgtggattatcgagcgttgaataaggttactatcaagaataagtatccgttacccagaattgatgacctgtttgatcaattggaaggtgctacagttttctctaagatagacctccgttctggatatcatcaacttcgaatccgtgaggaagacataccaaagactgccttcacaactcggtatggtttgtttgaatgtaccgttatgtcatttggactcactaatgccccagcctttttcatgaatctgatgaacaaggtgtttatggaatatctggataagtttgtcgtggtgtttattgatgacattcttatttactccaagacgaaggaagaacatgaagagcatcttcgtctagctttagagaaactacgtaagcatcagctttatgccaagttcagtaaatgtgaattttggttgtccgaagtgaagtttcttggtcatgtcatctcgtctggaggagtggcagtagatccaagcaatgtggagtcagtgttaagttggaagcaacccaagacggtttcagaaattcgtagtttccttggacttgcagggtattaccgcaggtttattgagaacttttcaaagatcgccagaccaatgactcgtcttcttcagaaggaagtgaagtacaagtggacagagagttgcgaacaaagtttccaagaactgaagaaaaggctagtgactgcgcctgtgttaattttgcctgattcgagaaaaggtttccaagtgtattgtgatgcatcccgacacggtttgggttgtgtgttgatgcaagaaggaaaggtggttgcctatgcatctaggcaattacgtcctcatgagaataactacccaacgcatgacctagagttggcagctgtggtgcatgcattgaagatttggcgtcattatcttttcggtaaccgtacagagatatatacggatcataaaagtttgaagtacattttcactcaacctgatttgaacatgcgtcagcgaagatggttagagttgattaaagattatgatatggaaatccactatcacccggggaaagcaaatgttgtagccgatgcccttagtaggaaaaggtactgtaatatgtcagaaggtcgacgtttacctttgggagtatgccaagaatttgaaaagtgaacttgngatagtcagtaaagggtttgggctgctttagagctaaacctactctgcttgatcaagtgagagaagctcaagtgaatgatcctgatatccaggaaataaagaagaacatgagaagaggtaaaagccatcgttttgtagaagatgagcaaggaactgtgtggttaggagaacgaatttgtgtcccagataataaggagttgaaggatactatcatgaaagaagctcatgaaactttgtattccattcaccctggaagcactaagatgtaccaagacttaaagcaacaattctggtgggctagtatgcgacgtgagatagcagaatacatggctctatgtgatgtatgtcagcgggtcaaggcagaacatcagaagccagctggtctgttacaaccgttgaagattccagagtggaagtgggaagaaataggaatggattttataactggtctacccagaacatcggcaggacatgattctatttgggtagtggttgataggttgacaaaagtcgctcacttcataccggtcaaaacaacctatacggggaataagcttgcagagttatacatggtcagagtggtatgtttgcatggtgttcctaagaagatagtgtcagatagaggtagccagtttacttcgaagttctggcagaaattacaatcagaattgggtacccgtttgaatttcagtactgcttatcaccctcaaacagatggacagacggaaagagtaaaccaaattttagaagatatgttgagagcttgtgttctagattttggtggaagttgggataagaatttgccgtacgaggaattctcatataacaatagttatcaagctagtttgcaaatgtctccgaatgaagcattatatggtcgtaagtgccgtacgccgcttctttgggatcaaaccggtgaacgtcaagtttttgggaccgacatattgcgagaggcagaagaaaaagtaaagattatccaagaaaggttgcgtgttgctcagtcgcgtcagaagagctatgccgacaatcgtcgtagagatttagtttttgaagaaggagattatgtgtatcttcgggttacgccgttacgaggagttcatcgtttccaaaccaaagggaaattggcaccgcgttttgtaggaccttttaagatcgtgagtcgaagaggtgaagtagcttaccagttagaattgcctccgtcaatggcaggaatacatgatgtgttccacgtgtctcagttgaagaagtgtttacgtgtacctacggaggaagcagatcctgatcgtatagaacttcaggaagatgtaacttatgttgagaagccagtcagaattttggaagtaagcgagaggaataccaggaatcgcgttatacggttttgcaaggttcagtggagcaatcattcagaagaagaagccacttgggagcgagaagatgaattgaagtcagctcatcctcatctgttcgttagttcttctgaatctcgaggacgagattctgtttaaggggggtaggtttgtcacaccctaaaaatcttaaatatataaattgttgtttaattggaatttttagaaattattttaaaagcctacaagctaaaccctaattttctaggaaaattttcaatataaaaatgagctagataaaattctattaaatactatgcttgctcctctattttctagatttttctgggaattatttgagcaagggaagtatttttaataattgaaacatcaattcacaaattgtttttgtttaaaaagttcaaaaatccccctcttaggccgttgggccgatttcggcccaactctctctttcctctctctccccgcgcgcggcccatgccggcccaagccgccgccgcccgcgcccctctcctccagccgctgacatgtggggcccacatgtcagggccgtcttcaacctccggccggccgccgccgagcccgaaccctagccgccgcttcccgctccgattccgcccaaatccgagcccgattcctccgggtttttgaggggttttgttcctctcgttctcctttcttttcccccaagaatcaaagcgaatcgttgggtattttatccgaatcgaattcgttttgttttatccctaaaaaccgagtttgatttcttcccgagtcgattcctctcgtttgcggcttgatctcttcaatccgagctcatataaagcttcccctcgttgtcctcttccgtttgccccctttcccgagctctcccgtgccccctagcgccgccgcgacgtgcttcaagttcgccgccgccgccggccgtcttcggcatcgtcgcgccgccgcctccgtcgtcgtcgccgctcgccgtttccgccaagaggagcgccgtcgtgcgaggaagctcggccgcccctccgttttcgccgccgacccccggagcaccctcgtcgccgtcgacccgagccgccgcgccgcctcttctcgtcgccggccgccgtcgtgcaccgtttgccgtggtggtgagtaccaacgggttcgcctcgttgtcctctacgcgtaggtggtctccgtttccgccgccgacctccctagcgccggcgagccctccgacccgagccggccgtcgtgctgacgtcatgccgacgtcatcgccagggctgacgtcatcatctccagggctgacgtcatcctctctctctttttcctttttcccgattttctaatagatttaaacttcggaaaatcataactaaataaccgtagatccgttttaggtggttcaagtttctaaattcttctaaaatcaaggtctacatgttaaaaatatccacatgtactgtttatgcttgtttttgtgctgttttgttgattttgtttatttgctttagtttccgacgttctggaggagagcgtttccgttgaggaaggttccgaagcgtttgtggaagcccaaggcaagtcacacagatcccaaacaaccctttgagcatgttgatcccgtttaaagctattattttatttcaactatgcattgtttttgaatgtcatcgggtggtgaacctttcccagttagttaatggccgaagatgactttattttcctatgggttataatttgattagcatgaaccttatatattggattggttcagctaaatgctatatataggtttgcttagctatgcttagaaacattagctaactaaaaggggttaaatataaagtatatacataattattattgttaattagggttatattcaatggtagctcacgatggttaatcgtgtgatgttaattaattgataatttaaaacctggataaggtgggttgtgagcatatggttttgatggttgtgctcatgacaattaaggaccggttcgcgagctactgttgtgaaacatttatcgtgccaaccacaagccagcgtgggcaacgactttatcttttgtatagcgtgattcattatagtgcgccagactgagaagtggcgagaagtccatgggggtcgctggggagtccatgccttgtttataagggggtgattatgatccaggtacggtgcactgtggtgaattgtgttatgcgaggggtattgtcacgactcctttccgaggtatcgtggtggtactgaggcacatggtaacatgatgtggggttgtgtcttgtgggtacagtggtacacctctgatcagagttttaatctattcgaatagccgtacccgcggttatgggtgagttgagcaatgtttttcgtgattagtctcacactactcattagtggtaataatgtggtaattaatttaattcctggtttggaatggataattcctggtttggaggtttaatttgttcaactggggttggttgtacaaatacggttgggcctatgcaacacgggtgtgttgtatggtgtttatttaatattgattaattattcaactgttttactattctctaaaatatttattaaatgctgttttctgcaaatgaactatattatgccatcctttgttatcctgtgcacttgcatatttgctgtgtggcttgttgagtatgttatatgctcattcttgcaatattcattcatcagaagaggagtacttcagtgaaggtgatgatctggaggattaggcttgttctggttaagttgcctgtggagtggagtcgccatagctgttccgtagtttgttatagttttgttttccgctgcgtagaatgttttatttttctttgagaggaactatctacctctgtaataatttattatttgtgagtattcaatagttaattatttgtactctattatcaatattgtcattgtgtgcctcggttgattcctggacgagggtttaacacacatgtaagcgtttggaattttggatagaaattccgggcgtgacaagaagcaaaatcctctataattttggagaaatctagggaccaaaatcccctataattgtcgacagagggagtactgatggctcggatgtgcgcatatggttggatatgtgtgagacgtattttgatatgtaccaaatcaccccaaatttcaaagtatctgtggttgcgttacatatgtcaagaaatgctgctaagtggtatcactcttacaagttagtggctgacctcagttcatggggccaatttcttcatgcagttttttgacatgaaacagcaggagaggctcctactgtaatatatattaatatatatatatatatatatatatataataaaagggagaatttacaaaggttacaaataattacaaataattacaaataaaaaaataatttcttcatgcagttgcttctgaatttgaggggattgttgagcatgagaaaatggttgcattagatgctttaactcaaactagaactgtggctaagtataaacatcaatttgattcactggtttatcggattagagtatttgatccatcaggcatgatgttggtgactcgctttcttggtggtttgaaggatgagattcgttttgcagtagtggttcaacttgatacacttcagcaggcagttgctattgcacttaagcaagaaactgtgttggcagagaaggctactaaaactaagggcaagtttgttaagtatacttgtcctaaacctgattttggtgctgagacaacccctgctcgatctgacaaaggagatctttggaaatctagatagctgaaatactataggtgtgcttagggcctttgcttcaagtgtggggagaaatatagccctgaacatcgttgtaatgtgattggtcatattaaggctatgcaattgaatgaagttttggctgatgatgttcttgatgcagtggtggctgtaaagtattctgaggataaggatgatcaaagtaaaatttctcttaatactttgacaggtgcatgaattctcactaccatcagacttcgtgcttttgttcagaacaaagtctcgttgctcttggttgacttagggagtactcatagttttattgactataattttgcttagctcttgggtctaccctctacagcctatttcaccaaattctattaaggtgggtaatgggattgtttgccctgtcagtatatagtacctcacttttcctggtggattcatagacatacttccacttatgatatgagagtggttgccttgggaggttatgatgctaatcttgccatggattggctagaatagtgggttgaaatgtcttgtaattgggcccaaaagaccactaaatttcatcacaaagaagttctcatttcattacaattagtgcaagacccttctactccttccgaacctactgttgtttatatgcaaaaattgtttaaatggcacaaaggccgtgatatctgggctgctgccctattggaacaaccttccaaagtccatatccacctcctctgtcataccagttccagttcagcagttgttgactgaatttgacgatgtgtttcaggatcccaaatgcttaccccctcatcgagtatttgatcatgctatctctctcatgccagatatatctctagttaattgtcgtcccttcagatactctcccttgcagaaagatgagattgaaaaacaagtgacaaaaaatgatagatgttggtcttataacacccaatatgagtccctatgtttcccttgtgttgttggtgaaaaagatagatgacagttggcgcttttgtgttgattacagaaaactaaactccctcactatcgaaagtaaatttccatgccagttgtgggtgagctagctggcactatattattttctaaattggatttgaaggctggatatcaccaaattcgaaaggttgatgctgatgaggccaagacggctttcaaaacacatcatggccaattccaatttagagtaatgccctttggcctcactaatgtctcctctacttttcaatgtctcataaattcagtctttgcaccatttatcagaaaaatttgtgtttatctttatgtatggcattttggtttatagtcctgatttaaccagtcatttgagttagctgtagcaagtgtttatggttcttagacaacacaatttgtttgctaagagatccaagtgcccttttgcttgtcataagttggaatatcttggccatattatttctgacaaggggatgagtactgatcctgagaaaacaattgttatgcttgcttggccagttcttagctctgtgactgagttgagaggatttctaggtctgactggatattatcaaaaatttgtgaaaggatacagtgtgctggccagacctcttactcttttactgaaaaaaagggctttccaatgaaagaatgaggcagcccaacttgcttttactcaactcaaaacaaccatgagcactactcttgttctagcattgccaaattttcaatttccctttactttgggaactgatgcttgtgcttatggtttgggagctgttcttagtcaacagaaccaccctattgcttactacaacaagactataggtcctaataatcagaagctgtccatttataacaaataatctcttgccatcgtgatggctgtggataagtggaggtgttacttgcaaaggggtcccttcactattaaaactgaccataagagcttgtgtcatcttgatgatcaaatcttgggaactgagctacaacaaaaggtcatgactaaattgatgaggctccaatataccttccagtacggaagtgagtggacaatgtggttactaatgctctttctagaatctaatcccaagtgagtgccatttatgtggttcaaccccagtggattgaagagatgattaattcatatgcagtggatccacatgctcagtggctgttagctgaattggttgtgcattctcccaacagcccgggctattcattgaaggaaggactgattcgatataatgacaaaatttgggtgggctctaatgctggtctccaaaccaagcttattcaggcttttcattcatcaccaattggtgtccattccggtattgctgctacatatcaccgactcaaacgtttgcttgcctagcctgggctgaaagctcatgtggatggttatttgaaacaatgccaaatatgtcaacaagcaaaatatgaacattgtcgtgcactgtcacgcctagaaattcacgaaccagaatttctaagcttaatgtgcattaaatccctgtccaggaccagccagggtacacaaacgacaattgttgacatacagatccacgtcttacaaaaatataaaagattacaaatgcagcgaaaagataaaacgagctaaacttggaagcctgacttctgcagcgggcgactccactccacaggcaacccttgacagcagcgacaaaaccaaccctaacaagatagctccaacttggaagatctccagctctggtgtgggggaaaagagagcaagactgagtactacccactgtactaaacaagtcatactggaagagaaggtatgatgcaggataaaaccaaaggaggctaagggttcatttgcataaagcagtcatttaaaagtagtagttgaaagcagtaaaacagttgtaataattaagcaatattaaccaatcactgtccaacgctacaccacgttgcaaaggcccaaccaaccacctgaactacaccagttcattaagctacactaggggtgagactaatcacggtgaatctggttgatcgcccataaccgcgggcacggctattcgaatagttttactatggccagaggtgtacaactgtacccacaagacacgattccacacatgtcgccatgccccgaagtatcaccatgatactgcaaagggggaaatcgtgacaagaccctccgcataaccctcccctaaccatccacaccacgctaaggtttcacccccacccccagcaggcagtgggcagtcccctctgcgctgcggtgaatccggcagctggacaaccggacaccccggccgacccaactccatcacgcccaccctcgcctaggaaagggtcgagctatacttcagatcaagcagttacccactcccgcttgtggtaagcacggtaagtctcccagggtttcccatgaaccggtccttaattgccatgggtgcgaccagcaaaaccatgcacccacagcccaccattcagtgtattttaattaactgacaccattgtggtggcaccaatccaaagctatactcatagttaaagtctatgtaataatgtgatccgcattggtgtactagttgagctaagcatggctaagcatttcctaaaccaacatctagtcattttgatacccaagttatcaatgacataaggtaaacaataaatggctgagtaataggacccatcccacatgacattgtaaaagaatacaacatttaatagaaatacgggatatttgtaaattgggtacaatatgatcaattgtaatgcatgacttgccttgccctcgcattgatgataccacagcaatgtcttcgagaaaccgcggatcgacgaaacggccgaaatctacgcgacaaacaaagcacacaagcaaaacacactataagactactgaaacaaagaacaaaacaatttttaatggattctagagaattttatgaatttactgagacttgaatggacttaaacggagctcggatgaattacttatgaattttagaagataaactgtgtttttactaatagagaaaaatccttaatcaattttattgcgcaatattgccccagggctgatgtcatcaaaggagggggagcggcgccgacaggcgggccccgcatgtcagtggcatgaggcggccagtccaccgtggaccgggaccacacgagtggtccaccaccggcccacgggactgacggtccagatcggccgggaggccgatcggacggcgcgggcggtggcttggcatggctcggctcggcagaaagccggccggccggccatgaggagcggcggcggcgcaggaggcggcggcggtggccgaaggcgatggcgagctcagagagtggcggcgcatgcgggacagggggaagaagggaggagaggagctcctcaccggcaagcacggcggccggggcgaaggatgaaggtggcggcgacgaccggcgacggcgagcgatggccgagctctgggacaccctaagagagaaaagagaaaggttagagggggagtgggagtccacggcgagtgaggatgccggctgaaggcggggaaatggaggagctcaccgacgtacgtgggaaacggggctccggcggaaatttgcggcaaccgagtggcggccgaggagcaggcggcaccggcgatcgcgaaggcggcagcgacgaggctagacagcggccatagtggcggttagcggctaccgaaggtcggcggtgggcggcggagctcggaagagagatgcgacggcggtagagggcacggatggaagcggcgagggcggaaaacgagagaggggtctcgggggagcgatttataggtgtgagaggggggcggacgtggtcggttagccaccctattgcgccggcgacgtgggaaggtcgggagggagagagaggggattcaaacttgaatcccggtcggtgcgggacgcgcgcgcgtgcgaaagaggtggaggactaggcggcgacatgggcacgagcgcgggagaggcgcgggatgggcgcggaggagtggcgtgggcgaggcggcgtgggcggcagcggcggttgctgccgaggcgcgggtggcgggtggttagggacgactgacaggtgggccccacctatcggcgtccccgagaggagggaggggaaacgggccggcccggccaagaggaaggtgagcgcgggagggagattgggccgacggcccaacaaaggaaaaagggaaaataaaaagaagaaaaaggaaaagggattcctgggattaaatgttgcacttgctcatttttaactggttaaaattatttatagagctctgaaaatttcactaaaaatcatgttaatgtattggagcatggggaactcaagaaaaattccaccacgccgaattcgattattaaatgcattttttaattagggaattagctctaggttaatttaaataatttcttcgagcgatttatttaacaaatttttaaagcaagaaaaagggagaaacttcagggcgtgacatgcagctgggttattggctccattatctattccaaaagaggcatggcaagatatttctatggtttacctagatccgatgactacaatgctatattggtggtggttgatcgttttaccaaaattgccacttttatttctcttaagaattctttcaccgctcctcatgtggtacatatggttggaaaaaaaaatttcaagacaaatggcattcctcgttcaattgtgtctgacaaagatagattgttcactaatcactagcaaattttggacaaccctctttgagatttgtaacactcaacttcagaggagcacaacatatcatccacagactgatggtcggactgaagatgtgaatcaagcaaaatcctaaaaagtggaacaactagatacacttggtagagttttggtataattctaattatcacacatcattggtttgttctccttagaaagctttgtttagcaaagaatcaaattactctcaactccttgacctcactgagacaactcaccctgaagttgtggatttgcagactaaacgatagcatctgtctgaattcttacaacaacagctgactcgtgcccaacttcgtatgaaacaccaagcaaacaagggccgttctgagagggagtttgcagtgggtgatcaagtgttcctgaaactccaaccttatgctcaatcttctgtggttaatcgcccttatcccaagttggcctacaagttctttagtccctttggtatcctggaatgtattggcaatgcagcttatcggcttgatcttccgggtagtagtgctattcaccatgtgtttcatgtctctcagctgaaggggcaagttcccaacaatacacctgcctattcttcattaccttcgccggtcatcctcgacgctgttaaggcaagctattttggatcgccgtttagtaaaaaaggggaacttggctcatgtgcaagtgctgctaaaatggtcttctcttcctgttgatcatgccatttgggaagattatcatgtggtgaagaatcactttcctgatgctctagcttggggacaagttgtaactccagcgggcggcactgtcatgaccggcaatagtatggatcacaacgtagaggagttaagcaagtagcgcgtgagtttgggatttagtcctgcttgcctggaatgatttgaggcctgtgagcccagtgtgcctgtggcccattagcctatttcggaacatgttaaatattcatcaggtggctcaactgtcgcgagtctggcaaatgaaatctatcgtgcatagctaccttaagttcttcccaagtagtaggtaaaactccctcgtcagctaacccagttcaccacatgatagcaaaatctttgaactcactactggcttgtcgaactctatgttgcttaggaacaaggtgggcactaaacttttgttctactgtcatctctcaattaaggtatttctcagcatcataatatccccaaaaagagggtattttaaacttaaccttagcataaggatcatcgggcacacgattattgttaccttgttggtggtggtgatttgaagtgccacccatacctgtgcggtttgtgcgtagatgatgtcgtagccgtgcttgccttgtagcttgtgcatcaatattgccactagaatcatacaccgtgtctttaggatgaccactgtcgttgctgctgcttacttcctctttggaaggttcttgtgtctccaacacagcaacccgatcagttagcttggacatcccgcttgtccaacctctccatttggtttacgaagccgattttaaggatggcatcttggacagcctttgtaacggcctccgtcatctccttttgagcattttctacaacagtaatatggtgcctctcaacaactctcagcaatatggagctccttaccaagccattataaggttcttaccagcaaagcaaaggatacctggaagatgtaatcagcgattgcaaggatcaagaacctgtgctgtctagaagtaatatgttgagctaggaaggccaaatatatgtgagtggtacgcaatccaatgacagatagtaatgctgaataaaatcccaagtcacttgcccttagttgctagtctactcgtgtcctagacagtagtggtaacaatgatggcgcaaggaaaatgacactagtaaacagcaagaaaggactggtaggcaagcttcggcgagtctcagcaaaaacagcaaaaccgcaaggctgataagctcaacggagcgcgtcgtgagctcgatgcactagtggaaatcaacttttctttttttttattttttgatattttttattttccaggagcacaaaaataggcacaccacgaagttacagctcaatcggagttgatatgtggcctacagaattttctgaaaccactataaagaatgtacagaaacttgtgagctcgacagacaattttgcaaaccaaatttcagaattttgtattcgccaaaccctccgaaggtggggagaaacggatgtaaattttttttctcttatccgaaaagttatggttgtttgaagttagggcttccgactaggtttttcagaggggatataacctagtctgtttagcggtggtattgggatatggtggcaacggagtatgtaggatgctctggtgatgcgtggtgatctggataggtgtttatgatggcggaaacggctctcaaaggatgaaccctaacacacggatgaaaggtggcggctagggttacaaaggaaaacacacgactagactaaaacacgcattagaccagcaacaagaacttaaactaggactcaaactcaacactatggactctgaaaaggatcatgcaaaggctaaacacggtctgggttaaggtgtctaacgactacaacttttttttggcttttctgtagactctaggataactgcaaagaacaaaaactaatctagggtaaagaaactgagcgaacctgacggtgaacctagagctctgataccacttgatgtggactagggaacccgatcttccgaaagattctgataatcaacgattttggcggagtcgcgacacaaatcgatccggcttcttgaatgaacacgctcttgagccccgcaatcgcagcaccacgtctgctctagttatcacccgtgttgaaacgcggatgacctcaccgagaaggctaatccttgtttgcgaatagaagaacacaaacaagaacaaggtagaatacaaccaaaattgcagatgaatgattaagctcacaagttggggtcttacaaaccgatctagcgatgaaactgttctcgacagaataatctaagcaaaacccaaaccctatagataatggcgggtactgatatataaagtttaaggttgtgcaaccaacccttgacgcaaccctaatgggttccaacatgatacacagcctaaaggcccaaatacggcgacacaataccgggacagattctggatgtcaacttatttggttgattaccgttgactcggaaagaatttggacgtcggaccaaaaccattgaaaagattatcttcttagctttccatccatataaagaacgcccaatccgagcttgtatgtgacctatgcgcctgttttagtgcagactggtcttggactccgaattgcactcgaagttgacttggtttggacgtccaccttgatcctccataactctaggtccttctccaagtgtcttcttatcctctccattattcctaatcacaatataatcattaggtagcaatatattctcaaattcatacaaagaagaacataggaacgagctcacctctaaattcaattgtcgcgcgcgagctcttgttatcggtccttgaatgaccggtggaggattgttgtgtgtatccgatggagtgatgtccgcatcactctctccctccaacctaatctcgtcggcgacgatctcgttggtggcggtgtgttacatgtaatcaaatcgtagtaaaaaaatgtaaaatggaagaattcttctctgattttattgtgttattttttgaaacacttctccgctttatcaaaatggtgagctttacctacccctggatcctgatcttagccttaagtacttaatcctatcccagtgattgctagatcagcatacggtttcaccgcaccatcacctacttaattgagttttaattattttaaacttagaaaattaatttatctaatattgtagagcaacttctatatagaaagtttttgcacgaaatacaccaaggtaaaatctgtaccctaagtgcaatgcagtgctcttcatctccaatggtacagtatctgctgttacaaaaatactatctctgttccaaagtatctgctgttacaaaaatactatctctgtccaaaaaaaagctaacctagaaggggatgtgactctcctagtgcaatgaatctggatagccctttgtctaaattcgttgtactaggaggagtcacatgactcacatcccctcccaggttggcttttttttttttgatggagggagtaggtttgaatctatattattagtacaaatttgttgttttagcttgatagtcctaaaatgtttggatataagctaattatttttttgtttagtatcataaaactaatattctacttaaggatgttcaatttatacactatattatttttctaggtttaaatcggggttatattatttagttatcttcatgtacttttgtttgataattctcctatttatgttcatggaatgaatctgtcattcctttcttatgttcctagctagttaccaataacatatgcaagtaataaattgcatgcacttttgttgaaaaagttaattcgttcaagttgccagataacatgatctgtcaaattcttgtgcaaactttgtcgccgctcatacatcatattgttcaacatttctctttaagttgcatacaaattcagggctagagaaaccaacatgctatccaatgaagagacagtaaagctgcacaagggcttcataatttacatgttgcttctatttggtcgttctatctttattttctcaagcaaggtcgttcaataatttttatgggcatgattaattacatacatggtcaagtgatagattatttgagatttatacatgaactgaagccggttttattgtgcagtgaagcaggagaggaaacttatatatgcaaccatgtgcgaactaactatagggccgtaaatgcatatttgttgagaatacactcactggtggagagaaaccatctttggtcggtcgaccaaattccacaatagtcccggttctattaaaaaccgggactaaaaacgatttttagtcccggttaaaaaaattttgatctttagtcccggttggtaaactaaagatgatttttagtcccggttcatcccctgtcagatgtatgtcagggggtcgagaatctttagtcccggtttatactaccaaccgggactaaagattaccactttagtcccggttagagttatcaaccgggagtaaatatttctctcccacatctgatcggttaagtccagacagatatttacataagattaaaaatcccctctcttcctcttctcagatccaatcctctttctcctccccttccctctctaacttccctcctcc

SEQ ID NO: 5026 - DNA, 20196 bp, Oryza sativa
cgcgccctgcagatcggcgatggtgtgttcggcagctgcgaggcgggcggctaggtcgccgtcgcccgcggcgccccgccgcgtggcaccctcgcgtccagctccttcacccgcgcctcgagctcagcggcccgctgatccagtgcggccctctcggcgcgggcgccttccagattacggggcgcctgctcctcccgcgctgcctcgcggagggacaggctgtccgccagccgctgcgccgcggcctcggcctcctcgagagctcgctcccgctcggtaagcgcgtcctcacggaggcggagtgcggactcctcttcggcgcaggcggcttcgtgcgccgccagcgttgcctcctggatggcgacggcggcctcacggtccgccaggtccctctccctcgtgcgggcgcgctcttccagcgccttggcgcgagcctcaagggcctcttcgcgccgccgggacgccgcctcgttctccgccgcccgccgttcccgtgcagcggcggcgtcaaggactccccgggcggcgtcgagtttcttctctagctccaccgcccggctcccgtattggaggtagagatcgacccgcgcctcgttgagcacggcggtggcgatgagtgcagtctcccgctcctcctccacctccctggcgatctccgccagctccctccgacgggcctcgagctctgaggcgtgccggcggtgtgccttgcggcccgcctccaccatggcttccaccgagcgccgcccctcctcgacgcgcgcccacgccgcgtcgagctccgtccactctgcctgcaggacctccatctgggcacctagcccgtccagcaccgtggtgttcgcggcggctagggcctgcaggaggggctccgcgttcagtggggcagcggaaggcgaaggagagagccgcctcggtgcgggcgccgcgtggcacggcccgccgatcgacgtggcggactcgggggcgtcccccgaagctggcacgtcccgagcgtcgcccgaggggtcgggcccgagcggtgcgcccgcggcctcgtcgtgggtggcctcggaagtcgtcgtcgcctcgggcggagtcgggtcgggggcctggcaggccgcttggcgtgcgcgcgcctcctccgccttccggacggactcctcggcccggcggagtttggcctcctcccgagcggcttcctcagcctggcgaactcggacggcctcctgggcagcttcttcggcttcccggaggcggtctgcggcttctcgccggtcagcctcccgcctccgggcctccgcggtcgccgtctccacggcctcggactggccgaacttgggatggcggggggggggcgcgatggaatctcgctgaggcagaagaaaaaccagaggacaaaagaaacgggtgagtgaaagcttgccttgggagatgggagaataaatacggccgcagtgggcgcggggacaaacctgcgaggaggtcggctaaacgaccaccttggggggagataaggtttccccggtatggttcagtctcccccatcttgcggagccgcttcttttttcgctccccctcgggttgcgatgtcggcacggcaccctccgggcgcctgctgctggcacgcgccgccccgccccctcggggaggagatggggaaggggttccttcctgcttcctcttcccccgggtgtcggcggggcggctgctccccgggcccccgtcgcggggcccagaagcacgaccccctcccggggtagattgttcccccctgcggctcccgcccgcgccatcgtggcctcgaggagcccgctcctccgacgccccgaccgcctgcatgatggtcaggatcgtggcgcgatctggatcgctgcagagggggagaactccttgggggatgagggatgcctccacggagctgagattcagcacccgttggaccactatcttgaagtcctcaggggcccagtcccatctgaccccctggtgggtcctcatgtagtcttcggacccggtgtactcccaggcgccccgggcgcgccgctggagcggcgcaatccggcgacgaaggtagtcgccgtacaccatggcccccgtgagcccctgggatcgcagacccgccaggcggtcaagaacggcgtcgtagccgtctcccagatctaccggcgcccgccagctggagacctgcgctgggggctggctcggaagtcggaggcgcgcttcgtcggcgaggggggtgtagaaccagtcgctcttccagtcgtcccacttcttgcggaggacgcagggaatgtagcggctcagcaccggcccccgcggctggaagtagcagccaccgactaccgacggcggcgacactggctgtacggtgaagaaccaccggaacagccgaagagatgggcgcaccccgataaacatctcgcacaggtgcgcgaagatggccaacgtcattactgcgttgggggtaaggtgtgccatctggagatcataaaactccagaacatccatgaagaaagaagagaatggcgggaccagccctgccattgcgaaagggaggaagaagacggaccgccccgggtagtgtggtgccgggcgtccctcgcccagctcgaccacctcccggccggcggcagatgccggcatgaatcggcacggcagcccggcctgcctctcgctcacgatgcaggaaggcggcagcacgctaccgtcgagcggtgcggagccccgtgccatgacgccggcggaggaggagcttgagaacgagtgagtgcggcgagggtagggcacaggaaacaaggagttagggcgcaagcggcgaaggcaaggggaataatggcgagaggaaggaaacgaatctcttccttggcgcctttatacccttgccaacgctattcccggctcctcgtttcccgcgcccactatctcgccccctcgtttctcgcgcccacgcctccactaatcccactcgcccgtttgcggcgcacgaggcggatgtgcggccgtggcagtcgagatagggcatatcgtgcgtgcgttaactacgctcgccgaccgaagcgccatcatcatatctccaggcgaaatgaaccggctcttcccgattcgcgcgctactcgagaaatgtagcggtcttgaagaggccactcattattatcggtcgttttttcctagccgatgcgcacgatttgcgaccgctgggttcctgcccgcctgtagagaccggtcccacctgtcaccagacctaaggagtggcgtcacgcccgagcgcttccctcgaggggggcgatcgccctggcataacgccgggggctactgtcggtgacatgggatcgggggtatcatgactagaggcttgggcagccgcggtcacccacgtggcctgaccccctcgggggggtcgggcccgagggagacgtggccaccccctcctctgtctccccgaggggtcgggccgctcctgtttcggccccgagggctggggcgccccgaccccctgtggtattggcgccacgtgtgtgggttaggtgggcacagcggcgctcacctaaccgcatttattgcgggatggacaagcgcgccacgccgcatttaatgcagcacggcgcacgcatatccggtccgtgaccggtcgcagtgtgtgaccggtcacagaccggtcagatcgcgggttaggtggcaacaggcggcctgtcacacgcctcgccccgtcccgtcggaatgatgagagcctcttggcactcgtccctagctggagccggcgtggtaactcctggagttagcacgtcagtcccggctcgattcatgccaggcttcatcgcaaccattgcaaggaagtcactgtttgaagaagggcagatgtgcggcatgctaaactgacgtgtggtggagaagaatgaccggtctgtgactggactgacgccggtcacgtcatcggcagacaaccgtgctcccacgttgcatctgtttccggcggagtggaggtaggtatgacccatcccatcggagggtcattcagacagcagccattgcagatctccgcccattaatgaagagatgacagggtgatcccctgtgtccgacgagtgacggcgctgggcatcactcaaggacaagcggtgatttagcttccaggcggaggcgcgagtcaagatttggtcaagatagggtgggtccccacccaaaagaagagtaggtagaagtggtgcatgtggtatccccttgaaatataaaaggaggaccttgcccacaaaggaagggggacgactctgagaagagaaggaaaaaagaggggttctagagcttgaactctcttgctctccggctctctgtaactctttctcacacatatccaccagaacacaggagtagggtattacgcttctcagcggcccgaacctgtctacatcgcccgtgtctcgtgcgtttgctctctcgcgtacattccacagatcgagggtgaagaacctcactcagcgcccccggccgaaccggcaaaggggggcctgcgctgtctcccggtgaggagccccacgctccgtcaaattactactctaatacttgtacaagaacttccttctttatctagagtcctagtactagagcacttagtataaatactaaacaatgaacccgtaaagatgaaaatctatcttacttaaacaaagtaattaaataacataagaaaggaacacttatagaagttctccgaacccggagcagagtgtaccgacagctccggtactcctcccgaattcctcctaggaagctacactcgtcgaggtagaagacggatgagcgccaaacttccgggcactcctccagagcttcccctcactctctaccttattctaatgtacaaaagatacaatagagcctcttgtaattcagctcaaagttgtatgtcggaaatgatagtgaactcctccttatataggctccaaatgatggttggaggcatgggaaattaccaaaataccctgcaaccgcctttgggaaggaatccaagccatccacgtggaagcagatggcgagaagcggcaggaaaggttcggccgaacccaaaaacactcctcctggcctctccttcggctaggaggttgcttaattggcccccaacaacttgggctatgttttggcccaattctaaatggtttttattgacttattggggctccaatccgtgtaaacgcgtcctgaatgcggggaggtgcattttgtcacatgacatatgtgttttctcctcaaattacctgcatacacatatttcaccaacactagtggaaatgattagtaataaaccctaccactaagttggataccatattttatttcattatatgcaagtattgacggtcaaatattatgatttaaggaccgtcaacactcaaccagtcataccaacaggaaggtatgatgcaagggtattctcaaaggaatggctcattggatatttgcaataaaagcaggatttataaatcatttgaataagtaaaagcattattaaatcatcactgttcaacgctaaaaccacgttgcaacaggcccaaccaaaccatctgaactacaccagttctataggtcaaattgttatagtgggactaatcatggtgagctggttgaccgcccaataaccgcgggcatggctattcgaataattttaactcttatcagaggtgtacaacttaaccaacaagacacgattccacacatgttaccatgccccaaagtaccgccacgatactgcaaagagggaaatcgtgacaaaacccgtcatataactctccctaaccaaacatacccacctcaggtttcaccccctccttattccaagtcgggcaatccctcttgtgcctaggtaaatccggctacaacagagaccaatatccaggtccaaactgcaccatcgcctctacccttgccatggaatgtcagctaggttaagctatactctagatttagcctggagcccacactagcctatggtaggattcccaagaactggtccttaattgtcatgggcacgacttccaaaatcatgtatgtacccacaacccaacattaaagcatattttagtttaattaaaccataaccatggtggtacatcataatataattaaggactaaattataatgaatcccattgtgagctaatagatctaagcatgggtaagcattcctaaaccaagaatccaatcaattataacccaagttatcaacggcataagatattcaacaggctgagtacgataggcatccatcccacatgacattctaaagcaatgcaagttgatagaaagcaggagattttataaaataggcttcacatgatcaatgatgtatgtataacttgccttgctcttgagctgactgaaccatggcgaccaattcgaagtaaacgtgatcaccagaattgccgaaatctaaatgacaaacaaagcacagaagaaatacaagcaataaggctaccgaaacaacaaaagaaaccgattttatggattctatacattttaatggattcactgcaatttgaatgggttaaaacggagctcggattatttagttatgaattttacaatatgagctgcgttattactaataaccgaaaaaccttaatcaattattacatattattgcccaaagataaaatagatcaatggaaataaacctccggtaagcaagtctcacgaattaacgactcagcgagccaatccttcgtgacacgggaccatgcaaacggtcaaccaaaccggcgaacggaaccagcagcggcggtgcagggcggctagggttttgatgggctaaacaactagggtttcaacgacgacactaaaaagaattaacaccctaaacaggagattacggatagattcctcaccaaaccgagatgatctgcgaggaggagacaacaacgacggtccagcgacaacacgtggagacgacggcgaggttagatcaaaacctaagacagagacaaattagaaccggatagataatggtgatagccatgacaaagagaaggaaaatggattaccggcgacgctagggtgatgatggcgacgacgggaggtggcggcactgaccggtggtggtgggacagcggtgagcatcggcgcggcactagggctaggcggcggcagcggctagctaggactagggacaaacaaaacaaataggaaaaaaaagggggggggttgttctaacttatataggtgaggagaaaaactaaaggatgtggggcagaggggagtcgggagaggggggagaggaggaggctaactcggactagacagggagagggcggcgcgcggcagaggggagagggggaggaaaaataggaaaaggattagtaaaggaacttccccaaattggaaaagaaatacggtgccgttttaggaaaagaacggaaatagaacccgcgaacaaaaacagacacgacttgtcttgcaaaatggaaccgcggacagagaggtgagtgaattgggcacgattcgagaccaaagacgggagagaaaaaatattataacttcaaatcttatgaatttacattaacaacgttaattccgatgctctggatattcctctttaagtcatgttaatgatttcagagcaaagagaattaaaaaaaaattctccttgataattccgattattagacacattgttaatttgtattttctcctagttaaccaaaacaatttctatagacaatttattagtgaattagaaactacggaaaaggaaactcccggtgtgacatcgatgccacgtttgcagccgggcccaccaaaatgaagtccacgcgtccaactgaagcaacgtgttcttgggcgatatcgaagccgcgcgcaactaggaaaaagggtggtgggtgcgctgtgggacgaatggcttctccctcgttcccaggcgcgtgcaccgacctccgcatcccggattcgccctctcccgtgccctcgccctcgccatcaccctttttcccgcgcccccgctcgccctcctgcgcactcgctgcattctatttcccctacccgcgcccgcagtcgccctcccacgcgtgccataattttgcccccctcccgtgctcgccctcggtcacaaactcaccattgccctccctctcgcagcaaccggcttcttcgcccatcgccggggtactcgctgcggacggaggtacgtcggtgtggaaccctaaatcatttggtcgaattgattcttcaatttttgattttttttcccctctcaacgtgatgtaaaccctaggttgcgatggatccaagcatggctgctgcattcgctcattttttgcaaggtccgaacttagtggctagtttatctcaatctgccagccagccttctcctttcccctcacacccggtgatcccattccaacctccatcgttttcccccttctgtacgcagccgccgggcccgccagctccacctccatcgcccccaaacacagccaaggcaaagccttcgagctccagatctgcacgccgtcaccgtgtgactgcttccccagaagctgctgttgatcctaagaggaaaatgtactatcaacagaggaggatataaggctggtatgtttttgtttgtttttttcacttgttgacacacaacagagatattgtgattttctggtactattgtgatcctgcaggctgcagtaggacatttaggtgctaattcattctaaagaagtagatttaggaggtatgtttaggtgctgcactgccgcctcatataaaatggtggtgtcatataaatgattcttacaactatacaggtgatggtgtttaaagaaatattctaggcaacaatatctgtttacagaattactcccttcgtttcaggttataaaacgttttgactttagtcaaaagtcaaactgctttaagtttgaccaagtttgtagaaaaaaatagtaatatttttaatccaagacaaatttattatgaaaatatattcgaatattgatttgataaactaatttagtaatataaacattactatatttgtctataaacttagtcaaaattgaaacaatttgactttgaccaaagtcaaaacgtcttgtaacctgaaatgaagggagtagattttaatttataaacttcttattcctatatgttttctgggaaagatcaaaatttgggcatgtgatgttcagtatttgtccttcctgattcatacagtattatgtagaaaaagcagtttttaaaagaagtattgcaatatttatctttatttgacgcaattaggtgcttcttgattgtagagaagtcaaattatgaggtatatgcgatgtatagatgctaattcttacataaatggtgtataagtgatgaatattcttggaattgagtgaattttgtgtgtatatgtgatgtataggtgctgattcttacataaatggtgcataagtgatgattattcttggatttgagtgaattttgtgtgtataccctttgaacttggtgtgtgtaggtttcctgtgtccatggtctcaatttctcaaagagttttccttgtaaataggagctgattgaatgaaaaaaatattatttctggttggtccaagaacatgcatatcagtgaccatcttttttttttgcggggaatatcagtgaccatcttagttggtgcatgtgccagttgacaactgtttggattagggtccttctatagttttaaattattttactgttataaactcttgccatcattggttccgagaagttgttaatatgaatagaaattggcccccaaattaattggaacaactattgatattttctctgtttgtctgggtccacttgctagctgccagagagtatgacaaattatttctaagattgcttcatatgcatgcctagctggtttcatgtttcttagtgcacattttttttccctttgctcattttttctcagtgcacattttttttccctttgctcggagttacagcacgccatgatccattggaatcgccaccgaggaggacaggaaaagacagagcgccataattattgattttcatatataggtaaccaatttgaaatgaaagtattttaaactacgaatttagtgatataacatgcataatacttggcatagatattgttagtataatcagtagtaaaaaaaatatcaagtttgattttcccttaaaataaaggtactctataatttgggaagggaggagtacatcacaaacatcgactcactaaaacatataaatgtctcggataaatcctcaacggtgagtggtgcacctgaaaggatttatttcaatctatgtggcattcagagaaggcttgcagctttatgaggaacttctatagcctagctcttgtcaattcccttgactcataatccatgacaccggggatgtgagtttccataaagtacttgtcccaattgatgaactttatattacagggtatcaattctcggtctctttcagtaaccattcccataagattctgcattttcgagtcatcgaacctacaagaaagggtacaaaatgggaccagctcttgatcaaagaaatcttttcttttttatttattcttggagttacatctacattacctcgttttggatattgtgaatggccagtatacctctgccacggcaacagtaaaatcatactctctcttgagatggttgtaaatatgacggtcttcagtggtagataacccacggcgcaacatatcctgcaagcggaaataatgacccactctgtgagaaagtagccaaaaaaacattgtcgaagtgaggtttaacaagaacaaactaacctgcaaaggcattttgtagtgtttatccatggtctcgtagaagctggccattgttgctagaaaattcggttgtttcaccttgactacatctccttttgcaccgacgaatggtatctgcgagaagtatttgtacgttgtttgagacatctggccaagcttgatcgggttgctcatggaagaaccaatctgatagatgaagtctgctgttccttgaggatggtagctgataatacaaagcatcgcattgaccacaatgtctgcaggtacctgcaaggatagattactcaaaaatggtaatacattgagtccatatgtattaaattttacaattatataggtcaaatagatgatggtggtacactaaggctccattcctttccacgtttaacttttgaaatttccttgtttaccgtgagcattttttcaaattgctaaattgtactacgtattttcatcaatttatttaaaaaatcaaataaacaaatctttcaagtttgtaatagttaataaatcgtacgctaatgatatttatgtttcacgtgcggcaaaaaagtaaaaattaaacccgctttcaaacaaagcctaaatcctagtcttgctctacaccaatcgatcaattccttatgcccaatagtacaggaagatagtatcttacaatgtctatgactgttgccacatctgtaggaaaaaacttcagtgtccccttaccatagttagtgatccatgtgtcaattgctctgcaccaaatccacagggtgtatttcaaagtgagtttgctgttgattaataatgcaagtaattaattaatggtcctggacagtgatggactgacttggctccttctatccatccaggaaaaggctccttccatgtgcttgttgtggctgatggacggatgataacaattgggagccgtgagttttgttcatatgccagcatctcacccattgcttttgtgaacacataggcattcgcccatccaaacttcttagctctatttagtcatcatgcgacggttgtcttaataatgttgttcctaatgatgtatcacataaaaagtactagaagtctagcgaatagcaatgaataaaattatgtgtgaaacctttgtgcgcctatctttttcatggtgtgtcttatggtacgttctgaagcattgttgtaaactagctccttcaacttttcatccttaaatgccatctcttctgaaatatctagatctgatcgaccatcataactcctccattgttgaagcggcttctccatcatgatcccttgtttcattagattgacataagcttgtttcattagattgacataagctgaaatttagaaacaaatatgtcatttaacaagaaatcattgttattggataagtagcatagccataggtaaattttaggtttcacctgttgacacaagaagaacgagctctaggtttgtgcattttgatgcaaaatctatcatatgcttcacacccatagtgtttattgccaacgctgtatcatatctgcacttatgattagcgttaataacttgaataaatcttaaagtaaccagtaaccttgttttacctttctgcgaagtttactgtcgcagccatgtgaacaataatatttgtttctttccttatatcttcagccagtctagcgtctcctataccgaaattcttcaaggacacatctcctgctagaggaaaaaccttgtcccagaaccatgaactgaagtgcgtttgatacttctcccgcaagggttgaaatatcggaagttgcatgatctgatatgacatgtagaagagaactgaactagatcagatcttaatcaattactcaacaattcaactaactaaatttttttctgaataaaagacaatatgcatgccgtgggggagaatccatgttgagcttttacactatatggaggatggaaatttcaatttgctacattcagtccacgcttcacactagtatatgatccccaatccacatgtctttttgaacacaacactcctgccatgaatcaatatcactagcgcttggcttcgggctcgtcgccttcgctgcggtgcgacccgttgtcggcctcgtcgtcgccgaacgtgacggaggagttctcgggcatcacggcagagtactggtccgtgccagcgccgctgggcgccgcgaggtcatccgcgcagtcggcggcaacgcagccggaggaggtgttacggcaggtggagaacgaagcagctcgaaggggcattttggtcagcccgggtgcgaaattgggtggaaatggagaaaattggttcaaatggcaaaataaatgtttagtatctcttgtgcgtggcattttaacgaatccattcggcggaatgatattttggcgaaacccactcttagcagtggcataatgtccaatttctcactgccgccaccaccgagctcaacacacccgacaaccctgaatgtcctaaatcgaactttcccatcagctttggatctggatcagacagagagggaaattgtgaagaaagaaagggtgggtgagcttgccctttccctctggagctcaccactgaggaaaaaccgctggcgtggacgccattgatgagccaccggatccgccggcaaagaaatcgcggctgccgcatccaacacccagagcctccccttcgagtctgcgtcggcagcggcgtagcaaggagagcaccggcaatgagggtgctgcgaggacaccacccatccacaacatcgatccccttcgagcggagaatggcagcagcgtagggaggacacccgacggcggtcacggcactgggaggacacccagcggcggccacggccaagccaaatccaggcgccgcgcaggagagagcgagagagatgagagggacatggcggctgggagttttttccttttttttacgcgcctgggattctcgcgaaggggagagagagagaaagaaaaggaaattttgtgaaaatacccttcagtttccaggattcagggcgcagtccttttttcctctttttgtctcctatgtattgaatttcgtaggatgcgaagggcctaaacgcaatattttaaaccgagaaaagaacagagaggacgtataacaaaatatctataaaagagagggcttttctgcaaaatttgcagaggcgacgcggacgcatgtaaggccgtgaaatccatccgctctccagcgcgtgtccacgcgtcgtgaccccgtgatggccacggcagcgcaaaacgctgagggcgctgcatttcccagttggtttgaagactttagatatcgtatgggatccttagttttcatgaccccaccaacagtgccacgatgaatctcagtgcaactagcgttgctacagggcttctcttctgtgccatccaatcttttcatccaccttcgatccccttgtccacgagcatacgtttagctccaaagcctcccatctggcccccggcctgcacttctcgcaatcccctactcagcatgctggccactccatcatgtttcctccttggttggttcaaaccaatcgggaggcttgcccaaaactccaatcccgtcttggaataactctgcatgcttactccaagttttattttgctctgttttcgcttgcagatctgtttcttgatcaagtgcacaatttgttaaccagctgcgttcacgtggagcttgtagcgtcgtgcataacgtgccctggatcatgtgatggtaacatgtggcaaaaggacgtggcacgcacaagcagcggtagtgcgatcagtgcctaccgatcgatcgagattcagaaaagctaccgatccacaacatcaaaacttgcgttttatgttgttgaattgttccaatctcatgtggtttctatcattgtgcaccccatccccaattcccgatgcttgcactgggtactcagattaatggtggctggtccatgcacgagttcatattcatgcataaacagagctatgtgtgctcgagcttggtggtggtgtgatccaagaaggcggtggtggtgctgcaggaggttgtcggcttggggttggcatgacaaaccttgtgaaccaaggtggagctcaataggctcaggggttcccaggcacccggcccaatttaaattttttgtgcttaaccctcctttttgtcatatgggaacccctcataagaaaggaaaaagtccacttagacttccttaattgttcaccgaatctaattcgttacccttaactataaaatcaggtaggacgactccctgaattattgaaactagtgtaatttgactcctccagcggttttggagggtggttttgctcacgtggtgctgacgtggcgagcgggaagaagcagccgctgcaggggctggaccaccgggtgatggtggcgctggtcaagatggtcgccgccaacttgttcctacctctgggcaatgccgccgtccgcctacccgtcgtcgctcccgccgccgtccgacgtgctcgacgacgaggtccccgtgatggtgctgctcccgtggatcgtgcactggtggagaaaccatctttcgtcggtcggccgatttccacaatagtcccggatgcaataaaaaccggggctaaagatgatctttagtcccggttcaaaagggaaacgggcatatttgatctttagtcccggtttgtgttaccaaccgggactaaacatcatctttagtcccggttcgaatgctgtcaggacctgtcaggcccccccgggatctttagccccggttggtaacaccaaccgggactaaagatcttaactttagtcccggttggtattaccaaccgggactaaagatcccggtgatctttagccccggttggtgctaccaaccgggactaaagtcccacccctatatatatgtcttcttcctcctccagctgcccgagcaagcttcaaaattacttcaaaaaagaggggaggtcatgccaaaatttctattgaatttattttggtgattacatacaaatcggaggtgcctaaaaggtttgcaacttcatcctccaatgttttttttgtcatactacatttgcacctatgttttgcacacttttttttgtctccaaaatttagttgtaagttgatgagagagaaaatgtgtgtggggaagaaagaatatatagaaatttagttcatttgctaaacaaggttttataaaatagttgagaaggaaaactctagtgaaagttaatcttaaataatagaaaacaaactaaaatgaaaattaaaagaagtaaaacacattaaaattagtttaaaactttacaaatagtttttaagaattatttggtgtaatattttatgatttttgtatgaataaagatatcttataattattgtatgactgtcattattgtaagaataattatttgtgtgcggtttttttgactcatgtagatggatcggaaatggatgtacgctgaccggcggtccaaagagtttattgacggcgtgcactattttttgagagtggccgaagctaacaggcaaaggggttttatttgttgtccatgcaataagtgtaagaatcagaaggagtattttgcatccaggactattcatttccacttgtttgagtcggggttcatgccaagctataattgttggacatcccacggagagcaaggtgttgaaatggaagaagatgaagtggaagacgacaatattccggactttgctcagtatgttggatttgaaggaaatcaaacgggcgaggaggaaatagctgctgatggtaacgacgttgcggatgatcttggtcagatgttgcaggacgctagggaggactgcgaaagtgaaaaggaggcccataaattggacaagatgttggaggaccacagaacttcgttgtacccaggttgcgagcaggggcacaaaaagttggataccactctggagttgttgcaatggaaggcaaaaaatggggttagtgacaaggcatttggcgatttattgaaactcattaagaacattcttccggtgggaaacaaattgcccgagacaacgtacgaggctaagaagatagtctgcccgttaggactggaagttcataagattcacgcatgtccgaacgattgtatcctatatcgcggtgaggagtatgagaacctagaagcatgccctgtttgcaaagcactacgatacaagattagacgggacgatccaggagaagttgaccggcagcttacaaagaagagaattcctgctaaggtgatgtggtatttccatataataccacggctaaggcgtttgttcaggaacaaggggaatgctagaatgttgcgatggcacgctgaagagcgtcaacaggacgggatgctgagacaccccgcagatggttcgcagtggcgaaacatcgacagaaaatttaaagaatttggaaaggacgcacgaaacatacggtttggtttgagtacggatggcatgaatccttttggagagatgagcagcggccatagcacttggcccgttacgatgtgtatctacaacctccccccctggctatgcatgaagaggaagtacataatgatgccgattattattcaaggccccaagcaacctggtaacgacatcgacgtgtacctaagaccactggtcgaagatcttaaacagttgtgaaagaaggaaggtgtccccgtgtgggacgaggacaaacaggaggagtttaacctacgagcgctgctgttcgtaaccatcaacgattggcctgcacttagcaacctatccggacagtccaacaaggggtacaaggcttgcactcactgtatggatgaaacagaaagtacgtatcttaagcactgtaggaaggttgtatacatgggtcatcgtcgattccttgcagcaaaccacccggtacggaagaaaggcaagcacttcgaacataaggccgaccaccgtacgaagcctaaacatcgcagcgggaaaacagtgtttgctatggttaaagatcttaaagtagtgttcggaaaggggcctggaagccagcatatagagagcgaagatggtcacgcggcgatgtggaaaaagaactctatattttgggagttaccatattgggaattcttggacgtacgccacgcaatcgacgtgatgcacctcactaagaacctttgcgtaaaccttcttggcttcctaggtgtatacggaaagtcgaaagatacactggaagcacgtaatgatctgaagcatatggaacaacgcggcgaccttcacccggaaccaaaggagaaaggaagccattacttgagtccagccagctacactcttagcaaggcagagaaggaaagtatgtttgaatgcttggagagcataaggtaccgtctggatactccacgaatatcaagcgaataataagcacgaaggagaagaagttcacaaacctaaagtctcatgactgtcacgtgttgatgacacaactgctaccagttgtaataaggggtatccttccagacaatgtccgggcaacaataacaaagatatgtgcattcatgaacgcaatttcgcagaaggtcatcgatccggatagattagaagcccttcagaatgaagtggtgcaatgtctcgtcagttttgagttgatatttccaccttcatttttcaatataatgacgcatctgctttgtcaccttgtgaaagagatccgtattctcgggcctatgtacctacacaacatgtttcctttcgagaggtacatgggcgttctgaagaagtatgttcgtaaccgtgctcgtccagaggcaagcatcgccaagggttatggaacagaggaggtcatcgaattttgcgtagaatttatcgaagaccttcgcccaatcggggtacctgaatcacgccatgaagggagactacggggaaagggaactctcggaaggaaagcaataaagacggtagacaacaatttattccgtaaagctcatttcactgttctgcaacactcttcattggtagctccttacatcgaggagcgcttggctctagttcgcgcaaggaacatcggtaagtccgatgcatggattacacggcatcacattgatactttccccgcgtggctacgacaacatctcatgggtaacgagtcgatcaaccaacaacttgccttcctggcgaggggaccgtctgggtcgatcgcgacattccagggatatgagatcaatgggtacacattctacacgagagcccaagacatgaagagcacgaaccagaacagcgctgttcgtgtcgatgccatgggacacgatggaacaactgccacgtattacggttccatcaaggacatatgggaacttgactatggtcctctcaaggttcctctgttccggtgccaatgggttaggttgactggtggaggcgtaatgattgatgacagtgggatgacaactgttgaccttaacaaggttggatacttggacgaaccttttgtccttgccaatgatgtaacgcaagtctttttcgtgaaggacatgtctagtaaaggaaagaagggcagagggcctgatgagcctaagcgtcaagtggttctcccaggcaaaagaaaaatcgtcggagttgaggacaagactgatgaggattacgatcagttggatgggcaacccccttttacggtgacgattgaccctagcatcctcctatcaaatgaagacaccccttactcacgcagcgatcacaaggagggaacaatagtgaggagaaagtacgtgccgtaattattgtgtacacgatgtaaactattttggatgtattgattatccatataaatcaattgatgtatggcatatgttaattacgcacgattattagaggttcaacaaagtttaaatcatgtatatgctagttatatgtgatacttacaatttttaaaagttttaaatcacacaggtggcaatttcatatgtatgttaattagagtttttaacttttaatttactagcattcatatgctaattattattgactagaggatttttaaaagttttaaatcacgcaagtggcaatttcatatgttaattagagtttttaacatttaatttactatcattcatatgctaattataattgactggagaatttttaaaagtattaaatttaatatatttttaaaactatcattcatatattagagtttttcacaatttaatttactatctttcatatgctacttatatatgactattcgaatttttaaaaggttaaaatcatgcatgtggcatttacatatgttaattagagtttttagcatttaatttaatataattcctacgctaagtacatatgatgattacaatttttattaattttaaatcatgcagtatgtacatacatatcttaattagagtttttaccaatataataatatcattcatatatatgctaagtatatatgattattggaatttttattaat

SEQ ID NO: 5027 - DNA, 5302 bp, Oryza sativa
  unsure (1)..(5302): unsure at all n locations
ctcgttatcgaggtaactgaactcctcttgtttttatttttacatttttttttactctgatgcaatctctctcaatttttttttttttgcatttaggattgatatatttttcttgtgtagaattatgtcttggaatgttaatgatgatgagtgtttacagcttttgacaagtgatgaaaataataataaaccaactaaaagatatattatttgaagaacaagtaaatgcaataatttagttatctggatatttttttatgattgaaaatatagctcttgacttatgaatggtttgaagtaataatttaaattattaagcgtaagttattattataatctagattattagaagtaggctgaaataaacagatagttttataatagattactacaatctataaaccatattagtataatatggtaatccactttaaaggaatatttttagattattaggtggctaacagctaacaaacagctaataattcaaagaaaaaaattagctaacaacttataatccagtttatagtaatctggctcaataatctaggttataataattttaagctgaaacaaatacagtcttacttgtttatgacttttgcaattttgtggcaaaatggccttcgtcgtctccttttggtttggaataaaagtaggggctgaaaattgtgccaagtattcctttgataatgtcactatcacagctttaatttaactcaaaggttgtaaggttgttttagcgaattagccttcgacatccttgatgctaaggtcatcgactcatggttagagcttagaaccttcagcgattgaattattgcttgttactaacttattcagacaatagcgtgacacaattaaacaacaaggtaagcgattagtttatgttatggttttttaatttggttactataatttggttactataccaaacatatcagtccttcaattggttggtaggcaaaaaaaattggcataccaaattatttggcttagttgaattaggcccatatatggaaacacattttggcagtaaccaaacaagaatctagctattttttaccaaaataattggtagtaactactaattcttgccattgctaaaattttggtaaggataagattagcaaagtatcaacatgccctatgatccaagcaggaacatttagtcatctactcttgtaagaagcaaatttgattctttcacccaacctcttttttttttaactatcctggatttccgtttgttaaatcaatcagattgttttattttcatttttttttctattctgaatttgtgttgcttagctaaatgggattattgttttcttcctgatttcatttattaatgctatgctcaaactgataatccccaagataaatacttgatgtttatgataaaatttgattaaaactttatttttatattaaaagataagtattaactcaataagtgtaatggtaaggtcaaccaacgtatataatttattttgtttaaaaactaagcatgagtattatttctcggattttttttaagcaatatcgaatcttgtcttaaacattggaggaagtatattgcaaatgccagatcatatatttcaagttgtaaaatcttttggaaaaccgcctaaaaaaataaaccccatcttttcgcctacattattagattacaagctgtagcattaattagcgactgaaaaaccaataccgaaaataaactacagtaaaaaacatcaaaatcaaccgtaaaataagatttgaaatttaattgttagatgtggttgataaggtgaagagcaaacgatggagctccttgttatgattttcatgaattccttgttaccatttgacgaggtacctcaagctagcttgcctttttttcctaataagaaaatacgagtaactctagagagaaaaaaaaaggtaattctagtttattggtaaaaaaaatatagaactggtgccactgttggggaaaaaaacaacgcaaatatgccaccttttagaacaaatagaacatccgcgctctgcaaacttttgggacctcatcttttcgcatatgcttatgcttatcagccaattacttttcatttacaaatatgtcgtttcccttgctacacacacaatttttccaagaacttggtgatacactgccttttgcaactgtcaatttcaagccaaactctccaacaaaacaccagtatggcctctctaaaatagactctctaaacatccatatggccagctatccatcatttgatttagcaagtcaaagtcgttgctcgctccaacagcctctctatctaccctctattacaagtctattacaaatgagacccatttgtcaatctctactacccttcttcctcctcttccacccccattttccccacccatactactgccgacctcctccccacaccctctccgatgcaacgacggcggatggcggtgcaataagcggcggcggcggggaggcgggctgcagcgagcggaggcggcgggggcggtggactgcggcggtggcggctgcggcgagcggaggcggcgccgcgccggtgggctgctgcgagcggaggcagttggctgcggtggcgactgcggcgagcagaggcggcgggtgcagcaagcggaggcgggctacggcgagcgaaggccggcggctgcggcgaggggaggcggngactctncccttctnctnctnctnctaccactcgcctccgncaccgcgtnctctacgaatctcgcgccgacatgccgcccccgatccacctctccgcggcggccctctcgcggcgggcgaagtgccgagagctgaggcggtagtgccggatgtggccggccgggagcgaaggcggcaacgcttctgccgggggagcagcgcaagagggatggggatgaagcgggcgccggcgggatcggtgcggccggaagaggacgactgaagcgcggcgcggggatgaagccggccacatcctgcgagagcccgccgcttctcggcccagcgtcctgctgcggtggccgtctctcatcggagctctgctcgtcggtgcccgcgcgccgcaccattgaagtcaaagagagaggagagattggggtggggggagcaatgtggggcccaccactagcaactggtttggctaggcaggcaggatggccaaatttagctagctaaggagccaatttggccagctagatggcttggccagctggatagagtctgttagagtgctttttcctcctaaatttgctagaatgtcatctagccattctctcttggagatgctctaaaatagtactcaatcatggctatccttttaaaatgacaccaaagctcatgtctttttttcttctttttttttcacgtaggaggacgtggttaaggaggcaaaatacctgagagagaccaacgagaggctgacgcggcagatcgagcagctgcacgccgaccactgcgcccacgtcgaggagctcgtctacctcaagtgggtcaacgcctgcctccgctacgagctgcgcacccacgacggcgacgacggcgccggccggatttcggcgagggacctgagcaagagcatgagcttccggtccagcgagaaggccaaggagctcatgctcaagtacgggacccatggcctcgacggcttcgacccctccatcttctccccgctccacgagtccgtctacggcgacggcgacggcgacgacttcgagcagcgaagaccgaacggcgacgtcgtcgtcgacgaggcgccgcggagcccgagcacggcggtggcgatggccgccgcagctgcgggggccgagtcgccgtcgagacgtggcaacaagctcaagttcttggggaacatcaagaagctgctcccgaccagcaagaaggggcacggccgcggcgaccggaggagcagcaggaagcagtcggcggcggcggaggcggagccaccgcgggacgagcacctggagaaggcgctgcagtggctgtccagccacgacgtgctggacgacgacgactcgtacgaattcgagctcggtaccgtcgtgcgagcggacgccgctgagcagcgtcacgacggcgggctccacgcacgcccgcagcaccggcggcgccgccggcgagacggccgccgcggccgcgtcgaggctgctggaggcggagacggcgcgggcgaggagcgacgtcggcgcgtcgtcgtacgggcgggaggcgccgagccggtaccacgcgctccggccttaccaccccggcgccggcgcaggcaatgtcggcggcgacgggccccgcgcgtcgccggagaagcgggagctgaggcggcggtcggaggagctgagaagccccgcgtcgatgttcgcgggtgcaagggataatcgcatgcatcagctgcagagcaatgcttaattaaccactactactattactgaagtatttacagattaacagaaacctgctgcatatgcgagatgggatataatgcaagtttttttttctttttcccctgcttgtgtttatgcgtgtacgaactggtaattaatactggatgttagaagggtttgtgacttttgatcttggattggtgaagaaaatgatgcgttaggatttggtctacctaagtagtatttctcagcacacatccaactctaaataaatcgaccaattttcccataaattaattatttgtggacaaacgtatagtaaaatcgttagggatttaggattggagagggcaatggacaagtttggattggtaaatttggtatggatgaatgcctgaaatccaccggcccaccagaactggcccatcattaagtttccacagcctgtaatattaagtgggccggtggaaaggtaaacagaaacggtacctctccaattagtcttgatcagagacatccacgtgctagtactttagaagttttagttgctattaatccattgagcaagtaggggaaatattcctatcatctatgcttgaaataaaattttctcttaaattactcatccaatttataatccgattacaccgttgtgtttgtagttacgtccctcaagtaagcatcgactttcaatattagcatgcaagtgtgtcctgtagcaatacggtttcaatacttccaatattagagcagctaaaaccggtttcgatactgcctttttagtttaactatatttacgttgtttctataaagatgaggcatacattatatctggttttacgcctaggcgatacaattaaaattaactcaactacttatgtacgacccaaacccaacacccacctgcgtgggctaccgggtggcgaaa

SEQ ID NO: 5028 - DNA, 5228 bp, Oryza sativa
ccggtttcgatactgcctttttagtttaactatatttacgttgtttctataaagatgaggcatacattatatctggttttacgcctaggcgatacaattaaaattaactcaactacttatgtacgacccaaacccaacacccacctgcgtgggctaccgggtggcgaaaaccctagccaccacttgcccaaaacacccccacccctggcctcgccgccaccagagctagccatcagcaagtcgtgtggcaactgacaagctaggaaggcggtggcgttggagcaacaccctagggcggcaatggccagtgcggcgcggtcggcgatgcgcgacaggccatgcgtggcaggaggcttgcgggaagtcgacacggtggtaggaatagtgcagcgcgggcgacggccaaccacagttggttggcgtggcacagttgatggtggcttctattttcaacaggcgacctcgacacatagggtagatagatatgggcgagagccgagcctcttcaggtcagcaatggcgacgcttgtagccgcggctttcccctcgaggtattgttgagtgatcttccctgccttacctgatggatttctttaggtgaaaactatgttgtaactacccagggagggcaatggtgtcactttcggtgctatatccttcctgaaggcgccgtttagaagattcattcccttaggcatatcgtgttcatgtttcttcaatagcgggatctagttataggcgcacgttgtgattgttttttttccctggctatagcttcctaaaaccgtagacttgtaaaatttttattgttgtatcaaatgttgtactgtcatgtgtgggttgtttaaaaaaaacgactaggtgagagaggaagtaccaaggtaaacaagagttcgtcgacccgctggcatgggcctgacaaagtaaccgacgaacgatggcaaggagcccaaattaggcctacaattcttgggccgatccataacctggacttagctttctaatttaatccagcacgacttgatcattcaccatcatcatgttaagggtcgtccattgtttgcccctgagctgagaagttcagaaatgaaaaagggaaatgtaggttggttgtgagatgatgagttcttcagacctttgttgggggtgaattcgcaggacagtagcagcactccttgctgaaaccttaggttgcagctttatcgaagcagacaactatcattctcagggcaagtgtgtgctgaattccctgacaacagcaaagatgagcaaggaccaagggcatccactgtgtgctgaataaatcatgccaaaaaccttatttataagccacagacaagtgcagccgccaagctagctcaccttcctcctcaccaccaagaacgcaagaacacagcaagagaggaggagattcaagaaccggaggaattgatgtcatcttcggctgtgattccgccgccgtcgccggagaggagggtgccgatggtggccgacaacggaggtggaggacatggggcgagatggtggcgtccgtctccatccactacttcatccgccacatgtgccgccacgccgccgcccggggctcgtcggccttctccgccgcgtcgtcggcgtcttcctctgttgcgccggtgcttcccgtcgtggtgcgtcccacgtcggcggggccgtgagggagcaggtggagaaggcgtcggcggagcacgcggcggagatggagcggctcaatctcggagctgccgctcttcacgctggtggtgctcccgaagtcgtcccgcgcccgctgccgccatcccctgcttctccgcgccgtcttcggcgaggaaggcgactgccgccgtcgaacagaggggtaaagatggaaacggtttttctgattgtattgcagcgtcaaacatttctagggtgagtttgagggatcagggatcgagaagattgaaaagatacgcaaaacgaggtgagccattagcacatgattaattgagtataaaccattttaaatttcaaaaatagattaatataattttttaaagtaactttcctatagaatttttttgccaaaaacacgtcgtttagtagtttgggaagcgcgtgcgcggactacgatgtgctctctcaccctaactcactagaacgaacactcctttagactccttttaaaatgaactgcaacgtcaaatattacacgatgaagggagtattatacaccgacgaaatgatttttgcgttcactaggcatggacggtcggctcaaagacaaacaagtttcttgagactgtgagagaccgcatgagaaaacataagacagacaagaattgaacaactgaacatgtacaaagactatatgttggtgcctacacacgattattcaactgataggatgcactagtcattaacaacaccaacacattagctactactgtactctcatcacaacaccacgtactatcaggtttacagaaccgtatgattatctgcgcaattttcgaaaccaaagatatatctcgtggtaactatacggttttcacggtaaccactggattactacaataaccgttaaaccgtggggtgacaataatcccacccaaaacagttgggagaaccctaagtcctacacgacaattgattcaaaccaaacaagtatacaacaccaacacattagctactactagtctactactgtactctcatcccagaaccatcacaaaaccacgtactaccatgtttacagaaaccatatgattatcacacgattattatacttttcgaaaccacgatatatctcacggtaaccacatagttaccgtgataaccacccaaccataagtgacgttaatcccacctaacacggttatttggggaaccctgcgtactacacgacgattgattcaaaccaaacaagtatacaaagttacaaaccccgattagcgcacgcgattttaatcacatcacaacaaaatataatccccaagtgcttaatcagctgaagagcttcttgacggcctggaacctagcggtcttgtcgccgaacttggtgccctggtagtagtccaggtagtcgccgtacctgtacggcccggggtacggcgccgccgccgtcgccggcgcgatcacggcgtcgggcccggggttgtagaacgtggcgacggacaggcggcggccctcggcgccggcggcgacgcggtgcacgacgctcttgtaggcgccgccgctgagcacctccacctggtcgccgatgttgacgaacagccggccgcgccgggtcgggccgacggggacccactcgcggccgccgcggtggaactcgagcccgccgacggcgtcgtcctggaggagcaggatgatgccgccggcgtcggtgtgggcgcggaggccccagacgaggtccgggcgcgggcacggtgggtacatggcgaacttggtgccgacgaacggcggcgcgaaggcgtccacgacgccggcggcgccggcgaggcccaggttggtgctgatgcagccggcgagcagctcggcgagggacaccgcctgcgcgatgtacgcgtccagggactccctcgccgccggcgggatgtccgggaagtcggcggcggtgttcttggggcggtgctggatgaagtaggtggcctcccagtcggcctggtcggcgaggtcgccgccgtcgacgaggacgtcgccgtcgtccttgttcaggtggaggttcttggcgaggtcggaggcgtagaatttcttctccaggtgctcgtcgtaatggcggtacacgaagctcttcacctcctccattaacgccgcctccacgccatggttttccacctgcattcgtagcgagcatttcaccgaagcagaattaattttgcgacagccaacatagaggtacacatttgtcagttttcacatttgaagaatcaaaatctgaccaacagttttttttaaaaaaaatataatctaattatttagcatcaaagttgtactactacatttataatttcaagtactttgctaacatgttacatttagacctgttcgattttgcattgctaaaaaaacagtggtgctcaaaactgttccactctcaaataatctctgaagtgttgtcacgtacccagaagaagccccagtccttacaggcctcgtggagctgggccatggtgcgctccctttcttcgtcgccgccggcgagccccttgagatcaatcactggaatctccatctctcccaaggttgggtagctacttctacttgtacgtacaactgtctagtagtactgtactagtgctgatgatgagctaacttgtatgcactaggaagatgatttgcttccgatgagcgagtggctatgtggcatgcagctgggctcctatttataggagacaatcaaccattctgccatgccggatagtatagaagatttctactaatatttttattcatcctgaaaatatagtaatcagtattaaacgagacacattcgtaatattataaatttgaatagaattttatctagatttatagaaacaaagctgaatagaagtttatccagattcgtaggattatccaattttagattactatattaatctaaaatttttttagattatccaattttactgtagtactccctcagtctggaaaaaaattaatctatgacgatgcatgtgatcccttctaatacaataattctaaataacttttatttgtctttgttgtattaggaggggtcggtcacatcccctcctagggcctgttcggctgcccgcgctgcggctgcgccggcacaaacagtgcttcacacactgtgcgcagccacagccgcagcaatttgcctgccgaacaggcccctagttgaagtatttttgagacggagattcgttgtactatggatcatatctcgtatctgggggtgtaaagttttggcgtgtcaaattgggtattatatagggcgtcgcatggggtgttcgggcactaataaaaaactaattatagaatccgtcagtaaaccacgagacgaatttattaaacctaattaatccgtcattagcaaatgtttactgtagcaccacattgtgaaatcatggaggaattagacttaaaagattcatctcgcaaattagtcgcaatctatacaatttgttctttttttagcctatatttaatacttcatgcaagtgtttaaatgttcgatgtgacagtgtaaaaacttgtgtgtggaaactaaatagggcctaagg

SEQ ID NO: 5029 - DNA, 8026 bp, Oryza sativa
  unsure (1)..(8026): unsure at all n locations
ggaaggcttgaagtcatagtagtagaaccttgagcaccaagttcccctacctggcgcgccactgtcgacgggggatacccgcagaccggatatagagggtattggggtccgttgatacgaggatatacataatatgacatcaggcagataaaagacaaggattttactggttcagaccccttgataggtaatagccctaatccagttggtatgggattatatgatggaaaccatagattacaaagggaatagcagaactcaatgatgccgacgagatcgtagtcgagttggttcgactaggtctcccgacgacttggctcctgcgcgctccgtaggctgtggtggttgtgttggcagtaagattcaatgccttaggtcctgcccagggggtcccttatataccgcgggtcagttgatctccaagtaggactcgaagacattggacccctcacgatatggctaagacccaatcttttccgagtagaactccttccatatgtagataccatccctattacgtgatagatttccttaatgtatacggaaactgtccgtatacgcgcgggtataccgtatcagtatacagtatacatccaaggatagagggtataccttatccgtaactctgacaatatgccacacttagttaaggtggtagggtaaaaggatggtattcatgtcgtactgaattttttctttagtttctaagttctaaccaacaatttttgaaaaatttattaccgaattttagcttagatgtcttttgaaaaatcagaattttggtatattgcatagaaattgtgtgagataattgcatatcaggtcgatctaaccacaacctcatggctggtctggtcgatgcttcaatgccaatctaaccgcggtttcttggccagtatgaccaatgaccatagctctaacatcagtccaactagggattgcagccgtggtatgtagccaggggcatgagctcaaatttgattatataaccgaattgaacctatgaaattcggttgatctattatgaattcaaggtaccaataggaggattccactagtggaacttttcaaagatataagcaagatagttgattgaagaagatatattggagagtttggcgtaagcatccaatacaccttgtttaataaagagttacattgccgaatcatataatagtgctttcaaagtatatgtttggatgccgctcaatctaaaattgctatggatgaagtgtttataaggcattgtgaaatttatcaattggtttgcgagataaatcatttagccggttgattctcctatgtttggtgaggtgatttatcggtcaattgttatgggacactaatagtgataaagtgaccaagaaatttttgaagattagaaagaggtttaacggatgatatgaagttatagacaaagcccataataacagaactggggtagaatcgtttcaagattaaaaattgacatgaatagatgattttaccattatggtctagatgcaaaaggcttgatgggtaatcatctagttggaaatgtctataccgaaatgtgtgaattgttcttagaagattgttgatttgttgggacgctataaagagaatgatttaattactaggcatttgaaagcacatatggccgatagaaatcatcaccctgagaccacgtgttctatgcttttcagctcacaagtttgctaaaatgacaggggtcagacatgtgttaacaacaaaatttagtactaggacaaatttatagcaagtttgggccagagttggaatagaccggagctttcccgaggaggatgagctgaccgtcatcagatcggagggtgaactgtagtctgactgtaggtggccagtcagaccgaaagccccgagtctgagtctagctaaggcaattctcgtgtttcgtagcttccgtccaaggtttctttgagtcctaattgatctcacttaatagaacgtggaaaaaaccctatggaggtaacaccaaccccttcataagggttatggccaattatattctaacaccgaccataatcccctacacaatttatcaaatcgttccttttacttttcagtaatgttttctactttaccctagtttcgtccatctttatcgatttacgtcataaattgttcgcctacgctgcgagagcccgataccctttgtaggtctgtcccgtaaaccttccgattcacccacgagacgggtgtttactaccatatctatctaaatcagcctagaggctgatttgatctctaaattaaatcggctccactggctggttttgctctttcctaaacccatcttgattgggagttttctagatcaaggtggttggtgactctgttaacaccgtaaatctttagataagtccgtgttaacccaaaaaggcaccaacactctccttcagtttggtaaaaggttgaggaggctccggaccgcagattaattgtccaatgtccatgacaaggaacaagaataatagcctcactctggtgcaagcctatgatagtgttgccctagacaaccattaagtttctttttgttaagcaccaaagcatctgtattgtggataggtagcagtgtagcacactctagcactcctatccctttttaccaagaccactgtagggaattaagcccccacagttaaatagcacccctatcctaactgtagttaccctaacaaaaaattagtagaattccacttgataaaaatatgtaggccatctaaaaactgagctagtattcttatagtcgtcctaaaaaaggcatgtattctagtggttgcagtgacctaagtagcacctaaaggtcataatttcaaatctccatatataggagcgaatttcagattaggcttgagggattaagttcataatttaaaaaggctgcatatatccgattggatgcatgtaaaggccaggtaaaaaaatacccttctcttaaaaaaaacgaaatcttatttgccatcctgagaccctctttcgatgggggccttaatcctggcccattcacatgtataagttaggagattgaattaaaatattggcccatgtaaaatcatcgggattgaattctccttaattaaatggaagagtgatatactcttcaactatatatgaaagtgaaccaaaagaaaattaaggagactgaaaacaacaatacagtgtagtgctcccatccgtcttagaaatcactacacagctagagcctagccagagcatgcagatttcactcatgcatacggcgccacgtatctgcccagacgccccatgctgaattcaccggcggcgagatggaaaacctaagcacagcagcatcagcgtgtgtgcacttacctgctcgatcgatctgcacctctatctctccatgtgctatatataatcgatcgatttgcattctgatatatatgatgcgtagacagtgatctcagtttcaactcctaattagctcctagctagctagctttatataccaaatcgaagaagaagaagataatgtccggctacgggcagcagccgacgggcgatcgtcttgagtcggcgacgttggtgcagtccatggagtcgaccaaggatacgatcgtccggcgcatcaccgagtcggcggccaccgtcgacagcgccgacgtgcaggcggccgcggccaagctgacggcggctgtggagtacaggttcgacgttgccaaagctgacgttgatcggatcatggccgggagaggtatagctgaatttactcctctatatatactccctccattctaaaatataaacatttttatatatacttccttcattctaaaatataaacatttttaagtatagtggcagattaacatttaattttgactattaatagtaataaaataaataaaaatcaattatgtaaaattgatgttactatatttattattaaacaaactattatattatgcaactttttttatttaaaacatcttatacttttatagatatagatattgttggtcgtaagtagcatatcggagaccgtgtcagactaaaaaaaatgtttatattttaggacatttaaattcttaatgcccagcagcttatagtgtgctctcggatttaaacggagttatatatatagtacgtttttaattttaatttgaatgcgactttattttgtgtgcatgcaggcaactagacaagtgatcgtggaagacgacgaacaccgctggcacacatgtccgatgcagtacaagatcgaaatttttatctgccccgatagaatttaattagcctttttctttgtttttctcttgtaactttctttaaacaagttgctggcagatcaggctttagttctgatagatagagcaacaccaacatggatcggcgctgttatgaaaaagcaataaaattaattgcatcgtggactcaatacatattaagtaggttaatttttttgcgagtactgggttacattaactaagcctatagaatatagatatacacttgctcccttcgatttcatagttctttcatgttttggatagtattgaggttaaaattttataatttaattatcaataactttaaaaatatatattaagtttatagaggcactagaacaatatatatctctactattataaaaattcaaggtgtttttgcctgaaaatttggtacgtcgtcattcgtgtttaaatcggttttaattgaatatgtttccgtatcagaattttgattttatctgtattttggtttttttccttatctgaatcggttctaattcaatatgtttccgtatcagcgattgggcccgtcccttgccgcacgccctatccgagatgcgtgcgcccttcggcgcaatgataacgtgtctgtcgcccgtaatttaaaaaagggtgaaaaaaatcagcttaaaaaggggtgaaaaaaccgtccggaaaaaaaaaagaaaaaagagcgaaaaaggtcccaaaaagaaaagtccgattcccctaacacggcgaaaaaaaagtcgttcgtaataaaaataaaaagagagaaaatccatgaaatgccatcgacatgcaccctaatcccagaaataccatcgacaaaggaaacttcccaaaaatgccattgcacaagcctctttctcccaaaaatgccatcaccgtcaactccacatcgttacaaccgttattttttttaataattatcattttgtcctcagtgcaaaatatacccagttttcactgtcaaagaaaaaattgaaatttccaaccctaaccctaccgctaccgatcccgatcccgatccagcgctctccccagcggcgtctcgacgacggcggcttggcggtggtccccggcggtggctgtggctctgcggtggtcccctgctgcggcggcgcggcaaggacgcgacgaggtggatcagcgcgacggcggtccacgggggtggcgcagcgaggaggaccacggcgacgacgtggcaggacgcggcaaggaggaccaggacggcgacggagcggcaggacatggcgaggaggtccacggcagcggcggtcctcggcggtggctgtgtgtcggcggcggtccccggtggtggctgtggctcgggcggcgatccccagctgtggctgcgcggcaagggcgcagcgagaaggaccatggcggcgacgcgacaggacgcggcgaggatgaccagggtggcggcggtccacgggggtggcgcggcaagggtgcggcgaggaggaccacggcggcgacacggcaggacgcgcgaagaagnactagggtggtgncggtncggcaanacgtgtgacgaggacacgcaacgacgcgacagacgcggtagaaggttaacgncgccgcggttgtgcaagggcacgncnagttggtccacgncggtggtggcacgcaagggcttggcaagaatgtccacggcggcgcggctgtcgcagnatgtggcgcgggggccatagacgccggcgaagagaggtcctagcaggtgttgcaactctgatgttgattttttccccgtttgtttgatttcatttggagactttgtttgatttgatttcaatgaatttaattatggaataacttgattgatagcaaaataatgatgttggtgaatttataagctaacagaaatataatttattgtgaccaaacaatgaaaaatgatgttatgtgagtaaatggttgtctaagggtaagattgtcttttcatgcaacttaacggaaagatgctaatagcagttttacggtgacggcatttttgggagaaagaggcttgtgcaatggtatttttgggaagttgcctttgtcgatggcatttcatggattttctcataaaaaagatccgatttgtacgcaacgattaaaaaagtaaaaaagaaaaaaaatcccaaaatacgtaaaataagcgaaaaaacaaaaaaggaagtccgaaaaaataaagaccgaaaaaaggccgtgaaaaaaattctagccataaagataaaaaaggcgaaaaaaaaagaaaaataataagaaaggcaaaaaaaattgccttccaaaaagaacaaaacatttccatcgtaatttttagctattataataattgaagatgattttatactcatcgtattttcgtccattgtcccttcattttaacaaaccatcctatccttattcatatatgtttttagcgttgtgacgatattcatgttttcctttttatctccacatccaatatgtttgtgcacatatgggcctaaaattgaaaaagggtccaaaatattgcccatccctattttgggttgtctcagtgaaaaatattgcccatcttctaagcatatgtgacatactatttatttcagttttgtttgtgtttatttcaataattttgcacacatgcaaatgcaaaacatacaaaattttgtatgggcagctttcacgcatgtctgtttattttgtgaaagatttatctacatatgatttttttaacatcattttttcaacatatgatttcgttcggctatttaggagtaagtgatttattattaaaaattgaagttgtttccgccgatagttttggtatgtcgtgtgtattgaagttggttttaaaattcgtttgcttttaaaaatacaagggtttcgaattggatatcatctcataattaaaaaacccatatactttttagacaaaagatatatctaacaataatactattaaaatagtctttacccgttgcaacgcacgggcttttttttccagtagatataaaagtaaaatgtatttatttatggtatatattataagaaaaaaaatatatagtcaaaaaatatattttggagactgtaccattgccgaaaacattaagaaatatgaaactggagggaggagtaattatctagtgatgttttatgagcaaggaaggaaacttttttaagtgatgcagttatcactaactcatcaaaaaaaatagacttttgcaagttctagcatgtcgggcacccagtgctctcccctcgctcctacgtattatcgtaggttgctcttaagaatggaaaaagcttgggctcatgagcttggctcatgctcacttggctcctcagttaactaggttgttctctcttttctctttttatgggcttctccagttctccttacatataaaaccaactcatcagcaaactttaaataattcttcctcctaacgtaattattcaatttatgataaatttaccattgtattcgttgtaattaaaactttataacaaaatcttacgggattatattctgacaaaaaataatagagaaaatgaaccacccttcaatcctaatctaaacattttttatcacacatgcaacatcaagttgtaattgttgaaacattacataatacctatagaaacatcccaatgacgccaggtgcaacatttatgaatgaactagtgaaacataataaaatactcattaaaacattcaaaataacatcatgtgcagcataaaaaaaaagatccattacaacaaaaaaaaattgtagtgcgcaacatacccctcaccctcc

SEQ ID NO: 5030 - DNA, 26823 bp, Oryza sativa
ttctcatcaaccgggagtaaagatcttttcccgctattttcaaattctttttaaacccggttagagttaagaaccaggactaaagattatagcactgcatattattttcgcttacatatgtgtttctaaaatagaagttaatgcattaacattatttaaagtacaaagattaatgacaattaggccgaaaaattatttgtgtctgtaataaattaagtggataaatcgtaataagcaaatatatgacttaaaattaataaaaattccaataatcatatatacttagcatatgaatgatattattaaattggtaaaaactctaattaagatatgtatgtacatactgcatgatttaaaattaataaaaattgtaattatcatatatacttagcgtaggaattatattaaatttaatgttaaaagctctaattaacatatgtaaatgccacatgcatgatttgaaccttttaaaaattcgaatagtcatatataagtagcatatgaaagatagtaaattaaattgtgaaaaactctaatatatgaatgatagttttaaaaatatattaaatttaatacttttaaaaattctccagtcaattataattagcatatgaatgatagtaaattaaatgttaaaaactctaattaacatatgaaattgccacttgcgtgatttaaaacttttaaaaatcctctagtcaattataattagcatatgatgctagtaaattaaaagttaaaaactctaattaacatacatatgaaattgccacctgtgtgatttaaaacttttaaaaattgtaagtatcacatataactagcatatacatgatttaaacttgttgaaacctctaataatcgtgcgtaattaacatatgccatacatcaattgatttatatggataatcaatacatccaaaatagtttacatcgtgtacacaataattacggcattacatcggcggtgacggttgactgcacataccttttcctcactattgttccctccttgtgatcgctgcgtgagtaaggggtgtcttcatttgataggaggatgctagggtcaatcgtcaccgtgaaagggggttgcccatccaactgatcgtaatcctcgtcagtcttgtcctcaactccgacgatttttcttttgactggtagaaccacttgacgttaggctcgtcaggccctctgcccttctttcctttgatagacatgtccttcacgaaaaagacttgcgttacatcattggcaaggacaaaaggttcgtccgagtatccaaccttgttaaggtcaacagttgtcataccactgtcatcaatcattacgcctccaccagtcaacctaacccattggcaccggaacagaggaaccttgagaggaccatagtcaagttcccatatatcctcgatggcaccgtaatacgtggcagttgttccatcgtgtcccatggcatcgacacgaacaacgctgttttggttcgtgctcttcatgtcttgggctctcgtgtagaatgtgtacccattgatctcatatccctggaatgtcgcgattgacccagacggtcccctcgccaggaaggcaagttgttggttgatctccggcgtgcccatgagatgttgtcgtagccacgtggggaaagtatcaatgtgatgccgtgtaatccatgcatcggacttaccgatgttcctggcgcgaactagagccaagtgctcctcgatgtaaggagctaccaatgaagagtgttgcagaacagtgaaatgggctttacggaataaattgttgtctatcgtcattattactttccttccaagagttccctttccccgtagtctcccttcatggcgtgattcaggtacctcgattgggcgaaggtcttcgataaattctacgcaaaattcaatgacctcctctgttccataacccttggcgatgcttgcctctggacgagcacggttacgaacatacttttttagaacgcccatgtacctctcgaaaggaaacatgttgtgtaggtacataggcccgagaatacggatctctttcacaaggtgacaaagcagatgcgtcattatattgaaaaatgaaggtggaaatatcaactcaaaactgatgagacattgcaccacttcattctgaagggcttctaatctatccggatcgatgaccttctacgaaattctgttcatgaatgcacatagctttgttattgttgcccggacattgtctggaatgataccccttattacaactggtagcagttgtgtcatcaacacgtgatagtcatgagactttaggtttgtgaacttcttctccttcgtgcttattattcgcttgatattcgtggagtatccagacggtacctttatgctctccaagcattcaaacatactttccttctctgccttgctaagagtgtagctggttggactcaagtaatggcttcctttctcctttggttccgggtgaaggtcgccgcgttgttccatatgcttcagatcattacgtgcttccagtgtatctttcgactttccgtatacacctaggaagccaagaaggtttacgcaaaggttcttagtgaggtgcatcatgtcgattgcgtggcgtacgtccaagaattcccaatatggtaactcccaaaatatagagttctttttccacatcgccgcgtgaccatcttcgctctctataggctggcttccaagcccctttccgaacactactttaagatctttaaccatagcaaacactgttttcccgctgcgatgtttaggcttcgtacggtggtcggccttatgttcgaagtgcttgcctttcttccgtaccgggtggtttgctgcaaggaatcgacaatgacccatgtatacaaccttcctacagtgcttaagatacgtactttctgtttcatccatacagtgagtgcaagccttgtaccccttgttggactgtccagataggttgctaagtgcaggccaatcgttgatggttacgaacagcagcgctcgtaggttaaactcctcctgtttgtcctcgtcccacacggggacaccttccttcttccacaactgtttaagatcttcgaccagtggtcttaggtacacatcgatgtcgttaccaggttgcttggggccttgaataataatcggcatcattatgtacttcctcttcatgtatagccaggggggaggttgtagatacacatcgtaatgggccaagtgctatggccgctgctcatctctccaaaaggattcatgccatccgtactcaaaccaaaccgtatgtttcgtgcgtcctttcctaattctttaaattttctgtcgatgtttcgccactgcgaaccatcggcggggtgtctcagcatcccgtcctgttgacgctcttcagcgtgccatcgcaacattctaacattccccttgttcctgaacaaacgccttagccgtggtattatagggaaataccacatcaccttagcaggaattctcttctttgttagctgcccgtcaacttctcctggatcgtctcgtctaatcttgtatcgtagtgttttgcaaacaaggcatgcttctaggttctcatactcctcaccgcgatataggatacaatcgttcggacatgcgtgaatcttatgaacttccagtcctaacgggcagactatcttcttagcctcgtacgttgtctcgggcaatttgtttctccccggaagaatgttcttgacgagtttcaataaatcgccaaatgccttgtcactaacctcattttttgccttccattgcaagaactccagagtggtatccaactttttgtgcccctgctcgcaacctgggtacaacgaagttctgtggtcctccaacatcttgtccaatttatgggcctccttttcactttcgcagtcctccctggcgtcctgcaacatttgaccaagatcatccgcaacgtcgttaccatcagcagctatttcctcctcgcccgtttgattttcttcaaatccaacatactgagcaaagtccggaatattgtcgtcttccacttcatcttcttccatttcaacaccttgctctccgtgggatgtccaacaattatagcttggcatgaaccccgactcaaacaagtggaaatgaatagtcctggatgcagaatactccttctgattcttacacttattgcatggacaacaaataaaacccctttgcctgttagcttcggccactctcaaaaaatagtgcacgccgtcaataaactctttggaccgccggtcagcgtacatccatttccgatccatctacatgagtcaaaaaaaccgcacacaaataattattcttacaataatgacagtcatacaataattataagatatctttattcatacaaaaatcataaaatattacaccaaataattcttaaaaactatttgtaaagttttaaactaattttaatgtgttttacttcttttaattttcattttagtttgttttctattatttaagattaactttcactagagttttccttctcaactattttataaaaccttgtttagcaaatgaactaaatttctatatattctttcttccccacacacattttctctctcatcaacatacaactaaattttggagacaaaaaaagtgtgcaaaacataggtgcaaatgtagtatgacaaaaaaaacattggaggatgaagttgcaaaccttttaggcacctccgatttgcatgtaatcaccaaaataaattcaatagaaattttggcatgacctcccctcttttttgaagaaattttgaagcttgctcgggcagctggaggaggaagaagacatatatataggggtgggactttagtcccggttggtagcaccaaccggggctaaagatcaccgggatctttagccccggttggtaataccaaccgggactaagatctttagccccggttggtaataccaaccgggactaaagttacgatctttagtcccggttggtaataccaaccattaccaaccgggactaaagatcctagaggggcctgacatgccctgacagcattcgaaccgggactaaagatgatccttagtcccggttggtgtgttaccaaccaggactaaagatcaaatatgcccgttacccttttgaaccgggactaaagatcatctttagccccggtttttattgcatccgggactattgtggaaatcggccgaccgacgaaagatggtttctccaccagtgattatatgcatatctagattgtatattctaatcgtctagtgttgatgtgtttgtacttcatatatgcatatggttctaggcgacaaagtctaactacaatggattacgcaactgcatgtaaacatatatattactaatgtcaaagagaaaatagccaaaatattcaatgattgaagtgtgactccaagagcaatgaacccgggcttgtttgatcaactatttttcacttactaattcgaggaggacgcaatcaacttatgaaagttattttaagagcttgctctcgtctaataaacgaagatagttatgttttggagcctatatataatatcggaatatgtatatatgtagtgttgcatgcgtacggtctagccgtctaggcggctaggcctacaccagtacgtacaacacggcagtcaaacaagcatattatagtcccgataataaaatactactccttccatctgatgaagatttcatttttcagttttcgaaatgaatcttcgtcttatttaaaaaatttctatgattagtactttaattgtcataaataatattttacgcgcgactaatttgtttaaaaaattcaaatatgacgaacggtcaaacgagtactactggagagatgcacatctctcccggtttgtaaccccctttatttctaggtaacgaactgtgagaaagaatctgggaataaagatcgtcatctttagtcccggttaaaatacctagtactaaagatgaatccttagtccctgttggagtcaccaaccgggagtaaaaataaaagcaccacatggagctttctctttctcttttctttttttatttttttttgcttctttcatattgatttcgcaccgaactcaacaacaaattcatccacagacaaaatcattcaacatcacagattcatttgcaacttcatagaaacatctaaaaatcatccataaatttacatcacaaaatcaaccacaaattcacaaaaacatctaaaaatcactcacaaatttacatcacagaattatctccaaaatcatcccagaatcatcacaaagtcatcgcctccggattgcccgccgcttgccacctctcctctgtgtacgccgcctgcggccgcctcccatccgcgccacctccaccgccgcgcggggccgccgcccgctcccgcgcgcaggccgccgcctccctccgccgccgctagccatggccggcacgctgccgccagccacagccatgagcgcctgccgccgctcaccccgccgggcacggccccgccgccgctggccgcctgcctgccatcgtcggccgccaaaattattatttattttcattggaccagattttgttctgttcataaaaatatttttattttgtatagattgtaaatggcttaaaaataataattataattttcactggttacctaggaaaagtatttagtacaaatataaaaaaatataataatgataataacaatataggaccaaacataatattattcggaattaaataaaactgtacttaatcataaaattatattttatttcaaattggaaaaattttatctaggatttgaatatcttggacaattataagcctttcaaaatttaaaaatcatatatacacaagggctccaaaactattttagatttttacaattatgaaattagttcaacaaattatagcacaattcttagtttactattagagtatttaggaactaaataaatcttaactataatcaataatacttatttgtttaacaaaagatgacaaatgcaatttttatttgccaatatatttttttgtgcttgtataaaaattttattacgaaatctccaagattgaataaggattttttttatgaaattgtttaaaatagtttaataaggtgccgcctacgaagatgaattttgcagccggacgatataacgcgccgcctgtaaaattgcatcttcgcaggcggatgacctagtccgcgcgggaaggccgatttcggccgtttgcaaaaatatttctagtagtataaaattgagtaagatatatatagaattcaggaaatgaattagtagccatcaagactcatactcatcaactaatggtgcacttatcatattaataaggcatggatgatattattaaactcccacttctttgttgtcgaattaagccaggaaacacattcccgtccgtacatctgcagttagaagtaaaaaattacaaaaatctggccagttatttcattttaaagtgtcaagttgatgaaattaactactcaggttttggtaattttagccagcgtatgtgttgatcttatgagcctaacgtaaaaacaaggtaattaagtaccgtataattaattaggtattaactatttgttagtgcactaattaaaatagtatgccatgcgtggctttatatgtaattatgtatacgtgagttatatttgtgattccgtaataccgtccaatggcgtaagcaatgatgaatatatgcattagataatcaagtacatacagtacaatatatgtaagatacagatggtggcaatataatatatatgcagcaatttttgttatattctactctctagaatatatccgaaatttggctggcctaccatacatgcacgcacatcactaattcattaatcttcaaaagtctccaacaaaaagaacttaaaattatcaaattaagcttgtttgtatttatattctgcgtgcaagtacggcaaggccggtgcaaggaaagcgatgtgatattgtacggtacgagtacgacatcagtgacagcataaccgagatgttatgtttctgatgaatgttcgaaagaaaataaaaatagtcaagttgcaccgatcgatttcaacaaataccaatatttttgtttgtatcagttttactcaactatcaaccgaggtttgttataatatattttggaatacatatatagcatccacatatatctatgcatacccctttaaaataccctaatagtgatgatgaaagataaatccgccactacccaccactatcgatcatatggatacttaaacatatggatacctaagtagtgtgataggtgaacttttaacccttccaaccacaaaccatcaaacaaggaaagtttattttataccactgtaaaaaatgatggcaagcctatagagttgaagctcttatccaccatttctccttagttcagtgatattaaatttcccctactttcatgtgtcaaataagaacgatatcttcgcacaatggcagggagctgaaaggctttcgttccagcttacatccgaattcatgtaaagttatctcacccttttcttctctttaaagtgctatgggtgtcttagactcgtatccctggctcacggtgtcggcgttccgtttccttttgcgccagagccatctcccagcataggcgcgcgtttgctcacagagggacgcgctcctcggtcgcttttcgctgagacacggtgcgggggcacgtgttgggcgcgcggcggccagacgtgtgtcccgtggacaccgctccatcccccatatttccccttccacccctcgacacaacgctcagttcgcccgcctctcgccgcactccctctcttcctccgccctgcggcatgctccctatcttcctccaccttgccttgtcgcatcaccggccgccgccgccgtcgtcgttcccgcaagagtaagtttttgggagacctagccgggttgggccgtgaaactatagccgctaacgtcgtgtttttcttctttctcccgcattatgttggtgattttcttgatggatgtgttctcgtgtgtgtgtgttgcagcttgttctcatggatcctaaccggtcaagtgggtacaacaatttcttgaaggatcccgatctggtgcaccccttcggtcaagcctccacccaaagcgatttttgtcatccccacgacgacttccccaacgctcatgctcagtttccccccttctctacccagccaccaccactagcaaccggcaatggtggcctgacattggcctccatatctagggtgaggcagcgtgtgcaggcaaatccagtcagccaagacgatgggaaggcgaggatgtactacactcatgatgaggacatacgcttggcaagcatatttgatcacattccaaatatttgaggcccagatctgaactaggtgcaaaaaaaaaaacttgatttggatgaagctgagcatgagcagatctttttttttgaaaggaatcagcacgagactgtgctatttcattagatataggcgtaaaaaaatacaacccctaggggcaaaaaaaagagctatacaaaattacataagcgctatgattaagttggtaagaattctccaagtcgccttgcgcctgccattatccaggttcttgcctcttcctttatttttgccataaggttgggggccgccgtttccttgtgctcgaagatcctttggttcctttctttccagatttcccaggctatgagtaggattaaggatcgcaaccatttcttgggcacttcccttttgttggctaacatttcccaccattcgtgtacgctttggcatggctcccaattgctcggatccaattgctgataagccacctagttggccgtcagtctccagatccttctggtgtatctacaggaagctaaaaggtggcatgccgtctcttcgtcatacggcatagggggcacactccgctatttggccatcctcttgtagctcgtcgatcggaagtccagactctattttgaatcacaagccacgcataaaatttgcattttgcaggggcctaagatttccaaattaggggattgaagttggtgccgactattcctagacactgagccttgtatgccgaagaggccgagtattctccatgattcgagagcttccagacaatgtgatccgactcattttggtttagcatgatgtcctggggtgcgctccatagggacacaagctggctgatcagttccactgtaaaagtagtgttcccatttagctccaggtcatcgatccaggtgtcattttcaatgccttcacgtagcgatttgcttcttttcttggaaattgcatagacgagcggcatgctgtcctttggtctttgcccgtctagccaggcggactcccaaaagcggatcgtgtttccatcccctattgttattttggtagctgcggcgaagagaagtttgtccgtttcatcacacggtgtctctagtcccacccacggcttggtggggtctttccattcatgccagagtcatctcagtcgcaaggccctcgtaaacatctccatgttcagaacccctagtcctcctagtgcggttgggaggcacgtccttttccagttcaccttgcatttccctcctgtaatgtcccccgtccctgcccagaggaattttcttctctttgcatctagaatgcccaaggcttccttagagatcttaagagtagtgagcaaatagataggttgcgcagtcagtaccgacttgactagagttgatcgccctgccggcccgatgttttttcccctccagccggtgacccggtttgctattttatcaaagatcggttggacgtccgtcttgcgcagccttccaagtagaagcggcagtcctaagtattttatggggaattgggcccgtaacgctgggacgccatcaaggatggagtctagatcaatgcttgcacatctgattgccgccacctgcgatttttgcatgtttgtgaccagtcctgtcgcatgtccaaaacgcacgagaatgtcggtgaaagcctagacatcctctctaacagggtttatgaaaaccactgcgtcatcagcgtacatggagattctgaggcgagccgctctgcctcttagcttggttatggcgtttagttccgttgctttggagaggatccattgtagggggtcaattgccaatatgaagagaagcggtgatagcgggtccccttgtctgagtcctctgccatgcgctatcttttctcctagtatcccgttgagcagtacttgtgaggtggaggtagtaagtatggccgtcacccagtctctccatttctgcgggaacccatgatgttgcatcatggctaaaaggtaatcccaacgcaccgaatcgaaggctttggtgatgtcaagcttgaagagaagctttggccgccttgttctatggcaacttcttgccaaatttctaacatagaggaagttgtcgtggatgctcctgcctttgatgaaggcgctttgattgactgtgacgagggttcacatgtgtaatcgtagtcgcaaagccaaggttttggagagggtctttgctatactgtggattaggctaatgggcctgtagtccgtcacctcatccgcgccttccttttttggaatcaggacgatgttagctgagttcagaaggttcatgtttgcacatctcagattattaagcgattcgaagaccgccataaagatctgaaacatgtgtagaaaaatttgtgtgtttgtgtggttttttatgagactgattgatatagtttgggatgcctagaaaaaaaaagttgttttgcaaactgatgatgatgagaagtagcagtacccatgtgtagaaaatgttgcttctttatgggtagtttatgggagtgtgattcatgtacatgtggttgcctacataacattgcgcaaattttgacaatttgatcctttccaaaaactaattttacaaataaaccacggccaaaacttatttcagaaaggcaaaatttgctacaggctatccaaaaaagtgtaattagctggaggacaccgtaaaaacgtgtatttgctatagggcatcgcaaaaaactggtaattggctgctggacccccgcagcattattttattatttttggaggaaaaggagagagaaacaataattaaagacaagtttacccttggctcaaatgactccaactcgggcttcacatggaagtcccctctccctctccctctcctccttcccagagaggccgggtagcagagcggcgatccacggccgcggccgcagtgccagccacgttcgccgtcaagaggggagggggaggggtttacgtgcagccacgccgacgtgcgctgccggccgctaacgctcatctgcgtgctcggctcggcgatgagtggccgggacgtcggttgtgtcggagtaggcgctcaagtgcggcggtggcggcccggtgctcgtctccctcccggcgtcgtcgttcttcgccggcaacctcgccgaggtcttccttctcacgacgctcgccgaaactcatctgcggacctggaggccggcaccggtggcttgcgcctcgccgccgagctgtcctccttcttcgcgtcatgcacgaccacacgctcatctggggcaagggcggcgaccacgccgacaacggcaagccactagccgccgccgcgcccccgccgcgccgccgctcgctggccgccggtgcctgcgctgctacacctggccgttgccccacatcaccctgcgccagccgcctcctgcatgtgagaaaggggatcgagagagaagcaagaagaaataatagagagaagagagagaaagagaatgtgaaagaaaagaataaagaaaaaggaaaaaaattcaaagggtataaccgtatttacacaactatttctctctctctctttcctccaaaaataataaaatgatgcttcgaatgtccagcagccaattaccagttttttgcgatgccctacagcaaatacacgttttgatggtgtcctctagctaattacatgttttttggatgtcctgtagcaaattttgcctttcagaaatcacccttttgttcagcgccaaatcgtatagtgctgaacttagacaccttagcgccacgtcaactggcgttgaatgccgtgccaccatggatgagaggctgagtcggcgtgccaatgtacattcagcaccgtgctatttggcgctgaggtgtctaagttcagcgccatacgatttggcactgaacaaaagggtcctttctgaaataagttttggccgcagttaatttgtaaaattagtttttagaaagggtcaaattgtcaaaatttgtgcataacattgtcttgttgatagagaagaagcacaaacctttgtgatgcatgcatatgtatctgttttgttgaagttatgatgtgtccgaagtttaattttgttgacataaatgaaaagtttttggtagctataaataattggctccttgatttgcacacttttgatgtattgaagttatgtatggagcatccaagaatatctgtgttgactgattatgggtgaaagttgcattttttttatgacaattggttccttttggtagatagcagaacatgtattcctcgaaatgttctgtgatgttattaccaatgtgtattttgcatttgttaggtatatgttgagcatttgatgatatgtaggtgagtgcctggcttgagaactctacagatctaattgagggaaatgctagaaaaggtgacacatattggaggcaagttgtagctacctataactcaaccatagaagatgacaggaaaaaggaccccaagaacctcaaagccccatcaatttgcctgagattttgaagagcccagctatgagtacccccgttgggagaatagtgtctcatgtagtggcttcggttagtgagggcacccatgaagtgtctttgttgtagatgtcctaactgtttctttttcaatttaaattccatagtagagatctgtgcatagcacaattggccagaagtgtcgtcatgcgcacgtggctacctaggtttgagctatgcatgctaaacacatagtgtctactacttctctccttaaatcaattgatagcgaggttgttagtatgaaaaaagaatacaattataaaggaaaaaatatataattatcacatcaacttagtatgaaaatcaccatcatcatatttggcattgaacccatgtcaactaattgttaaagccaatacaaataacagggaaacaaatcctctactgtagagctagccctataattttgagtaacggataaaagtgggtttcatgattaacaggcctatatgtcagtgatagaggacaatattatagaggagactcatctaaattatagttaacccgtcttacattagaagtcagattgacaggcaagtagaaaaatacagttgcttgctggagcttgagatcttcccagccggccggcaagttggtcactgtagagtagctagaggttgttcagattgatattatttcaaaccatatctttttttaaaaaaatatcaaagatatatgcatttacttttttaccaaactttcaaaaatacataagaaatcatgttaaaattttaataatattgtcaacttatatcaaaattttgacattaccaaaattgataagatttattttgattataatctgacatcctctttggtatccacagaaagtggagtatactatctagctccccgacgggaacaagtggtcatgagctaacaactaagcaaagcgacggcgaagaacaacgatgcaggcatcgccccacgtgtggttaccgacggcgatatgaccaacggaaacgccacacactcgctgcaaaacaaaacaaaaacaaaaacaaaaactctgaacaagactagctacgtgcgtacgtacacactctccaagccttgccagcctccatctcgatcgagagggatatatatatctctgatgaagaagaagaagcaagattcttgacgacttggcttgcgtggagtaacatgtagtagcagtttattcactgtttctgttcgcctcaaactgtcaagacatatgtgggtgtgtgcttgaatggtcgcttggccatgagctttcgccgtctagtttttaataattggcagatttggcttcagtgatattttgaattctgatttgtgaacagcgtgttgatattaccggccgtatgatcaaatcgacatgtgcgaattaaataaagacacatgaaacgttcagtagaagacgtgcccacgttcagtaggagattctgtttttcaaaaaagtttaatctggatggacctgtgtctgtggtggtaatgtattgagtccttcattcaactgtgcgtgtcatctgcttttccgcggaagcatatggtacaatcgaagtaacatgcatgcatcaactcattgagtcacttctccagaaaaccatctggttgcaggagagatactaagtacgttttagttctcctgtactgtaaagatagctagctagctagatatatactccctccgtccttaaaaaaaaaagacaaaccttggtttccgtgcccaacgtttaccgtccgttttatttaaaaaaattaaaaagacaagtcacgcacaatgtataatcatgttttatcatctaacaacaataaaagtacgaattattaaaaaattttatataagacggacaatcaaagttggacatggaaacccagggtttaccttttttgggatggagggagtacaattagcaggaacaaattgtcaggagatattcgttcaaaaaaaaattgtcaagagatgtgcgttacacgggcttatataagaggcgtagctagctagatggcactgtgggccatagaccacctaaaattttgatcgagattgaaattatagtatatgtgctagttaatataataaaaattatatagtggaccacccttttaatttacttattacgtatagatggatcacctttactctaaatcctagctacgccactagcttatatcagggttgtcaatttcgtttcggaccgaaatttcggaaaattttaggaattttcatacttttgtgcctaaaattatttaaaaatttaacaaaatttggttgaatttaataaactttgaccaaattaaagaaagagtccatatctattacaacttgctaattattaatttgaaattataacattaatgaaatactaaattctgaattttcatacggatacgacttcatatttctttattaatttcgaattttccactcattaaatttagaaaaactaatgaaagggtctgcgacatttaaaattgcgtatctaacacatattctagttacgatagtatatatggtctatctaatcaatggctaactctttctagttaacctaaaagctttctcgtagtgcctaattaattaatgtatgtatagaataacatgaattaattctcctgcattctaccatggacgtgaggaataatttagacaatactattatttatataaccattacttgtcaaattatataatatacagtactattcgtataacatgttagcatctatttagttgtttttcaagtatatataagactaattgtttgagtgaatagacatatcatatagatgatataacactactcccttcgtttcatatattataattaaggtgtattgagcttttctaagtggtatgagtttacagaaacatagtaatatatatctacgtacattaccaaattagtttatcgttaaatccactgttaaatatgtttttataatatatttgttttgcattgaaagtgcaactatattttctataagcttgttcaaacttaaggtttaatttaaaataaacataaaatatctcatactaaataattaagggatcggagtacaaagactaaggttgcgttctttcaggggagataggggagattgtaccttgttttccgtgcgcacgcttttcaaactactaaacggtgcgttttcgcaaaaattttctataggaaagttgctttaaaaaattatattaatccatttttgaagtttaaaatagttaatactcaattaatcatgcgctaatggctcacctcgttttgcatatcttcccaatcttctctatttccttctcctcaaacacagcctaattcctgcccaagtgatggcttacttctctatccactctctctggcgtacttttacctcgtcaaaaattctactccctcagttccattttaagtgcagttatggtttttcgtgtctaattttgattgttcgtcttatttaaatttttttaaaaaaaataaaagcataagtcactagtaaattactatttatgttttatcatcttataacaacaaaaatactaattataaaaaattttcaaataagacggacaattaaagttgagcatggaaatttatggttgcacttaagatgggacggagggagtacaaggcaatattctcacaaaacttatacatcacatcattgttcacgcctggactcaaatgctctaccgtatgagatacattaattggaggttcactccctgtcggtctcaatgccttccttttttttttccattccttcgtgaagacgcataatctccaattcttcatttcatcattctcgatcgctgtctttctcttccacaactttttctgcaaggccggaaaggagagctccatgcgtggtttgccacaaactcgttgaatataatccatgtgccatggatgcccataaccaaattaaccatactccttgtgcgacgtgttagtgcatgtcacaatcctattacccgtttggctcttcttcccaaaaagctggaatctactactaccttttgcagtttcggtcgtcagaggcctctctcttgtagactgccaaatggcctaaaattaatgacatgggtcaccctatctgtttgttgcttccaaacttcgagcgtgatacgccgctgcattattgcatcaattctgttcctctctgatctctcgatcgatctctctcccttatctgctggttgctgctggttgctgctgatgatgctggatgttaatatctttgttttgtttaattagtttaattttctgcatgctctacagtagataaaggatatccttcagaaaagtaggggacagatggtccatcagaggatatgtcgagagaacaaaaggcagcacttttgtgatatgtatgctgacaaaaagatattgtgataataggcttattagacttgtaggtacatgttgatctgtttgctcactacatgagttggaaattttcgaggatatatataacaacatatttcccaccatacactaaacaaattttgcttctgattatcttctcttacagtacggcagatatatgatggcaatagaattatcataatcgtaatagcaaaaaagaaaaaaaatagcatcaatcctgaactcttttccttttaaaaaaaatagccaagcgctcgagaaaaaaaatcgccaagctagacaagcaagctagtttgaataactagggcaacgatgaatgaaacgaaaaaacattttttttacctgttggaaacagtgacgtaaaaacatattttacttgaatactgtgaattagtgcgccatctgctcggttagtattagatattgttcatccacaaaatataattacatattcaatagataaagtgcaaatctcttccagatgaacaaaagaaatactaccttttttgaggtaaaacctcgagaaagatttacctcgagaaagaggataggaagtttctattttccaaacgaacagataaaatactcaatatttttgttaattaataaagaatacttatatattttactaattataaattaaaataaagcgcaaatgttaagtatattacttatataaaactgtacatctctactccctacggttatgaaaacatattattttggatatgtctatattttcctcaaaagttacactcacaatattatattttttatgcatggttttatagatttttagtataaattaattttcaaagtcatatatgaagaccaaagatggctcatatttttcagggttttctcgttgccagcagtaaagttatgacaaccaccacgagagacaaagtttagaaaccattatgacaataagaaatttccaagctgccaaactttaaaaacaagatttccaaagccacgtcatgaaattccagcctaggtttcaatcaccaccacaaacaacaaataacatgattgaataatattacaagcaaaacacacctcatgcatgcaccatggcttgcatttgctggctagatctataattaattaatgtcctccagaacaattaaaaaaaatctgaaatgagaagaaacaaattactccacagtagcaacgctccttgttgactaattaattaccaattaattgggtccattgcacacccaagtaattaacaaccaccaaccaacgtcattagcacacaaaccgacaattattgcagagattatcaaggagaagggatcaatgcaaggaccagccaaagcagtgaccggagcttacatagctagcttcttcccatcacgccgagatgtcgacggcaaatgatttcctaacaaatcctgatgattaaatctaatgtgatggtgatctaagccggcccagaggagccagataaagatatcatagccatggttataattaattaattaattaattaatcaactgattaggagtcgttttaattaatctaactatgaccgggtttgggccccagcttgagccgcccaagctacgagggccttgcagccatatgatcgagctactcgatcggctaatcttaatttaattaattaattagttaattaacacctcccttcctaatttacaccactaattgggtgtttaccgcgtcccacgtggctctctctcggccaggaattgggtctactatatatggagcaccatctatcgtgtgtttgaccatgcgtgaaaggttgaagccgctgctatgcgccggtagtatagattttttgctctattgatggtaacatcgttttgaagaaaagaaaatctttggaacaagcaaaagatattttttaagtacagtacaaacagcgtagatgaccatatattcactcgtcttataaatacacatatgtacattctacttccttcatctctaaatatttaacgctattgactttttaaacatgtttgactgttcaccgtataagcaattctaagacattagcgagaaagtcactgcatagttcaccgttatttattacgctacagaaatatatttttacatatgctaccaaaaaaccgtacttaaattaatgtgtatggatatattacccacatacgacctctctagttgcattagttcttttttttgggaggtcggccgtgtttgatgtgggttccaagagcgtgggtgtacaaaatttgatgataacttgaaagaggcacacaattttttagtaatgatttgtgccattttttatatatatgtttaaagcatcaatgatatggcattatgtacattaattacatagctaggtaattacgtaccttttatcgatcctaacaggaaaaagattattttttattaaaacaaaaacaagcaaacaaacttccatcaccttactgcaaagattgtctttttttttccaggccacgttgccaaagtagcaaaacaacgctttcaggccaatgtcatgtagctgcctagctaggtcgctatatatgacaaaaaaaaatcaaatcattaacttaccagttaggcctgtttgatataattatttattaatgctaaattcagatggatatattgcaataatatagaggaatatacaaactgatttcctttttcttttcttttcttttttttttaaaaaaagagcacctgctgtgagcccgtgactagattatgctttaaatagaatattgtgtgatttgtagtgatttctatctcttgaggatgtcttaaagggtgtgtttgtggctgcgtgcatctcttatataattgccaaaaaggaaatactgtctcttttgagagagatagagtgtgcgaccgcacatgtccaatatgaaattaacttggagaatttcagactagaaaaaaaatctctccttttctccccgggacaaaaattaacttccagataatcaagatatgatgtactataaatattaaagataattgcacaagtattggaaatatatatactagcacatacgtgtaaaatctaaatatctttaaaacctctaaatggagaaggcaagaaacagaaacaaccatctgttccctccactcctttccaagtctgtgcctaccacataaagaggcaacaaattaaaaggcatcaccaagaagaatatatatacatatagccctccacaataaaggagaaccccttgaactgtttggaaaaattgtgaaaaaagtaaacacacatatttagggaaaattgaagccacaagatattaacctcttgcttagattaaatcctttttgtaactgtacattttatataagcatctgctataccatgcacatgttaggtgaaatgttaattttagtatatttatatactttgtgcaaggtgacatgtacgtgcaggtgaaaacaaaattatcaacctcgaagtgaactattcattaattaataatactagcctagtggtgacaccacccattaaccaccccttttcaggtttgaccttttgatgctcgcagttagcaaaaagaggccactaatctctatcatggcatgccccgtaattaccccaaacacgcaggggcatttccgtccacgcgcctcccccacctataaatccaacgcgccacactattgcctcttctcatcaccactcgtctcctcttctcgcttcgccttctcctctccttgtccttgacctcccctgctccgccgcgccgcagagcgagcggccatgaccaaggtgcaccccaacgtcgcggtggtggcgccggcggtggtggaggaggagaagggggaggcggtgtcgctgacggtgtggcggcggtcgctgctgttcaacgggaaggggttcacggtgttcgacggcaaggggaacctcgtgttccgcgtcgagagctacgccggggggtcgccgagggaggtcgtgctcatggacgccgacggccgcgccctcctcaccatccgccgcaaggtatgtggtctctgaattcttgctctggttttttggtgcccatggccatggccatggccggccgccgcagatgctgatgttctcgtgtggtccgtcttttgcagaagctgagcttcgcggacgagtggctcatctacgacggcgacgcggcgtcgccggcggcgccggggccgaagaggttcacggcgcggcgccacgtcagcctgcgccccaccaagtccctcgcccacctgtcgccggcgcgcgcgtcgtcgtccgccgccgccggcggcggatcggcgaccgcgccgagcggcgcctgccggtacgacgtggagggctcgtacgccgcccgctgcctcgacgtgttcgcctccgccagcgccggcgagcagcggcggcgcgtggcggcggtgtgcagtaaggaggccgccgtgggcccggacgtgttccggctggtggtggagccgggcttcgagccggcgctcgccatggccgtcgtcatcctcctcgaccagatgcacgcctcgtgaaagcttcgcgcgccctccccctgccgctgcacgaatctcaaagctccctgcaccacagctgtgtgccacaaggaacaaaaatctccttgtttcttgagagctcaagacacctcctctcttttttatgcttcaagattagcaaagttatgaatcactcatgagctgagatgatcaatctgcagctatagcagaagcattttttatgtaggggtgtgacgcttttatggtttcgggttcaggatttagggttaagaatcggacgatggatgggtatccagaggtgttctataagtgccaggttttcggattttaagttagtgaaaacaaaactgtgcacttaaggttggtactttggtagggcagatgatccaagatcttgtatggagtgtatatgaacatgtaaatcccagcccctttttgtttccttcccaaaggaaatttctggtccttaatacatacctctaattaataaaactttgagtttggtttctcctactatttatctcaatattcagaatatagttaatttaattaattactttcatttgttatcctacttttttttctgtgtaatttgattgcttcagctggatcgattagcaaagttgaagaagaaattgctctagaagattgtacactgttcgatttcttttgacatgaagcaactatgaggggagaaaatagcgtaacttgtgaagtatgtttggagaagtaattcttcctccttttggggctctgtttgtgcgtagttgaatctttaagctaagattgttgggttggtgagttaggaaagtggatgacttgacttgcccaaaggaacaaaaggaacaaaagaaacgcaaccattttttcctatatacgaaaaatagagatcgaaagaatcaagctttcttttctagctgctggctggttcactgcgtctgaaagagcacagaagaagattctgttaacatgaaaaatttgttaactagacaaaaatcaagagatgttcttggctttatgtatgttctgttgatgtagcaaaaaaaatagtaacaagtggccctgtttggatggggctagcccctgtcacatcggatgttcggacactatttagaagtattaaacgtagactaatgataaaacccattccataatcctggactaattcgcaagatatatctattgagcctaattaatccatgattagcctatgtaatgctacagtaaacattatctaattatgaattaattaaacttagaaaatttgtctcgcagattagctctcatttatgtaattagttttgtaaatagtctatgtttaatactctaaattagtgtccaaacttccgatatgataggtactaaagtttagtccctggactatatttctggcatctgcacttggtgtatacggctaataggttatagctaagcgtgttttaggttttatataaggtgggatgggttaggtttatctctagttttagataggatggttctagctatttgttttgttatttaagagattataaatgatcactttttttttagaaaagggatggcgtgactcgtatgtcagcgagagcgggaaagtggttttgattggttcgccacttttttcacgtaaagctaacccaaatcttaaaaaaaataattcccttcgaaggtaatctcaacccatctatttttaagtaaacatcttataaaataggttcgcctcatccaaacacatcctatcttttttaaatcacacatgctaaaaggctaagaggtatgagttagcacaggtcgcacactaaacgctaactttagataaaagatataaaaaacatatttcgaaatgctactatatatatgtattttaggggttattaaaatgttgttgacatgttcagaacatctgcgagtagttaactagcctagcacgatcgatatctatcgagttcaagttccttgatagcgtgctatttatcgaattcaagttacttgatggacaaataggtcggcacagatgcaggttacgaaattggccgctccaccgaccgaattgaattgaattcatcgcgaaaacgacctaggataacgctagcacgctagtgctgatttttgtcccctagttctcagcagaatttcaaaccaacaaaaggtacagtagtagtacatgatcatcagcgtatcttgcgagagatttttttcttttcgttacaacaactttttttttaaatagattttcattaaccctctgtctatatccacgagggattaggccatccctaacccagaagctatcaaatagtttacatacttgtatgtcatgtataaacactatagtcctgtttagatcctattctaaaatttttcaccttgtcatatcgaacgtttgcacctacaggagaagcttgtcgaggagcacactgtggtggttgtcaagagaggcggaggcgaagacaaatcctgtgaggacgcacttggaagaggtggatcctgcgacgacgcagtgacgacaacagccagcagcgcgctgtttctggctgctacgatgacatctatctgccattgatgttgttttttttttttgcatgttctattgcctgtagatttgtatctgatgcgctctttagatgtagatctgaattgatgcatagatgtggatttaaatcaaagcatgtatgatgtgaatgtttttttttccaaaattctttttgcaggggggtcacttaggggtgctagcaagaaaaatcggttttcgcaaacgaacgtggatctacctgctaaagttgatgattttcgcatctctttgatcgcacataggacgtctggccgctcgtaaaaacgtgtttcataagcaatgtatgcatgtatatgtatgtgttctatatgccatattatgaatagttacacattagctatattaatagtttggatccaaaataaactcaagaaccggttaacaactcgttattagcagtggtggctagttacaggtttttaaaattaataatttgatttttttccccaataatagcagtaaccgattttctggagagaccagtatttcttcaaacaattttgctaaaaaatagtagtgtcatacccccccccctcgtatttcagtcacctttttcaccttgatcgattggcaattaagtctcccttatgtggagcctattgttatttgtcgttgttcttctgattgactttttttggggttgttttgcaatttttttaaggaaatcgggaagctaataaatagttttccgcatcagttctccttatatagtgactacttcaaaggataatgcacatttcacatgaaaaattttggacatttcagcgctaacatagtgtatgaattttcaaagctacttaataagacacatgttgagagatgtacctgaaaatatggcatcacagacgatatttaatctcaatcgtccaaaaacgatatttaatctatataatctaacggcctgtttagttcacaaaataaaaattttcacgctgttacatcgaatgtttagacacatgaatggagtattaaatttaggaaaaaaatcaattatactgattgcgtgtaaattacgggacgaatcatttaagcctaattgcaccatgatttgtcaatgtggtgctacagtaaacatttactaatgatgaattaattagtgttaataaaattatctcgcagtttcctgacggaatatgtaatttattttattagtagactacgtttaatactttaaatatatgtccatacactggtggagaaaccatctttggtcggtcggcccaattccacaatagtcccggttccaataaaaaccgggactaaaaagcatctttagtcccggtttaaaagcttaggggtattttttgatctttagtcccggttggtaacaccaaccgggactaaagatcatttttactcccggttgaagaggttgtcaggtcgtgtcaggccccaattatttttagtcccggttggtataaacaaccgggactaaaaatcaccccaagccgagcgcgatgtttatttcttcgcgtgtccattgtctgaccctgctcctcagtcttatccttagcttttcttcccctccactcgttctcctcctcactccttctcct

SEQ ID NO: 5031 - DNA, 7423 bp, Oryza sativa
attttttcccctccccccggcgaccgaggcgtggcattctcccaactttaggttgcaacatgattggaattaaagaactaattactggcatgattgcatagggaaattattatgggccatgtgcgacgcttggctgtaccttgcaagaaactggtaggagtatgtcccttgcatcacccaaagaacagcaggcactactcctttataaaagtaaggctaatgttgtcaccatcaggtgactattggctggtaggattggaacacttggcagcttgtctgtcactgagtcgtcacagtaatcatccagcaagcaaaagcatgcgtctcagaaaggtttttagccacaaaataatctaatctggtttgccctaatcagtgtgtttagagaaatgcaaccgtgtgttttctaccataagtattcagcgtcaattgtcaatcgatctttgaagtagcatggttgcatggatgaagtagaaagttcagccaactgccctaaaaagagcatgatccaatcacagagtgtatgtaaaaagataaactggaatgataattcccaaactgaccggatacaaaaacgttgaatttcccgagtcctacaaccaatcatatatacagttgctcactactatgctccttaatcctgaactaccgagaggatgtatgtacacgaacttgattgtctgctaaaagttgaccaatttgctgtcatagatgagcctcggtttgcagaaaaattgagtctcaaagcattgatcttgattaacaatcaccaattgtggttcttcagcgagggctcatgatgaattctcatatctgtttccattcctgagagctggccaagaaacatgcagcacaaagttggcaggatcagcaggcaacctgtcaccatcatccggggatcttgcgcagttcaaccttcaagtgattcctagattatgttcaatcttcaaccgcggtgttgaagacaaaactagggaaaactgtcgtgatgtccctgtagtataagatggacaaaaaaataacaaagtaaataacgaggaatttaatgaagtcctgactggtatttttttcaaacaatttagcagtagtttccagacgagatttctctgcgcaacagtatatatttgacagaacttaatagtccagttcataaagctctcaagctcatatttaataccttagataaggcagtgtcatgttcttcaatagattaggatgccgcaatacgaattccttccattcttgttggtttatttttccatccctatcagcatcagcatcttcaaatgtctgaaatacagaaaaattgtagcaaaacttaaatccatgcagcaaaaagggcatgttcacataggacagagccgaggaaatgattgatcaccttatcaataatggcctcgagaagttcttctgacaatttcatatcagattccgacaaaatagcgataaccatttgcataacctgcaaaacagaccatgccgtcactaccagatttgtactagaacacaaataacatacttgttgcaaattaatacagagtgccttgatgaactaacctcctcacgctcaataaacccagtttgtctcaagtcatacaacctaaatgcaactaaaacaatccaaagggaggccttattgtaaatatacctcgatacatgaatttaagaaggtagtgtctgaaagaagtgtacttacaatttatcttgtcttccaatggtgccaatggatggaagacgctaagagcatgaataaactcatcaaactctattacaccatttttcttttcatcaaataaatcaaaaacctgtatcagagagaatttctttcagtggttatacttataccctctgaaagtaacatgccatggaaataaactaacaattaaaaggagatcaatggaaaacatagtgcacaaagtggtaaatggtcaaataaaatttatagtactaaagagagcaaatgaagtaaacactcaccctatcaagaaaaagattctggccgcttggagtcttaaacaatgccagctggagctcttcctaaagaacaattcagcataggaactgttacgtatgacaaatccagcatagagagcatttcagattttatttgtctttctcaagtttttattaaaaaaaacattcactccaataaatcacgatgctcctgaaaatacaaattaaatggtttctgttgacttcgaatgtttgtattgcaaagatactacagtgttttcttaacgaaaaaacagccatgccatgccttccccttacccatcagcgttacagttgctcacatagtgtaccatgagaacgaacatgccaaccaaacaatctgagaaacaggaactattctatggtcaaattgcacatgggagccacccgacatgcaagctgtgacaaaaagtaaactagaggcaaaaaaaattctatgggttgtgaaaccaaaatacaataatgctccatgggtgacccactaatccattgcgtgcagtgcaacacctctggatcggtcgatctagtacacctagttgcaatttttttactgggtcaaattgcaacattgccttcttaaggccgactactaatcaatcgatcattcttttcgcctgacgaacccaattttcagagaccaagacaagaacagacatcgaagtgcagagcataacctctcaaaaaaaaaactattagtttattcgataatcaccgagaattcttgccacgaaagaacgtatcgaaagaaatttttgtcacatcaacctgatccaaaatgacaaattgacaggaacacaaaccttgtggatgagtccgtcgtcgatgatggagcagctgatcttcttgtagagctcgaacagcgcctccacctcgttcacggagacttgacccgatgcgatcgacaccaaacaccagatcagatcggaccacattgcgaaattggactcgagaagaagaagaaggcgatacaaacaatgggaggggggtgaggtgaaattagagattacagcatctggattcgtcggcgaggcgggcgagctggcggagggtgagggaggtgcagccgatgccgaccctgccacgctgctggtggttccatttcctggcgacggcggcgaggtaagaggaagcggcggaacggcggtggcgggaggcggcggcggacggcgggaggaggtcggcgaggcagtcggtgagcgcgaagaagacggcctcggcaatggcgacgaacggcaggaacgccgcgcacagccgctcccccaccgtcagcgagctcgccgactcctgcaaatccaaaatccaaaatccaatcaaacatagctccaagaaacggcagcgccgccggcgaccggcgacgaacaggtagctgagccaccgacccaccacgtcgtcgtcggagaagcggaagccgtagcccgactccatggatgcaagatcaatcacccgtgcgcttctctctcaccccgcctctccccatctctctatatacagaggagacaaactctttaaaagatgccgtctccgtccaaaaataagttcactattagtacctcctttcgtttatccaaaataaatttatttctttaaataattattatcatatcaaagtttataaaagtaagatgtaaatacaataaaataaataaaaataattatattaagatttaataaacgtactcttagtcttacttctatcccatcctctaacttcaaattataactttattgttttctattagcatactttttaaattgttacttctagatgataaaaaaaagtatataaaggtttctatcaaaagtaaagaaatctattttttaaatttataataatcaatactcgattagttatgttttaaatggattagtttcgtgtgccgtagaatcaaatctctaacttcatctatagattcttttattaggacgcgctaaatggaaaaaaaataaattattttgggggcggagagaatactgtgttgctgggtgcgcgttttgccggctagcgctgaaattctttggccggaggcggcgaggcgcttcgcgccgggacctaccgacgaatccatccaaaatttaggaaatggttaccggtaatgaactaatgttttatgtgatcagccgtacagctctggctccaaagtttttgcagctcggtatttttaactttagaaattataggtcaggattttaaattctagaaattatagatctagaaatacggagtatgattacatggataagtaaattattttgattatatttttaaataacacaaccactctaatttaactttgaaaagtctaaatccagcgcgagtgagttgtgatctggagttgtaccgaacacggtctaaggttatgcttggtttagattcaaaaacgattctaagttttggattaattatagcggatttacgtccccaatttcgctgttcaattttcttcttgcgatggttaacgagacaagtaaattttttttccttcttaaaatcatcttttctttaaactatttttcggaacgtaaaaagtttcgaattttaaaatcgttgcctgctgctttgcttggcaccggagtacgttattggaaagaatggttcgctttcaagtttaaagattcggttggcgtggatgaccatgaattcatgatggtctgtctcagctccgttcagtctctgtccctcaagtcctggaccgcacggagggcgaccccacgcagcgcacatcgccccatcaggttgtgcctttctacttgtcaataaatatattgtcaagtctataggagtatgttggacgttatccatccccgtcctggaaatatctcgcttaggatagtcccaacccatagtattcataagtaatgtttatagtaccatgtcaataagacattataatagaaactacactctacaacccatggtttcttaaagtgggctattaataaattgtcggctctcaaaactaacgattcggaaaccgacatgtttaactgtatcaagccctggatcagtagattgatacaggttcaacaatttagatcttcatcgcatacatttggtaaagactccaaaggagatatctttatataaaataataggacatttacaagtttgtggctaactattacagcagaggctatacgatgactcaactctgccgttttactatagaattaaaccatctaactacactagacttgaagattaggtttaaagggaactaacttatgtgattgaactcccagcttcggcaaaaactccaattaaactctgaaaaagaggggttgaagcaagggtgagtacaacgtactcagcaagctattatattaaccaataatgaatatatgaaatggtaatatctgtgtagagctaggtttacttgcagaaagctgagaataaagaggtagaaatcctgaaatgcttgatatgcaacagtatttaagaaaatcttgaattatatttctaaccaaagtaccatatgagtcccgatgctcaatccgtgagcacggctattcgaatagattcaaggatattcatattgcagtagatgtacgctttacccgcagtctacgacttgccaataatcattagcttagtcatggcctagtattaggttattaacaattgtggcacctgttccatgaactctagtccacatgcgctctgaatgtaatgttatcagcagcgagaggagttctggcgttcccggggtttttagagagaactggatgagagaccccatgtcatctcaaccaggttttcataaattcacacacacatcgcgcgataatcaagatatttacctgcgcctcggtaaatatcacatttgcccttcgcggcatatatttgcctccttcgcgaggacttatataagaaccactgtacagaggtaccacattgttaattaacataatatctaggtctgtccccattctagaagctgcgatcgtactcgttcgtttgacataagtacttggtaaacttatatcgaccgagacagtactagccacccggaaatcaaccaaatcttgcgtactgtcccaatctaagttcattatgttttatgcaatctaactaggcagggctaagcaaaagctagcatataactggtttgctatatgttcagattatgcattcaaaatcatgaatggctaatgcatagaatagagatatagaatataggataattatgctcaaggggaggaataataacttgccttgctccaacgcaaataaatccaagataggcaacctgattatacgattctcgaaataccataggttgccatccaaaagacaatagtctttactgagaaagaggaagaaccaaattcaataaaagccataaaataataagaaaacgataaacgactaagagggctagggtttaaggtataacctatctcttttatagggtatagggattatggggctagtatttgctagtggtaggttttggtagtataatagctagggtttagttatatgggagtcgactgtggagtaggacagtatctcggctaggctctatattttatgtggaggctctcgtggtttggacgataggaaatatactggatagttgatatggttaaataggcatgtggctaatatgggttaaggttggctttgatagaatagtggctaaggtttagttgtttaggccgatatcgaggtaggataaatatcggctagggttttgggtgtttgctagttgtcgctagagttggacagcatgacgactaggtttggtatcatttctagccgtgtcgatagacaacatatcggctagaagaataggaggtgggtgcaggtttagtggggcggaagtgttactccgacaaccgtgagtggcggcagagcggctaggatcacacagagctcaagagctaactgtgcggcgtgcaatggaggtcgaggggatagtgaagctccgaccgctgtacgcatcaaggcgtggggtggcaggagcagcacttcgaccttaggtttggtttttgccgggctttacaaccaacggtcgacgttgaggtccgtagaccgcgcaaacgtccccatggaaggcgtaaagttccaaccggcggctttttagtggctaacgggcattttggaaataaaagaaaatatttgaaaagcaaatataagtttaaattgtaaattcaattataagattaaatcaaatatttattcaaatggcatttgaataaattaaggaaattcaaataaaatcttaaaatagcaaatttgatatcaaaatgaagagttgaatttagatgaatttaggtccaagtttcactagaatcggatctacggtttaggagatatgtgcttctaaagaataggatttgaattaaatctagaaaatgagaaaagtcactgtgcaggggcccacctgtcagtctttctttttctttttcttctccttcttctttctcc

SEQ ID NO: 5032 - DNA, 6434 bp, Oryza sativa
ttactatagggcgaattcgagctcggtacccctccccgaaccgaagcccacaacgaagggcgtcgccgccaccaaatcgcgttcttcgtcgacggcggcgaagaggccgcttgacgacgaggacgacgatgatagcgtggacggccctagcgtcgacgtggatggatgtgggctgctgtacgctgactgtgccggcgagcaccgcacgtggtggccgtactcggcgtcgcagcccacacctccgtcgtcctatccctactgctgctcgccgtcgaggtcgctccccgccgttgatggcctcttcgccgcacctccattgccctcttgctcggggaagaagggcaaatgagtcattttttatgtcaactcacatgtttggatggcaaatgtgacgggagtgctataaatcacaagaaaattggtgtcctgtgcttctggtcgaaatagaaaatttgttgtgctattttttggtaccggattttttcctatgctatggatcgaattttctcataaggataaggattgaggcattgagcgacacgttcgtggataggaggatagcgacgccaggtcgatcggctcggcttgcggctcgatttggtacattataggtgctggttcttaaaaaaaccgatacctatagtatttgtaccggttttaactaatgaaccggcacctatacttcgtaaagatgtcggttcattatttttacatcatccggacataggaaaaggcctataggtgtcggttttaaatgaactgccacctatacggccagcacgtacgaaggttttttagtagtgggcaaaactctagatgcctctgagatgtacgtagtacactcttctatcctctatgacggagatgatattcttttcatgcacttcatcggattattacggtgcattatttgttccagtatcaaaaaatacgtttacaaaattattagaccacttattctaagttatttgtagtttacttttaaaaatatttaatttattgacataattaaatatgtagtaattagtagaataatctccttccaatatttgagcagtgtcgcttcattaaaaatcatgtgttttctctgacgaataggttctcacagtcacatcggactgccggagtaagaatgtactaggatctcaaaggtttcgtctcccgtaatactcctactactagtgcatgaaccctatcctcttatcacaattctaaatgatgagactttcttaatgattttgtgcatataacaggagtaggttgatatctgagtcaccttttgcatatcctattcgatttctacagacgcatcatatcttgcaggaatcctaattggcgcgtgcgcgccgcgctggcccacacggcccaataggcggcaagacacggttagttttttttccgaatttttccatatatatatgtaaactttcaactccgacttgaaagctttcaacttcgactgaaaactttcaattcatatttgaaaactttcaactcaaatttaaaaattttcaactcgagattcaaaaacttttaactcagattcgaaaactttcaacttgagatttgaaaactttcaactcgagatttgaaaactttcaagtacatatttgaaaatttttaagttaagatttgaaaaaaatatgaaaactttcgactcagatttaaaaacttttaactcgagatttgaaaaccttcgactccgattcgaaaactttcgactcgagattcgaaaactttcaactcgagatttgaatactttcaaatttatttgaatactttcaaatcatatttaaaaattttcaagttaagatttaaaaactttcaactcaaaacatttttttttaaaataagtgtgctaaaaattaaaaaaagtaatcaaaaaaaataaaaaaaaaccgaaaaaaatcgcaaaagaaaaataaaaaacaaatcgcgaaaaaaaaatgggatgatgggccttgggcccggagcaaccccctatatcttgtgtggttaatgaagaaagtaggagcaattctagtcttttaggtatcttccttaggagcttcaaatttttaatcatgatccatcttatacttagtccatatgcttaaggagtttctttagttttgcaccaatgcttttgtagaaagttttgcaacgcaagcaggatgacttcagtcgttgtcagaaactcagatctatcacaaatcgatgtgagtttcataaatgaatgacgcgcaagtggtgacattcatgattcattattttctttttaaaaaaaaactagtggtgacattcattaattgggattgtttatctctcttgtggagtcgtacgtattcacaaaagatctggattaagatcttattagtactactactgtgtaactgtaaactcatcagcttttccacctaccaaaaacagtagacaatgccgactgattgtttttctaaggagaaactatacaaatcctccaagaaaaagaaaatgttaaacactcactcgatccctagaatatatagagcatggattccttcatttgctttcttacctgcagtagacttatggtgttgataaaggccatctctccccggttacacaaagaacgacagtacgccagggaattttgtttaccaatccagggtgaaaattaagctatgacctctgtaggaaagatcctattcttagcgttttaggggtgacatggcacaaccccctagccaacttctaataaatgatgcaggttaattattgagttccaatgatctaggatgttggatatgtgaaggaaataaagtatacgcaaaaaagaacttttaataactgatctattcccttcgggttgataatacttgtcgttttagacaatggcacggtctaaaaaaacaactttgaccattattttttattataatatgtataaaagtgttaataaatatatgattttattaaaatactttttaagactaatctaagtcgtcatatttgaaacataaatattttaaaaataatttataattaaatattctaaattttgacctcacccttgtctaaaacgataagtattatcagttcggagggagtatgagttacaatataggggtgacccgaccatgtgcttttttttcttttttctttttttttttttgctctttttggtgagcgacaatcattgcggtcgcataagttgtggcggtgagctctcttcaatgatggaaggatgcttggaattttcttggcgttgatctctggggtgaaggccctaatatataggttatttggattcaacaacaccgatatttgtttgttgacttcatgttgaaggtatcatcttataccgatgaaaatttagcactgatattttagatcggctcagatgatatcaatggacaaactatgattacttcttgtatgcgttgttttggagtatagcctacaactctagtcttccgatcccttcattattgtaatatagcaaaatgtcacgagacagtatgatatgttcatgttgcctaagttttttgtttttttaaagaaaaactttcttttgctttttctttgtttggttgtgtgcatcctcgatgcagaggcaggatgttttcgttgaataatgaaatattccattacgtaaaaaataaaatttgatgcatgatagaaaaaaagaaatgtttgatttaaaataaagctaagaataaaacgttatttaaaacaaatcgagtattttaattccaaaatatgagagaaaatcggcgagtggcatagaagatgtcataaacagtggtaatcaacgtaaataaaacattaaaaaaatcgcttggatgtatacttctcatttgaaaatttcttttaattaacatcttgcatagtaaacacggaaaacagaacgatttattagcacgtgattaattaagtatttgctatttttaaaaaaaaatggattattttgatttttttaagcaactttcgtatagaaactttttttaaaaaaaacacaccatttagcagtttgaaaagcgtacgcgcggaaaacgagggagatgggttaggaaaaaggggttgcaaacacacccaaatttgtggtgaaaaggaacgaacagaaagggagatggggaaccgcagtcgagtagcactcgtagaaatacgggaaaaaaggtttgatggataagggcagtcccaaccctctatctaggatggtgtctatgacattaactatattgccatgtaggacttttatcttatgtggcactatattaattaagagagagagtgaagagaggaagaaactgggtctcatgcaagacacagcttcaacacgagaacttatgcactagacactatcaagttttgcattgggagataatagtgtcttgataatagatgaagaataaatatgattggtagagaagagagatgatgtactatctccgtctcaaaataagtgcagccatgagtttccgcgcccaactttgatagtccgtcttatttgaaatttttttataattagcatttctattgttataagatgataaaacatgaatagtactttactcgtgacttatgtttttaatttttttaaaaaaattttcaaataagacgaatggtcaaagttgaacgcggaaaaccatggctgcacttatttagggacggatggagtatttatgtaacattctgaaaatgtgtcattttctaatcttgcatcatgctgattcttatgttcttaataaccttctaaacctaggaaaatataattagagggacctcctaaaactaactcgcataaaacctctctggtatttaatcccttttgtgtttttcatttaaaaacatatttggtatttcttgttgaaattctattttcaaatattaaaccttctttcgactaaaactcttttattcaaatttagtttaaaaaccatttttattattatgaattatggtccaagaaatcctccaatttttgtccttgaacctagaccaaagtaattccaatctcattggaattaattgttagcccatcctttgatcttaaacccatcctttgattctcgatccaaatatccaaattcctccttttgatctagccaccaatttaatttatgtggcttgatttcctcttcggcacaagaattgtattattgcaatattgtgaataattgctcttgtgctaagaaaattccaatttatattcttcactcaacttccccttttagccacaaatatacataacaccaattttagagttcaaatcctatttattgccttcaactaattcccttctatattcccaaaaatattttgaggaatattattaatttccattcctatttgagtgcttccaaataaattccctcaaactccacctctaaatattgcactcaaataaattaggaaatctcttttgtgaattctttccaaattcaaattctttgcaaaacctagttatccaaatcaagtattcaaattaggcttctttctttttgtcatcgggccgaaactccattctttcttcctttttggcccaatcccttttcttttatcttctattttcctcctccttcttgagctgccggcccagctaagccgagccggcccaaaccagcccacaccccaaccgagccgccccctcctcctgtgcacggctcacgccggcgcaactcctcttccttcgccgctaaggaaacgaagccggccgccgtagttcgaatcttcacgccatcgtcgcccgtgcacttctcgatctcctccacaaccgcctttcaccaccgcctctctcccctataaatagccggccatccctccccttctctacatacaatcagagctccatctctctctctttctctcccatgtccggccatggccgccaccacccgatctccctcaccggagcttcgcaagccaaaccatcgcgccatcgagttcgcctcgacgaggtgattccatttttcctgtttcccccttctcccccaccccatagcaaccaccaccgccacctctctttgccgccgaagataagctcttctactcgccgttccggccatctccctcactctctccgccagccaccgcccaccccaggtgcgtcgttctcgggaacatgtgtggccgccgacgtcgccgcctttcgtccaccggagagccggcgcccactctctccctctcctgtgtagccggcaagaaaaagaagaagagaggaagaagatgacgggagaaagaagaaggagaagaaaaagaaaaagaaagactgacaggtgggcccctgcacagtgacttttctcattttctagatttaattcaaatcctattctttagaagcacatatctcctaaaccgtagatccgattctagtgaaacttggacctaaattcatctaaattcaactcttcattttgatatcaaatttgctattttaagattttatttgaatttccttaatttattcaaaagcc

SEQ ID NO: 5033 - DNA, 18044 bp, Oryza sativa
  unsure (1)..(18044): unsure at all n locations
ttttgaataagacgaacggtcaaacatgtttaaaaaatcaacgtcgtcaaatattagggaatgagggaatataatacacgtgaactagcaactacaactttacgagagactatgttgagcattagaatatatttagtagacctnacactaaacctccaaatagtttttgaggcaaaaggagaaaattcgaacactaagcccccaaatagtttttagggtgaaaggagaaaaatcgaagtccagcacggctcctattaaaaatcccaaaataagaagacaccaaattctctcccatagcccctaatcctgtgtttgaacatatgggttcgtaacccatttctcccacacgggaaacgacgtagctcattagcacatgattaattaagtattagcatttttttaaaataaattaatatgattgttgaaagtaacttttatatagaaaattttttggcaaaaatttataccgtttagcagttcggggatgtgtgcgcgtgaaaaatgagagaaagtagaagttagaaaaggggatgatcgaacgcacccttaggctgtgttcggctggctgagttcccagctgtgaacagtgcacaccaaaagcggagtggtccatcaacgtatgattaattaaatattagctatttttttaaaaaagtggatcaatatgatttttttaagtaactttcgtatagaaactttttgtaaaaaaacacaccgtttaatagtttgaaaagcgtgcgcgtggaaaacgagagtaaagggttagttcatttttcatttgcaaagtatctaggcttaaactctaatctatagtttgaaaagcgtgcgcgcggaaaacgagagagtaaaggggtacttcatttttcatttgcaaagtatctaggtttaaactctaatctctagccaaacacctgtccccacacatgtctagatcgttcgggatcctctatgaagatcgatctaaatgtgaaaaagcattaattttgaagcactgtggacacctttaaaacctttttttaaaaaaattcaccaccaacctatcatgtgataggaatttaagaaacaaataggagagtaattttagtatacaatcagtagaaaaaaccgtttctgaaatcttggtctggcaaaactcatcaatattatgctggtagtattattttggtgctaggtgaggctagctagtgcatcgtttcaagtggcgtacaagttagactgagccgctaggactctatgccaatattagtgaggaagagcctacaaatcggacgcccgtttttttaagaaaatcggacgcttttttactagttgggaaaaatgtttcaccgagtaaatagaaaatgttttaatctattgagatggtgaaacacatttgaacttatgactgaaacattttggtggaacatataaaacatcaagttttgctctattgaaataccaagaaatccatattggcaaaggacaaagttatggaacaccataaaaactcattgcaacatttcaattcaacataaaagaacattaagttatattgactgaaacataaaaaaaaaatcaagtcgagatcggggaggatatagttgttgatgccgcgtcgaactcatctacgtcggccacaaactgtgcgctcactgtcctctacgccgcgccgagctcgaccgcatccacgtggccgccgtcgtccactccgtggacctcggccaccgttgttgacgccgcagagctcggccgcatccgtgtgtccaccgtcatcattgacgttgggctgagctcggttgcgtccctatggccaccgtgctactgagctcctattctctgccacgagctcggccatcagcatggcggtggtcgcagagagcacgtccccaagcacggccacctacgacttgagctctaatcgcaagagaagcaggcaatcctcctccttgttttcaccggccagcggcgaggtagcaagagcagcctctcgctcccccgacgatgaggggaggtagaggcacatgtgtggggtgtgtggagagagaagatgggatagagagaaaagagaatgagggaatagataagaagtgggtggggagtaactgccctatatttagtgtgtgcatcggtcacccggataggatcattttcgtattagtgatgctgaaatgttatacctcaatggcaataggagtgaaaacggggtggatatttcccgcccgcccgaccgacccaaggcttgcgggaggaatatgagagagaaaatgggatatccgatattatccgagtttgaacccgaatccataaaaaaatatgggttatgatacgtgaatagttatatccgcccatatgttccatattatgaaacatatgtgaaaatctattataagttcacctataaacatgataaaagattagttaatcactatttttatgagctcacatgtaatattatataatttgttccttgatgtatcttttttagcactttaattgtcttcttacattaaatatccatgaattggacataaaaaaacccgttcccgaatccgattcaaaaaaagttatcggacactacccgtacttgattttgaatttaaaataaaatatgagttaggatatggaaatgttgtgatccgaccttacccaccccgtcttcacccctatatggcaataccctcggaaacctgagccgaggtccattcctgcattactagtatcctgagctgtctatttgcaaaaacaagaatacaacacatgggccataatgtaaaaggtcctgcataggcgggcgcgcaataaagccgagcgtcatttcctcgtcctctcctctgtcctccgttccaccacgcttttctctgcttccttctcttctcttctcttctcttcccttctccatcgttccaaaaccactcgccccgtaaaaccccctcaaacctccctcccgcggcggcgcaatcgcgttcatggcggccgccaccgccgccgccgccgccgagctggagcggcgggtgatggcggcggtgaaggcgtccgcggcgcgcggcgaccccccgctcctgcaggccgccgaggccgcgcgctgcgcccgggaggcctcctcctccatctccgtcgatggcggggccggggccgcgctcgccgcggcgctggtgtccaacctgtgcttcgcgcacaacacgggcgcgatgtggaaggtgctggaccaggccatggcgtcccgcctcgtctccccgctcctcgccctcgcgctgctcaccccgaggtcccgagcaagccctcgtttcgccccctaatccaccgccgaatagttcgattccgtgcgggttttgagacctcgggttgagattaatcagattgtgttgggggggaatttctgcagggtggtgcccaaccggcaggcgcagccggaggcatacaggctctacctcgagctgctcggccagtacacggtcgccccggtctgcacggagagcgtggagacgaaggccatgtaagcaccgattgctccatactacagtctcaattgcttgcttcacattggtttgtctcgtgctctggatttgttgatgacatggacatatgcccctatccccacacaaacttatgggcgtgctacaaacctttgaattggtcaacgtgcttgcgagattccgtccaaatccgcggtgtgctcgtgttgctgatgttgatgctattattttccgggttgtagggtagggctgatggtttgagagggatcgcttgcgctgcgccagtggggcctgtgtagagggagaaattttgttaggttgaaaacgatgtgaatttcctagttgtgtgccgtcttggttttgaaagttcaaagttgatagcacaaggccagaggggcactcctttttggtgcactgtggttttgaagacttccaaagtgctcccatggtccaattgtctgattggactgtagtacgagataaaaggatgcatagggcaggataccaccaatgacctttttttttcaatccaaacctgtttggacaactgcagcccatgattacatgatctttgtgcacctgtccacattgtgatctttaccaaggttgtttggacattcgtgaaagatattcatatggatggttacttctttcaccctgttgtggaaacgtggacatatcctctttgttatcaggctaacatagtttatttatataatagtagtagaacaatcaaattaatgtagctgactagctgacatatgcatggctggacagctggctgtgatgagtatgacagccaacagttatgtacagtgatttgtcatgtgtacgcctggactacatgctgtcatgaacgtatgcacaacagtagtcaacagcacccacatgagattcaggatgctagttttaaagtacaacctttgtgcttttttttttgtcatttaggacattaacacgatctccaatgcacatgtattttcattgttcttttcctagttatgtatttataaaaaaagttggtagtgtaactagatgaaagtaattttgaggacaaatatagtaatatcatttttacatatcaaattataatatgttcaataattaaataaaatatacgcagacgcagccaacgtgtaatactatgcatgtagtagcagaacctactgtaaaattcaagtggaattttgattcaagttcttattttcacataataccacatatgctgttaatagtgtgtgggataaaggccatctgctatttctcatgtgctgctattttacactgtcatgcggttctcctcccctcccctcccctcccctcattcatccgtcattggtgatggctagagatggcaacggggacccataacccgagacccgatgggtttttactctattaggaggcaaatgtgttccaaataatgtacccatgggtctcttatcgggcataaacttcacccatcgggtgggccgggtcgtagaacgttctttacccacccgaacccattaacccgtgggtaaaaaatacccataggcctcagcccaaaagaacatgtgcagcccaaggcccaacaacaaatttaaccctaggtataaaagcctcccacccacttcctctccctcactccccctctctacacccatctcacctgtagggtgcccagccggccgccggccgctgcccgcgccacctgtgccgccgcacaccgagaccgcgctcgccctcgcttcccacgctgccgcatgccacccgcgtcgccgcacgccatccccgcgccgccgcacgcagtacacacccgcgcgccgccatcccgtggctggggaagctagccgtcacgcgaacgccgctcgcccgcgccgcgtgcacgaaggctatggccgacgcccgatgcagtccacccactagccgggggccgaggcaggtggctagctaggttaggtattagggatttttgccggggtcgaggcgtcgagcaaagccgagctgccgagttgatttgttatattatatcactgtttgaattatcagttgatttgttgattctgcaatgtgggctgtgcaatgtggctgcatggtttgtgtgtgtgctttttaatcctaatttgtaaataaaactttgctatggtgttgcactgctgattgactggatggattgtgtgctcaatctgattgctccaatgggtatgggtacccaatgggtacccgtcacccgtgcgggtgtgggtatgggggaatttttcacccgtgagcgggtgtgggtaatgaagcgggagcatttcatttcaatgggtgtgggtatggggtaggcgaacccgatgggtacgcacccgttgccatctctagtgatggcgcctccgtgatcctctgtaccacgccccgccggacctccaccaagcttcccctacgagctagagaatgagaggatgagggaaaaaaggtggggactggggaggaaggactccagcaatgacatgtggggccgcagaggtagaaagagagaggaaagagaagagagagatgggagaactgacctgtggggtcaggggtattggatgtttcacgctgtttctctccattatttagccagaaatgaatattctaatagacgcggtgtccagcagcaaatatccatgttttgggagtgctttccccgaaagattaacttctgcagtgttcaccagctaaaattgcaaagtcgtgatgtcctataccaaaatttgccaatctttactgccagtctaaataaagactactacagttggacttcagactctcagagaacggcttgtttattcatctttgctaccatgaatgctgctactgaatactcttttgtgtcaagccagccctaaactcatctaaccaatcatattaacaaacaatacgccatgtggaagggttcatgggggtaaacaatgccatgaaccatagtaaaaaatgccgcaccagccaccgaaccatctgagctcctggtttgctggtgtaacggtccgactgctgggtcagccattcagctgcaggaccagaaacacttatgtcatgtgtacatatccttcattggtcacaccatgcgggttggctagctggagggtttgactcccatatcacctctttttgcacaaatatttggagtaatatgtatatgagccttactaggtagactattgggcctaataaaggtccatgtcttggttagcctgcacacgaaccaccagtttctgtcaataactgcccggttcatctggtcctcacttggtcaattgcatgaatggtccttcaagtaagctgaacagctgagggcgctggttccgcgttttgtactatgacatgaacccctgcacatgaaacactattttagtcatgtatgtttgatatattgtataatatattatacttggaaagcgaaattcatgtgatgatagtctgactgtcatgctttgatatcccttatgtgcaaaaatcctgaatccttcagatgctgtgagatatgatacaagtgtgtttggtattaagtctttaagaccaaagtagatgaataccatagggaactaacatggcaatgaaacaatcatgacattgaagaagatttggttattcctataatcgtattgcatattccttaaactcaagctcaaaatagtacaaggggttgacactttccgacaaccctcttggaccttttgtaccctcgcgtaattgttttacacaagaatccactcatgtgctctaaattgcttctacttgctttggatgagtccctgcggcttgttcatggcttgggttgtttattgccatcccccttttatatacaagttcactagtcatcttccaaacagaagtagaaatcataatcttgttagtgttcgtcctaatcgggtaggatacaagtcacacacctttcaacactggcatactccatttagatccttgtccatacttaaatgtgtacgtataatgcgttatgcaaagcaggcatgtctcctcaagtgcatatctaatggtccagcgcttcatctaatttgtgttatttcatatgtgatcttatctgcatctggtgctgctttcatgtcatcaggataggagcatctgtttttctagctacttcattactaagtactccctccgtcccactcactaaggcgcacgcacacttttaaattcaactctttaaatatttgaccaataaatattttattataaattaaattttatttgatgaaaataataacattggattatcatttagatttacttttatatgattatgatttagttgctacaaacattgtagtatatgagaaatttaaagtcaaagattagtttagtgagtgggatggagggagcactcaacgagaaaaagaaacatatttttagtttatttaattaattatcagaactgttggattctgtaaaatgttcctaattatcttcatttcccattgcaggttagtcaaatctattgatgatgctttgcatctttcagatagctatgggtttcagagagtggattttggacatacagttattttgtttgtgttaagcgttatcaaaatattgactgactgtatattggaagattgtggtttgccaactattgatggtgatggacatgacatttcatatgctattggagcagaaaaaagtatgaacatagatggcaagggaagctcatttgataggaaagatgagcaccgtgaatgtctgaggaggaagaacacaattatgactttagaagtagttgagaagatcactgctaacaaaaatactcaagtttttctccgtctagtctatcgtaacacgtatgcagctgcatccttgtttcttaatctttattgcctaagaaaaaaagattaaataaaatcttatatatccatccgaactctctatcaattttttcatgatatgatgcagttttgttttacttgagtttttagcttttattatttgaatatacttaggtatacaatttaaatctttcatcattatatcatatgttaattttgtggcagaaactgcttagttagaaaatccactcaaatcttttatcatgtaatactgttttcaaatttaccatttttcaccttgtctgattctgatatcagttttagtgattcagcttcatttgagacatagattcattaaacaactggttttcttgccatcacattgaaaccgcttgatgtgcaaatgcaaacgtgaagttttttaacataaaagtgtatgatattttggcagatattatgcagtaagatttcatatttcacagccattgacagatctaataaatccgttctgacttagacatttagttgatgctgctggctgcagcaaaacattcattctggattttagataatttcctcatggtttgaaagttgtcactgttttaagttttgatcaaattctagataactgtagattaagggttcaacatctttagatctagacttcttatctgaagatttcttattaggttggtttcatgatctcatctagtttctgcagtccaaaggtgaagttaatccgtgttatagataaaagaatagttttactttaggtttttagggctgtaaatagtctgatggtctgatctccacaatggtcagaatcagaccaggttaattggggctagatagttcactccgaaacagaggccagaccaccagtatcaccgaaaaaacttatcttttgagttgggatgactctatacttcaaagttgggtttttatttcagttgtcatttcactcatatataattgctgtgcgtttagctgtttcaatcctacatggaagctggaataattaaaagtttcacttaactggcatccacactgactggaaaccctttttttatggatgtgctagggtagacctgaaaatttcaatattttgctccagaggcttcagcttattggtgctctgaagtcaaagaattttggaactgcacataatctgctaggcagcttgatgatgaatatacgaaaagttgttactacaggacatcaattacacaaaggcaatctattgggaagtattgtgagtacaaagccttgcagttctgctgcacgcagtgtctttgggcgctgaaagagctcttgttggataccttttgacatgtttatggagaacacaatggacggaagacatcttgataccatatcatcaattgaagctctgacaggttctaatatatttttcagttgttgattcaactgctgtataaccttttttatcaacttgaaacctttggttggcacagaacttgctaagacacttcaagttcttaatcgagcaacctggcaagaaacctttcaagctctgtggatttcagctttacggcttatacaacgagttaagataacttttgaaacatcatttttttctttattaacagatgaggaagctagaatgttcgtttaatgtaattttgtatctgtttactaggatcgtggcattccagaagggccatttcctcatcttcattctcgattgtgcatgttattggctattgtacctctgtctattgcttccattcttaaggaagagtctgacaagattgaaggtggaatggtctctgttagaagaggagaattattgtcttcacttcaagttctagggcaattttttggtcttctttctcctccaccagcagtagtgcagtcagcaaatattgcagctaggaaagcattagttgctttatctgttttgaaggatcggaatgagagaggtcacaattattccaaagatatctcctctattaaagcaggttatctcagactgattttacaatatctagtatttttcttatgcatttcttattagtaaacaattcattttctctcataatcattctaaaattgcagcgggaaatatgctacatcttattgtggaagcttgtatagcaaggaatttagttgatacatctgtttatttctggcctagctatgttgttccagttaaagacgcatctgctgttgaggaatccccttggtcagccttaatggaagggtcaccccttatgggccttaaggatgcacttatggttacacctgcttcgaggtgatgagtcatggacttgtaaaattcaattccttaagagcattttgggttttttaatgtttgctcactagcttgattaatggtaccgttcctacttgattattttagcctagcagagttggagaaattgcaaccttttgcagtaagtgggtcagatgaggaaaagttggcggcgtctaagattctgtgtggagcatcccttcttcgtggctggaacattcaggtagaattctgtgtggagcacaaatagaacgagtggcacatacaaaatgctcttgttctattttacaatctttggcctgaaaagttccgtatagtatgtgtcattattgactattactgcctttgaaaatgatttaatgtggctttcctgtgctcttttaggaacatgttatccaaatggtgcttaagttgctgtctacattgctccccctagactctggatcagatgggttctatatacatcacatgcctatgctgcatgctctcatatctgggatttcttcaattgatgtggttcatattctctctatgtatggcttggtaaggaaatcgatgtttttcataaagacaatgaattgctaaatttcagagttgcattttaaattattaaagcaaatatcaatatgctggattttatataatttacaaacttttcaggttccagaactagctgccattctaatgcctttatgcgaaatatttggatcattaccttcgtctgaccataggaattgtagttttgaagaggcctctgtgtactccgtattctcatgtgctttcctgtgtcttcttcgcttgtggaaatttcatagaccccctgtggagtatgcactatcaaaacatggagtctttgtttgctcagagatcagtttggattttctcctgctactacgaaacagtcattttgctttgaatagtccgtatgatgttagcagaaagagcatatttcaactagatccatcgtttcaaaaaccggtgtatattgactcatttccaaagctacgggcatggtactttcagaatcaggcttgcatagcctctactctttctagttcttacaaaaggaaaagtatccttcaagtagccaataagatactgaaaattgtctgccataaaatgtcaaaaagtggcatccctcctgtcagttcccaatcaacatcaagttccagtatgagtggttcatctctaggcacacaagatgatgtctcccaagggccgccagctactgcatgggaagtgctggaagctgttccttttgtgcttgagactgttttagctgcctgcgcacatgggaggctttcgtctcgtgatttgattacaggtttttattcagtatcctgcattttacttgcatatctaacactggtcttcaatttacactaacaagctaaatcttccatttacatttaagtagtgttgttcagaaactaataatatctttttgatgaagtttcttaattccctcaagttcatactccctcctccgtcccaaaatatagcaaccagtactacatatgacatgtccccctgtccagatccttagtagcagcatgtgtcgcatctagtactacggtgttatattttgggatggagggagtagtatttagttctagttctgtcctgtaagttatcccagttactttccactgtgaaagattgaatcaaatgccttcagtaacaaaatttctttgagcttttattatcatcaatttaactcaagtgcaatagtactactttcataaatgtcatcctgaatttaaaattgcttacgtgtattcaatattcatatattatgtaatttaatttgcaaaaatatttctgtctatggatatacttctcctgtcccaaaataaatggatctctcgcattccaaggaaactttagtagggagggtaaaacactaaaatgcccctcgatgagaaattagtattagtgggtgggtaggtaaggagtattgaagggatacgatttcttgatttgtggaccaagggtaggtaagagcctactccattccaaaatataaacatgtctaggattcaaaaagtgtaccacaacataagcatttttaggatactgattccagtgcatggatatcaaagcattttcaatcatcaggagcttgggaagggaatctaagcaattcaaaatttgaccaatgaggtgattgaaaagaaatcttttccctcaaccttaatctttgccaaacaacttattttgggacaaattttgaactctagaaatcaatttattttgggatgagtacctttgaatatttcagttctcaatgagactatcacctaatatttaggtggtatacataaaaaagttggctttagactttcatttcctgtctttttttttattttcaattaatcaactcgatcatgcatgaaaatattttccttttcctctaagtggtctaaatattttatcagattactgggtttttaagtgtacaggatgaaatggaatgtcatagtttaatatgacctcataaacatttaaaggtaattttaccttgtaagatggtgtcccaggctgatttttgttttcacattttaactcattgagagctgccatggagttgattaaaaatgagagtaactttggtcagaattggaaagaagggattgcacagggtgacaaatgggagatgagattctccatttgccccatttaagctctagttgagtagcctagaactctagataacttcagggtggccaattttggtgtttgagcagtcaacgtagaaacttgtttgtaaaaccaccttttgggagcagtggcggagtccgcatcgtcatcaagcccaggtgtcaaagagcatttcctggttgctggctacttcttataggtgtttctggtagttgatagtgatgacgccagctgcagagctcaggtggacacttgatcagcctgggagctggctgcaccactgcttgggggttaaagatcctgttaagtggactttggtcttgtacttcaaagtttagggcaactcgtctggttgtagttcttagagttatgtaggatctactaagtctatggcactatggacgttttccctctatgtagcattatataaaaagctcaccttccagctatctgcaaattgttttcgtttatcgaaattgacagacatcaactgtatttttcacttcccattgtcattgcatatttactggtgcataccgttacactcttacaggcttgaggaatcttgcggacttcttgcctgcttcagttgctgttatcgtcagctacttttcggcagaaattactcgtggcttatggaagccagttatgctgaatgggactgactggcccagtcctgctgcaacgcttttagcagttgagtccgatattgaggaggctcttgcatccgctggtgttcatattaacatctctccacgaatacgtaagtttatgtctttctatacaaatgattcatttctgtttgctactacaagctaccgttgtttctattttttatttcatttccagtggccttataagttgttgacctcagtatttgatgtttgaacattgttttatgcattcactctgggttctgtggagcaaaatttaagctatcctccctccattattataagtcactttgggtttgtccggagtcaaaccttttcaagtttgaccaagtttatagaaaaatataccagcatctacgacaccaaattagttttattaaatccatcattggatagatttttatagtatatttattatgttggaaattttttgttatatttttctataaaattggtcaaacttaaagagatttgacttaggacaaacccaaagtgacttataatatgaaacggagggagtacatcatgagatatatttgttataaacttataatggtaggtgtgaatgttgtacatgtatacattaaatagctgctttaaattataattagtgatctagcatttaatctgcatacagaagtagtaaatgtactgtgataaacttataatgggcacccaactctggcgacacccaagccagcgactaaatcaggattgtgtgaggattatcttcaagttggttttatcaggattattagattggttcactacttcactgttagttaatgagttccaagagtttagcttcatttgtaggattgatgcctctcctataaagggacttggccagataatgaagagataagcaagaatttagtccactctgttttcttcttcctccaccactgcactgggatgatgaggtgcagaacgccctcatcctcctgtcatccatggctatagacttcaatcgactccacagaacccactagctgaagaccatgacaccactaaagatccgtagtgggatacctacgatatccccaactctcttttaaagagtaagaaattgcataaattttattttaggatctactcctacctttactttagtaattaaaaaacttggcttttaaaaggacagaaacacatttcttattaaattaggttgctaataacacaggagtagtggtggttccatggttgtatgtcacaggtatatactgctgttatcatattatcctctttaatgttggtacgtttactcattcatgtcaaataggggctttacaggcgatagtaaatcatttatttgtcttcatttgtgagctatgccattgaaaatttatcttgaatttaagaagactttccttgtaagctctttaaatgtaagcttcttatactataactgttgcttgtcactcaatcatacaggtccaccaatcccaatgcttccattaccaatagcaactcttatcagcttatcaataactgttaagatggaggaatttaatcacttacaaggaattattgacaaaggagtggaaatttgtgctacatcaagttcatggcctagcatggcaatcataggggcattctgggcacaaaaagttcggcggtggcatgattatatcatccagtcatgttcagagacaccatttaccagagataaaaatgcagttgctcaactaatcaggagttgcttctcatctttccttgggcctttggttgatgggcgttcttgctttgtagctgacagaggagtgaataggctgctggggcaggctcaccaagaaagaagtccccggttttctttatcgccaggattactttacacacgatgctgccgaatgtttcctgacaactattttgtatgtgaagagattttgaaggttgtcattgagagagctcgtgcattagcaaatgaatgtgactctagtagacctcatcttctgaagtctggtcggatgacactatcttctgccacatgttctgtagagcagatagcatcacttgcagcatctatgctttgtcatgctggtggaataaagttggttcgtcttctgtatgagcagattctgccaacaatgctgctttcagctggtgaagcaaggctgggttctgctggaccagtgtgcagtagtttcgaaggatttgctttggcatatgttctccttgtttctggggccagcacctggggagtaggagaaacctccccagtttatacttccgtatacacatcgaagaggcaacgggttgtagataggcacttggagtttgtcgccaatgtaatgcagggtaacattgagcttggctgtggccaggtcacttggagaacctatgttatatgttttgtgggcttgctggtcgactttgcgccaacatggatccctgaggtgaagctcgagacgctgaagaagctggcgtctgggctttggaaatggcacgagtgcgatcttgccctctctttgctcgagcgagggggtccaaaggccatatctacagtggttgaatacatcctatgatatgcccgtgccaaattggtgctctaatttgccatgtacttatgctctcttgctccagtacaggcatacacatcttacacctgatctgacgtgcagagacccccatcagagaagcatatgttctagtagatggcttgctctgaactagatagaagtctatactacagaaaggatatccagcagttaggtgtttacactttacagtacatttacaggtcagttcttattctggtcttgctgatcacagtgcatgtgtacataattcgtggaatcttctcttggtcgcaatttatattcacaaatgtaattcaaatgtcttagataggatgacatggtgtaaatgatcaagcatagctgccactccaatgacatggtgtaaatgatctttccggctcaattggagatcagattatttttttggttttgctctttcttcaaaggaaccgagaccaagtcttccaagcctgtttcgaccatagcattggtgacagactacagaaaagagaagttacatttacatatagtccactgtattactgttcatatgatcaatgtacaatctggtaagtacagtagtgactcgctctctagaacatctggaaccaacaaacctgtcatgctattgagcatacaacggtttttttttttctaaaaacagtcgaggcgaagcttgaaaattttccctataccttcaccggctatctcaacggagcaggagagagacgtgacaagtgtctttttgctggtagattttgcatgtacagctaacaacacggcagcgcaatgaagtgaataggtactagttgagtcgttagtcagaactcagaacccattgatttccggtcccagacgaggagattcttgacagcgagagaacaagaaaggcttcgcgaacattatttgcaatcggtcggaacacactagtggtcaatgtagtgttgatcaacggagcacctttcgcgtttaattccagtaactaagaagtctacataaaaattttgcccccactttgtatataactaagaagtctacatatgtatttttataaatattgtttaatataattaccttgaaaaaaaatcacatgtacgaggtaagaaaaaagtagatgaacgggtaaaggtagcgagctaacaggtgtacatatgtatttagcaggtgtacatatgtatttatgtatctttcatgtaatatcatgaccagtaaccggtaacagtatagatcatggtgtggagttaagcaaatagcgcgtgagttaggggtttatcttgcgtgcctagaatgaattgaggcctgcaagcctagtgtgcgtgtggcgtgtggcctattagctcatttcagaacatgttaaatattcaccgggtggctccactgtagccactctggcaaatgaaatgaaacacaatccccaactctgctctcactctctctctctcacgttctctgcttcctcctccgatcaatctccctccctccaaccgaatctcgttggcgacaatctcatcggcgggggtgtgttacagtggtatcaaagactagttgtgggtgtcgctgtgcatctcatttttgttgccgattttccatgatgcccgccaagctcccgctccattaaaacaaggccggaattgatggaatccaagcttctggagaagttggaggtcatcactatt

SEQ ID NO: 5034 - DNA, 13054 bp, Oryza sativa
ctcttgtctccttgtctcatttacctgttgcatttacatttgtgcaatttacatttctagagacatactagagatcatttcaccctaggattgctaaacattgacataggagtgtgatttactttcctagagatataattgagccactatcaccctaggtttgcaaaacataaccgagttgcttagttagagttgaccctcaccaagcctagcaacttaggttagttttgattaggtgtcatttagttttaaatcgcctattcaccccccctctagtcgacatctcgatcctacaagtggtatcagagcttggtctctcttgattgagcttcaccgcctagagagaagatgtcgaacgaggtgaaccatgtagggaaggctcccatgtttaatggcacaaactactctacttggaaaattaaaatgtctactcacctcaaagctatgagcttccatatttagagtattgtggatgtaggctttgctatcaccggcacacccttgacggagattgatcaccgcaacctccaactcaatgcccaagcatgaatgccttgttcaactctttgagccaagaggagtttgatagagtgagcaaccttgagaccgcatatgagatttggaacaagttggcggagatccatgagggcacaagcgagtacaagaatgccaagcttcattttctcaagatctaatatgagacattctccatgttgcctcatgagagcgtgaatgacatgtatgggaggctcaatgttattgtgaatgatctcaaggggcttggggcaaactacaccgattttgaggttgcccaaaagatgcttagggctctaccggagaattatgagacccttttcaccatgctcatcaactccgacatgtcaaggatgacacccgcaagcctcttggggaagatcaacaccaatgacatgtacaagttgaagaagaaggagatggaggaagcctcaccttccaagaagtgcattgctctccaagccgaagttgaagacaagggcaagggcaaggtgaatgaagccaataaggacttggaggaagagattgcccatcttgctagaaggttcaatgatctcttgggaaggagaaaggagagaggaaggggctccaactcaaataggagaagaaatagaagacccaacaagactttctccaacttgaggtgctttgagtgtggtgagaagggacactttgcttccaagtgcccttccaaggatgatgatggagacaagtcatccaagaagaagagtggaggctacaagctcatgaagaagctcaagaaggaaggcaagaagattgaggccttcatcggggaatgggactcaaatgaggagagctccgcctcatccgggtccgaggaagaaggtggtgatgatgtaaagctccaagaacaagaagatggccgttgttgccatcaaggaggctccacactctttgctcaagggctcctctaaggtaacatctcttagtgatagtgagggtgatgatgattgtgatgatgtttcctatgatgagtttgtgagtatgtttgaggagctccaagcttataatgagaaggagattgtcaagttcaaggctctaaagaaggatcatgcttctttggatgtcttgtatgaggagctaaagacctctcatgagagactcaccatttctcatgagaagcttaaggaagctcatgacaacctcctttccactactcaacatggagctcacattgatgttggcatatcttgtgatttgcttgatgatagtgctacttgccatattgctcatgttgcatcatctagcattcctacctcttgtgatgatcttgtggatatgcctagctctagctctagctcttgtgtttctatttgcgatgcctcacttgttgttgagaataatgagcttaaggagcaagtggctaatgagacaagagtttggagaggtgcttcaagggtaagaacactcttgacaagattttgagtgaacaacggtgcatccttaacaaggagggacttggattcattccaaagaagggtaagaaaccttctcaccgtgccactcgttttgtcaagagcaatggtaagtattgctccaagtgtcgtgaggttgggcatttggtgagtgatttccccgatggtaagccttctaagacatgcatgtttgattctcattatatgcttaggaaggctcatgatggtagcattgttgctagatatgtgggttcccctatactcagtggtaaaaagaatgccatttgggtgcccaaagctttggtctctaacctccaaggacccaaacaagtttggatacctaaaagagcttgatcttcttttgtaggtgaactaccgcaccggtgggagccattgggtgcttgatagtggatgcactcaacacatgaccggtgatagggctatgttcaccacatttgaagtaggagggaatgaacaagagaaagtgacttttggagacaatagcaaaggaaaggtaattgggttaggtaaaattgctatctccaattatttgtcaattgataatgtctctcttgttaaatctctaaatttcaatttgctttcggttgctcaaatttgtgatcttggcttgtcatgtgctttcttccctcaagaggtgattgtttctagccttcttgacaagtcttgtgtgttcaagggttttcgatatggaaatctttatttggttgatttcaattctagtgaagcaaatttgaaaacttgtttagttgtaaaaacttcattgggttggctttggcataggaggctagctcatgttagcatgaatcaattgagtaaactttcaaaacgtgatctagttgtgggcttgaaagatgtgaagtttgagaaagataagctttgtagtgcttgtcaagccggcaagcaagttgcatgttctcatcctactaagagtatcatgtccacatctagaccattggagcttttgcatatggatttgtttggcccaacaacctataagagcattggtggtaatagtcattgtcttgtgattgttgatgattattctcgctatacttgggtgttcttttttgcatgacaagtctattgttgccgagcttttcaaaaagtttgcaaaaagggcccaaaatgaatttaattgcactcttgtgaaaattagaagtgacaatggttccgagtttaagaataccaatatcgaggactattgtgatgatcttggtattaaacacgaactttccgctacctactcaccccaacaaaatggtgtagtggagaggaaaaatcgtacattgattgagatggcaaggactatgcttgatgaatatggtgtttccgattccttttgggcggaagccataaacaccgcttgctatgcaaccaataggctttatttgcatcatctcttgaaaaagacttcctatgagctaattgttgggaggaagccaaatgttgcctattttcgagtttttggttgcaagtgttatatttatcgaaagggtgttagactaaccaaatttgcaagtcggtgtgatgaagggtttcttctaggttatgcctcaaatagtaaggcataccgggtctacaacaagaacaaaggtattgtggaagaaaccgccaatgttcattttgatgagactaatggctcccaagaggggcacgagaatttggatgatgtaggtgatgaaggcttgatgagagctatgaagaacatgtctattagagatgtcaagcctattaaagtggaagacaaaccatccaccttcactcaagatgagccatctacttccgctacgccaagtcaagctcaagttgaagtggaggaggagaaggcacaagatccacctatgccacaaaggatacacaccgctctttccaaggatcacccaattgaccaagtgttgggtgacattagtaagggtgttcaaactcgatctcgtgtcgcttcgatttgtgaatattactcgtttgtttcttgccttgagccaaaacatgtagatgaagctctttgtgattcggattggataaatgctatgcatgaagagctcaacaactttgcaagaaacaaggtgtggacattggttaaaagacctagagatcacaatgtcatagggagaaagtgggtctttaggaacaaacaagatgagaacgggttggtggtgtgaaacaatgcaaggttggtggcacaaggtttcacacaagttgaaggtttggacttcggtgaaacttttgcccccgtggcaagacttgaggctattcgcatccttcttgcatttgcatcatgctttgatataaaactatttcaaatggatgtgaaaagtgcttttctaaatggtgaaattgccgaacttgtctttgttgaacaacctcccggttttgaagatcctaaaaatcctaaccatgtttataaactctcaaaagctctttatggtttaaaacaagctcctagggcttggtatgaaagattgaaagattttcttttgtcaaaggatttcaaaattggaaaagttgacaccacccttttcacaaaaatcattggtgatgatttctttgtgtgtcaaatttatgttgatgacatcatatttggttttactaatgaggtattttgcaagtaatttggtgatttgatgtctaggggatttgagatgtccatgattggagagttgagcttcttccttggacttcaaatcaagcaactcaaggatgggacgttcgtgagccaaaccaagtacatcaaggatctactcaagaggtttggcttggaggatgcgaaacccatcaagacacctatggcaaccaacgggcatctcgaccttgatgagggaggtaaaccggtagatttaaagctttatcgttccatgattggtagcttgctttaccttaccgcatctaggccggatatcatgtttagtgtttgcatgtgtgcacggtttcaagccgctcctaaggagtgtcacttagtggccgtgaaaaggattctaagatatttaaagcatttctctactattggcttgtggtacccaaaaggtgctaaatttaagcttgttggctattccgactcggattatgccggttgcaaagtggatagaaagagcacatccgttagttgccaaatgcttggtatatcccttgtgtcatggtcatccaagaaacaaaactccgttgccctctctaccgccgaggcggaatatgtttcggcgggtagttgttgtgcccaattgctttggatgaaacaaacattgttgaactatgccatatccttcaccaaaaccccattcctatgtgacaatgatagtgtcataaagatagccaataacccggtccaacattctagaaccaagcatattgacatttgtcatcatttcctaagagaccatgttgccaagtgtgacatagtcattagccacataagaaccgaggatcaactagccgacatatttaccaagcctcttgatgaaacccgcttttgcaagttgagaaatgagttaaatgtcatagatttctctaatgtggcttgagatggtgcaccatggttgcttcttttgcattgtgtatatttgctctcattcgcacttatgctttggatttattgccatttggttcttcattgcagaaatggagcatgtcacattaagggggagttttgcactcttgcatgtgctctacttccttttatatgtgagcaaatcaactatagtggtgctagtagtattttcaaaatgtccaagtcaacataagtcaaaacttttgtaaaataaatgtaatttgaaaactatctcttggaaaatgtttcaaaagttttcctatatgttttccaagcctcacattgcaagaaaaatgatttttgaatgaaaatgccattttggccctcttttgaagaaactagattcttagttttggccaaaatgagatttatccccaaaatgagattgagaaggaatttgagaaaattttcaaaacaaagttggtagagaagaagatttgaaatgtttttggtattcaaacctattttaaaaaccaaatcattcaaaagttatttgaaaaccaatttggcccaaaaacccctatagaccataaaaggtcacctcatagcacttaagtgagttttgttgcaaatcatcataatcttcaaatattgtggatggttagcaatatttaaactcacacatttcaaaaattgctccaaaaatcaaatttttgttgaattttattgtgtgggggttgccggcttgtgcaagggctgtgcacagccggcagggggcctggcagtctgaccggcgctatatgcgcggtctgaccggccaggtgcggcggtctgaccggccacatagggccggtctgaccggccgaggtgggcccaggcagttttgccccttttcttctccatcccacacctaccctctcccatctcatccccattcacccccaacccgaaaaactctctctctctctcacctcccctcaaaccctaactctttcctccaccaaatcccctcagtttgaccgcagatttctctccggttacaccgtaagtgattctcctccgcttcctctctctattccatggattggtttgtgtttttgttgagtttttgattcatggcatggaaccctaggtgaagcacgaggtgttcttcgatttgcaccaatagagggtagtttcttggtgtgattcaactccttcaaccggtaaatcactctccctcttgtgcattcactcaaatcgatctatttcaacctctagggttaagggtagtttcctcttttgttccaatcttgatgaaatatgtccaaccctttgatattcatgttccaatcctatgctatattgttccagcaaattttagactcaaatgtgtagatgtgaaaattttttggatgcttgaacttgtgggaggaggtctgcccggagccacaggcggtctgaccgtgggtcagccgccggtctgactggcgtgtgcgccctgtctgaccggccagcagcctcggtctaaccggccaccagtgagcggtctgaccggccaccatgggcggtatgaccggccaccatgggcggtttgaccggcctgatgctgtcggtctgaccgccctactggctgcggtctgaccatccctccactggatataggcaaattttcacctctccaaattgtttctagaattattgctaatatcctatcatcctttgctttttgacagtgatgcctccccgcactcgccatggttgtcgtgcgcccactctggatcccatgagtgagcctgaggaatcgagcggagaggattacgctcaaagtgatgaagaggttgaggccaatgttgagggggctagtgaggaggcaagtggagatgatgtcagtggaagtggagaggatgaggatgaacaaagtgatgagatgaacattgatccctccatccagtttgtggtgaacatgaggaatccatcgcagtataccatcttaaggcatcatgatcagttcttgaggcctcgggacaccccggatccccattttcacaccgctttccagaagactgtgtatgagcaggtttatgcagggaaaacatttgtagagcataagtggatttcttggagagacatcaatgagactccagagtttgagagcttgcatgatctcttcaagactgttggcattgaccggattgtgaccctcaagcaagactacaatgaagatttgatccggcagtactatgctacagtgtgggtggctggagactagagtgagatgaagtggatgtccgacaccctccagtgttctatctctcgaaggcaattccggcagctcctcaacattcgcttggactttggagatgatttgcatgaggagcacactcacaatccgctctccatagactatctctctcagttctatgaagatggagtgcggtacacacatgggaaggttgccggcttgaggactatccccagtgtggttaaaaggattatgagagccactatcctccctcgccttggcaacaatgatgacattaggggggtggcttggcacgtcatcgatgcaatcattcagggccgtcagttcgacattgtgtctctcatgatgcaagagattgctatcttcaagaggacattcactcagggaatctattatgccccttacatcatgaggttgattcaagacaagcttggggctgctgggcaaaatttgaagaagcacaagcagtacaagccccgccttcagcctagagctccccgtgctcctaggacggtgccctcttctcaccctggagctagctcaagcccagcacctcctcctcctcatgggtatgatccaaatgcttctttcatcctcactatgcttactttggaatgcaacccaatgaatacttcaacccggtacttggggctattaataccttaagtgaaagcattcaacgcttgtctaccaggcatgaagcattgcatgaggatgttcgtggcttgcgcaccgatgttggagacttgaatgcttccatggggagattgcacactagagtgggtgcattggattctcgagtccaaatgttggagagcacccaagcttttgtatatcatcgtcgtcgtgatactcctaatccttcctctttggcgcttcctccttctcctccacaagaattaagacctttttggtacttgatgccaaaagggagagaaaaatgtccttaggtgtgctttatgtattgtgggttgggactaatggtagtgaggttagtgtcctcatatctaataggttaaggtggtttgagctatattatgtatgggtatgggctgttactctatattgtgtgttctttatcgttttgttgaactctatgtcatttggacccttcgtggtcttgtaatagcctatgtttatttgtgagcccttttaggatgatttgtgacttatgtgagttgaatggttaagtgatgtgaacttgtgcaatgatggatggtgtatgtgatactgatatatatatgaccatcttatgctcatggatgaatatttcttgaagttcacattgagatattgctcttgtgtttgtgatatgttgaattgtgaaattgaaatgtgcattggctccatatttgccatttgtgattgttatgcacatgtttagggggagcttttgatttcctttacagtatatgtccatgtgttctatgtttgattatatatattcgtggtgtttgttatcaattaccaaaaaggggcagattgaagcatctaggccctcgttgttaattttggtaattaatgacaagcgctaattgtggactaaccgttgctattgagatatattttaagttaggtccacgtcatgtgtgcgcatggatgactatcgatggattaaaatttgatggcgcgaagcgaagaaaagaaaacggtaaaactagtgctttagttttaaaattagtcgaggtgaagggcgatcaaatttgttagtttatttttttgtttcgccgtactatcaagggggtaatgacctagcaatgagatgatttttaattgacacattaggtcattatgcatttagacttgtgctcatatttcatctcacacacacaatcttttttgttttcactgggttcggcatgaccaggggcagtcagaccggccacatagtggtggtctgaccggcgtgccctggccggtctgatcggccacgaaacggcggtcagaccggccctctagaggctgggatggtgctgctcggggtggtcaatacagagccgacggagccgtattcggtcagaccgagctgatggcggtctgaccggccactcaacgtcggtctgaccggccaggccgatggggccctctgacagggttacaacggctagttttctagccgttgcagagtagcacggtctgaccggccacatacctccggtcagaccggcagagcacagagctgggggatttcgcccccaacggctagttttggttggtgggagtataaatactccccttccagcagcaagggggctctcttggcacccaattcaattgcatacaccccttgcacctctctcacacacctttgagcttagtgttcatccattgtagtggttgagattgttctagacaagagtcaagtacatttgcttctatttgtagagctagtgtggcacttgatttatcatctccatgccgggtcattgcttgttactcttggaggttgccgcctcctagacggcttgtggaggagttgcccggtgacctctctaagaagattgtggaggaggcccggcgccggtttgtgagtggttttgagttcaccaccttcggagtgaaggaagaactaccctagtggccgaggcttgggtagtcctctccgtgggcctgctcccgtcttgcccaccccttgacgaagggggcgtgcggtggcttcgtggttgagcggtggagttgggctcgcctcaacggggagtaggaaactggcgagtttccgaacctcggtgaaaaatctcttgtctccttgtctcatttacttgttgcatttatatttgtgcaatttacatttctagagacatactagagatcatttcaccctaggattgctaaacattgacataggagtgtgatttactttcctagagatataattgagccactatcaccctaggtttgcaaaacataacttagttgcttagttagagttgaccctcactaagcctagcaacttaagttagttttgattaggtgtcatttagttttaaatcccctattcaccccccctctagtcgacatcttgatcctacagtagtgcatgcagcctacaagagattgtaatatagtatcgttgttgactgatatgtttaaaattaagctagtgtgctcaggtctgcacaagtacaaacaactgctagcgtggatatgtctcactatgattatttagtactacacattagatcaattttgcatgtgtgttgttttgtactaggttcgtataaattagacaagctattgtattaaaacgagcaatttacaagttgttatacctatttacactcgccgagcaagtttatgtaccttatttttatcgatgaaacatttttttgcacgacgcatgaaacatcgttcgaaacaacacacagccaaacgtcctccgtcggatgagccggacggtggatatgggctaaagtcacaccgcaactagacagcggacccgccggatcctaaaaccctacgcctcccgccgctggccacccacggccacagccgccacacccaaccttccgccgccgtcgccagccagccagccatggggagccggctgggtcgccgcgtgatccacttcgccaacctccccctcaagctcatgctccctcccgcgccgctctcctccgtccaggagttcgccgtcaagaccgtcccctccgcctccaaggtcgacatccgccgctgcctcgagtccatgtacggcttctccgtcgccgaggtccgcaccctcaacatggagggcaagaagctgcgccggggccccttcctcgccgccaagcccgactacaagaaggcctacgtcaccctccgcgccccgctccccgtctcccccgacctcttccccattgggcttgtcctcggcgagagggagcgcaaggccagcgccgccgccgccaggaggaaggcggtggagggcgccgaggtggaaggggagggcaaggggaagcactggatggaggatgagaaggtgggcttctccagggccggccgcggcaaggtggtgtacggcaaccccgggaggctggggaagaagaggaatggaggtaccaaggtgaaagacagagccggagaggaagtggggaagttcccatggagcgggacgcgtcttgctaccgagaagaaacctgctaggtgaggcgttcggttcaatctacctttcttgattaactgatgtttcaactcttagcaaattaattgtagttttgttcatgtggaattgattagtactacagtttctaacctttattaatgttcaagaacggtcttttggctttgttgaagcctgagtagaatagtagaagaaaccaggatgatgcggtccaactcttagcaagttagttatttttttgttcatgtggaattgattagtttctaatctgtgttactgctaaagaacggtcttttggctttcttgaagccttggagtagaacagtagaagaaaccgtgataatatggtccaaatcttagcaagttactattgttttgttcatgtggaattgattagtttctgtgttactgctaaagaacggtcttttggctttcttgaatcctaggagtagaacagtagaagaaaccaggatgatatagtagtatcagtgccaaatttttgtgtttgttgctgggggaaattgcatattgttgtaatcatactaaacgagcgatacagatggtgatctagaaatgatattttagatgtacactagccaagtgccgtttgttgcaaggaaagcacaattttctgaaatgtggagacttgctcttactatacagtatcttgagaaatatataaattaacatcctattagtgttaccatcagaaatttatcccgttttagttcaaggtgttctggtgcaaaatgcattttgcatgtcacctcattgctgcttcaaggttcctctaaaagaggatttaaaagcattgcaaattaaaatttgtataacttgaaaataattgattatttgaaaccatgcacagaatgactgttcatcatctcaaccattggtcatctttcttactttctgatgtatcgatgacatcgaaaagcagcagagttatacacataatttccaattttcctttaactactctcttataggttgcacaaccatccctctattggagttagctaaatgctaccaatatcttctctatgccttttctgtgcaaacttttaatccttaatttctaaatcccaagtcacattattgaaaagttgcacttgttaatagtataatacagcagtacaaatgttcattcaaagctaaccattcatgcatatttcaaagattcaatcctgagaagaaagggaaaaccataccgttcataaccatacttttatttagaaacc

SEQ ID NO: 5035 - DNA, 20784 bp, Oryza sativa
agaaagtcttacaatatgaaacagagggagtattgaataacaataatagttttatttttattccagagatatcatactgaattattttttatttattttgtatttttcatgtatcaacaatcttatagagatgtttttatgcttttgatagcatttggcaattccaaaaatcccatgtcagactttttttgcaagttcaaaaaatgattcatgatcattcttcacattcagtcggtgaactgataatcaattgttctttcatggattattaaaacacttaactaatggtagactgattcccttttgtacaatttgctgtgcaaataattgttgaattaccgagttgctcctatgactttttcactgtgccaaaaatgattttgtgagcacctgcgggtgctggtcctcttgaagatggcaacgctatttgtcgatctggccaaattcaaggtgggtctaactgaatgcagaccatactatctctaaaagtgcctttgagcctatagtaagccaacttataataacttatattaaatttggaatgacagtgttttctttttgtgggtttattggcccgagtgaaatctagccagatcaaggccatgtgtgattttggtttctaaataaaagtaatggttatgaacggtatggttttccctttcttctcaggattgaatctttgaaatatgcatgaatggttagctttgaatgaacatttgtactgctgtattatactattaacaagtgcaacttttcaataatgtgacttgggatttagaaattaaggattaaaagtttgcacagaaaaggcatagagaagatattggtagcatttagctaactccaatagagggatggttgtgcaacctataagagagtagttaaaggaaaattggaaattatgtgtataactctgctgcttttcgatgtcatcgatacatcagaaagtaagaaagatgaccaatggttgagatgatgaacagtcattctgtgcatggtttcaaataatcaattattttcaagttatacaaattttaatttgcaatgcttttaaatcctcttttagaggaaccttgaagcagcaatgaggtgacatgcaaaatgcattttgcaccagaacaccttgaactaaaacgggataaatttctgatggtaacactaataggatgttaatttatatatttctcaagatactgtatagtaagagcaagtctccacatttcagaaaattgtgctttccttgcaacaaacggcacttggctagtgtacatctaaaatatcatttctagatcaccatctgtatcgctcgtttagtatgattacaacaatatgcaatttcccccagcaacaaacacaaaaatttggcactgatactactatatcatcctggtttcttctactgttctactcctaggattcaagaaagccaaaagaccgttctttagcagtaacacagaaactaatcaattccacatgaacaaaacaatagtaacttgctaagatttggaccatattatcacggtttcttctactgttctactccaaggcttcaagaaagccaaaagaccgttctttagcagtaacacagattagaaactaatcaattccacatgaacaaaaaaataactaacttgctaagagttggaccgcatcatcctggtttcttctactattctactcaggcttcaacaaagccaaaagaccgttcttgaacattaataaaggttagaaactgtagtactaatcaattccacatgaacaaaactacaattaatttgctaagagttgaaacatcagttaatcaagaaaggtagattgaaccgaacgcctcacctagcaggtttcttctcggtagcaagacgcgtcccgctccatgggaacttccccacttcctctccggctctgtctttcaccttggtacctccattcctcttcttccccagcctcccggggttgccgtacaccaccttgccgcggccggccctggagaagcccaccttctcatcctccatccagtgcttccccttgccctccccttccacctcggcgccctccaccgccttcctcctggcggcggcggcgctggccttgcgctccctctcgccgaggacaagcccaatggggaagaggtcgggggagacggggagcggggcgcggagggtgacgtaggccttcttgtagtcgggcttggcggcgaggaaggggccccggcgcagcttcttgccctccatgttgagggtgcggacctcggcgacggagaagccgtacatggactcgaggcagcggcggatgtcgaccttggaggcggaggggacggtcttgacggcgaactcctgtacggaggagagcggcgcgggagggagcatgagcttgagggggaggttggcgaagtggatcacgcggcgacccagccggctccccatggctggctggctggcgacggcggcgggaggttgggtgtgccgcctgtggccgtgggtggccagcggcgggaggcgtagggttttaggatccggcgggtccgctgtctagttgcggtgtgactttagcccatatccaccgtccggctcatccgacggaggacgtttggctgtgtgttgtttcgaacgatgtttcatgcgtcgtgcaaaaaaatgtttcatcgataaaaataaggtacataaacttgctcggcgagtgtaaataggtataacaacttgtaaattgctcgttttaatacaatagcttgtctagtttatacgaacctagtacaaaacaacacacatgcaaaattgatctaatgtgtagtactaaataatcatagtgagacatatccacgctagcagttgtttgtacttgtgcagacctgagcacactagcttaattttaaacatatcagtcaacaacgatactatattacaatctcttgtaggctgcatgcactactgtaggatcaagatgtcgactagaggggggtgaataggggatttaaaactaaatgacacctaatcaaaactaacttaagttgctaggcttagtgagggtcaactctaactaagcaactaagttatgttttgcaaacctagggtgatagtggctcaattatatctctaggaaagtaaatcacactcctatgtcaatgtttagcaatcctagggtgaaatgatctctagtatgtctctagaaatgtaaattgcacaaatataaatacaacaagtaaatgagacaaggagacaagagatttttcaccgaggttcggaaactcgccagtttcctactccccgttgaggcgagcccaactccaccgctcaaccacgaagccaccgcacgcccccttcgtcaagggatgggcaaggcgggagccggcccacggagaggactacccaagcctcggtcactagggtagttcttccttcactccgaaggtggtgaactcaaaaccactcacaaaccggcgccgggcctcctccacaatcttcttagagagatcaccgggcaactcctccacaagccgtctaggaggcggcaacctccaagagtaacaagcaatgacccggcgtggagatgatcaatcaagtgccacactagctctacaaatggaagcaaatgtacttgactcttgtctagagcaatctcaaccactacaatggatgaacactaagctcaaaggtgtgtgagagaggtgcaaggggtgtatgcaattgaattgggtgccaagagagccctcttgctgctggaaggggagtatttatactcccaccaaccaaaactagccgttgggggcgaaatcccccagctctgtgctctgccggtctgaccggaggtatgtggccggtcagaccgtgctactctgcaacggctagaaaactagccgttgtagccctgtcagagggccccatcggcctggccggtcagaccgacgttgagtggccggtcagttcggcctcggctcggtcagaccgccatcagctcggtctgaccgaatacggctccgtcggctctgtatcggccaccccgagcagcaccatcccggcctccagggggccggtctgaccgcgcatgtgccgccggtcagaccgccgtttcgtggccggtcagactagccagggcacgccggtcagaccgccactatgtggccgatctgaccgcccctggtcaggccgaacccagtgaaaaaaaaagattgtgtgtgtgagatgaaatgtgagcacaagtctaaatgcataatgacctagtgtggcaattaaaatcatctcattgctaggtcattaccccccttgatagtaaggcgaaactaaaaaataaactagcaaatttgatcgcccttcacctcgatcaattttaaaactaaagcactagttttaccgttttcttttcttcgcttcacgtcatcaaattttaatccatcgatagtcatccatgcgcacacatgacgtggacctaacttaaaatatatctcaatagcaacggttagtccacaattagctcttgtcattaattaccaaaattaacaacgggggactagatgcttcaactactagagtacggattatatttttcaaaacaaaacaactactagtgcgcaaaggtgttagctggatgcatcacattagatcaattttacttgtttggattattttggcccatgttcacacaaattagtcaagttattgtaccaaaatgagcaatttacgagttgttatacctatttgcacccacatcataagttcatgtatcatgagtgcaatttactcaaatatattatatgttcatacgatttcttttacgtttcgtcagttaaaactcacggcttgtttgggaactcgagagaagaggattgggagtttacatgagggaattgatgatgagattaagatgaaaatttgatttctaatctcaatatcttatttgatagaggtggtggaaattgataaagagtttagttaaagattaggtcattaatgaaaatggatagttgacatttgtttaggcaaagtaaagaagaaattaccaccccctaccctgatattagaaaagagggagttcattcctcaattcccctccccatcccaccaaaattttcatgtcactcaactatacaaaatagttaataatcttatccctctaatctcctaatccctcttaaaaactgcccccaactaaacgggccgtcaatgttttgtagtggatatccatattatagttagtattttttaaaatattgcatttctgtaaaacatttcacaaagtggactgaaatattttgatcaagtgatgaaataattttctgtaagtggtacaacactgttttgaacatatatcttttatcaaaatgtaatcgtgtgtgatcttgttgttaaaatttaactaaaagaaatttaattgtgcaattagatttagaataaaaaataatttaaagtttactaatatgtgcataggaggagagagctcgtaagagatggcttttacgttagttgtatacatggagatatgtcagacatgtgtgactgagtctgggagtgatgcagctagtgcatgcgctatggagacaaaagggagtaggcatcaaaaatttacattaacgaacgtccgatacatggttgtgcccatgctaatgttatggttgcggccaggggcaaatccaacgtggggtgctggggggctttgagtcccctaccctcgttggatcccaatggagagaaggtgaggggaagggggaagaagaggaagatgaaaaggagtagggggactgaaaggatgaaggagaatatgagccctccctccccccctcgaaatagatctatactagggatgaaaatggtcggaaacggtcggaaaaaccctctaccatttccattttcattttattttctcgaaaatggaatcggaacggtatactcagaaacggtaacgatatcggtaatgtcggtatatcgaaaacggaaccgtcggaacgggaatctaccgatgtctgtcggaagtcaaaaattcatgtcggaaatagcaaatcgtggtatcatcccacatttaactatgtatgaagatgaccttataatttcacccttgcatgatcatgctgccacaccccacacaacaccgttatatgatgattaataagttgacaataaggtcgacaaacaatataaacaaagttcaatgatacttcaacatcaatgtggctaaagcatacaatgtggcttacatgataggattactgcataactaatattgtccgactttttttaggatatagatttgaagtcttcgagaacactgaacaccaagctcacaagctggcatggcttcagctgatcagctccttgtcaaacatcattcatcatttcatcatcaattgacatagctacatcgtcgtcctacagtggcacattgcataagaacttttatgttgacactgtataactaccattggaattaagtttcacgctagcaaagaaatgaaatttgtacttacctcaataaccaatttgtttgccataagctcagcaagctcaagatcaaccacaattgactgaatggcaacacgatctgaaaaaaaacaaatagaaatatattagtaaaatagttattgattgttgcacataaataaaatgtctaaactgttgtaattcttacctcttcttactccagctatccaatctttagtacaaatcaatgcttgtgccatttcagaatcaagacgactgcaatatggatcaacgacacggccaccagcgctaaaggccgattcagaagcaactgttgaggcttgcatagccagcacatcacgagcaagtaaggagagaacatgataagtatctttctggttcttccaccaagctaaaatatcaaatgtactttcatttgctttagtaaccttcaaagtttcttctgacaggtacttctccaaatcatttacttttgaagaagtgttatgtgtttcagcacgatatagatacttatcaagtgcactaacaaactcagttggatcttgatttgcatctggtgtatcaataggttcaaatgcattatgatttctaggaggtgcagcagaagcatagcagtcatacatgttccggatgatattgagaaattcagtaaccttaattggatgcatatcctagtgtatgaactccatgcaaaattgtactattctcatcttgaatctaggatcaagaaagcttgccacagcaagagcagtgttagacttattccaatatttgtcaaacttagcaagcatagcagttgccatccttctaatagtaatatcagaatccttgcccttactccaatcagtaagtataatcttaatgtcacagaatcctttgtaaaacaagtttgctgtaggatataaagtaccagagaaaagctcagtaagatcaaagaatcttttcaagaatgcgcgaattttcattgctttctcccactctgcagctgaagggcacattttctcatacctgcgccgatcataggatgtaagcctgtcaaaagcagccctataatagatagcatctgccaacatgagataggttgagttccaccttgtagaaacatcatttaatagtcctttggttgtgtccaacccactttcagaagcacacttcattaactcctcccactgcaacggagagccctttacagcattgacaaaggatttaattttctcaattgttgattcaatttcttgcaaaccatctttagcaaccaaattcagtatgtggcaggcacatctaaaatgaaaaaacaggccaatacatactaagggactgtgcttcttaagttcagaaattatatccttaacagcaacaaattatatccttaacagcaacatcatttgcagatgcattgtccaaagtcaaagaaaacattttcttctcaacaaaccatctcagcatacttgtagtaaaaccctcagatagtctaacaccagtatgacgtccttccacatgggaaaaggtgacaattcttttctgaatacaccaatcatcatcaacccaatgcagtgtgatgcacatatatcctttgttttgattggatgtccacatatccatggtcgcactaatgcggcatttcacagttttgagatattcatacaacttatccctttcctgcatatagatgctcaatatttcttttctaactgttacacgggatttcaatggaaagttagggcgcaacgatgtaatgaaatcacgaaaatattcatgcccaaccatattgaaagggtactcatgcatgattattgccacatataacttcctcaagctagcttcctcatcatacttgtaaggttcaacaacgttgatgcccttctcttggtccttctgagctttgagttgttgctgccctttgacaacactgtgatgtaatttcagatggctccaaaatccgcttgttccagtggcactctcacatctacctttgtaagtgcaattcttgaatttgcaatgtgcccactcctgtttatagatcttaccattctcatctatactcactttttccttgttgaagtactgccagacttctgatgtcaattttttccttttcacaggacgctcatcattgtcatcaaccctattaacatcagcatcaatctcaattgtttgtgaggtacctgtggcaatggttggaggtaccgctgattcaggtgtagatgatgatgcagtcacacccacatgatgacttccactggcacttccagatgcagcagattgagattttaaaaaaatgaggaagtgattaacgattaacacaaggctcaagctatacatctaaaaaaaacatgctcaaggattaagctgtacatctacagaaatcgtgcttgcacacatcaacagaaaatcatgctaaaaaacatcaaggctcaggcattcatctatacatgtaaaaaaatcatgctcaagcattcaagctatacgcctatacggctatacctggtggtggtggtggtggacctagcaaacacaacggtggcgaactcaatgttcctctgtctctgttgttgccgtcggatggatccagaagggtgcggcgttttcctccggcaggtgccatcttgcttctccggcaagggacgcggcgaggcgcgaggatgcgacggctaggactagcaagcggcggtgtggcggcgtggacacgtggttgcggcggtggcggtcaccggaggtagaggcggcacagagctgtgcgacagtgtgagacagcgagagtcgcgagacagggagagtatgagaaggataagtgacacgccggctgacgccctagggtttttcttcccagcctaaatgcctaatgggctgctcctgctccagctatacaggcccagccggcttccttctttagaagtttgtcgaaaatttgacggaaattaccgataaaaatggttaccgacaaaacggtcggaaaaaagcccatatcatttctactaccattttcggaagagattactgttttcatttccgataccgacaattactgataccgactgaaacagtcggtgcaaaccggaaacggtagccggaattctcggatatttctgtgccgttttcacccctaatctatacgatagttgattccttagttctacttaaacaaggggatatctgaaggtataaatacaaggccccctagaaagagagggacgaaatgaaggcatatctacataaatccaatgtagaagccacaaaaaccgacatgagggatttagagctaccttcaatctcgccgagttcatattagaggaagaagactacactagccatcaaccacatgtgagagctccatgccgctaggccgatagggattagattaggtcatcccatattctgtactcgtgagatattaatatacaaaggcaacattggctttgcccaacaggaacagggctattacccatcaagtagtgggtccgaacctatataaaaatccatgtctaatgtcttttttacctcaatctcacgtataccctaacaccaacgatcaccattctctttgaataccataggcgggcatagtctgtcagcaataacttgtatgtaactaacaaataatggcgggtatccgatttgctagcagctttgcactgaaaaatctcaaggtcgtgcgcttgaatcctcttgcctgcgcaataaatctagcaaaaaccatttgataaacctggctaacatgcataaattgcatatgatgtatctaatacattttgttttattttccacatattcgttttggaggaattttaaaaaatttaaatttctaaagattaattcctataaatgctgttcggttcataaaaatgttgacatagaaaaaccaaaagaaaaattcctttcctacaagttgtacagaaaaactataggaaggttttcatccactcaaacctcttgaaaattttctatgggttgaagtgtgcatacattgttgatctttttttttctccaattcctttggaacgacttggcccttgctagccaagtcactttgacaccttgacccgattcaaacaagggttaattggatacatgccattaaaaatttgctggttttaaaatataccactagtattcatgtatttgaaaatatgccattgtaatttcacacatattcaaaagataccactacttacctcttggatgcatttccagaaaaaaaatagaccaaactgccccttttcccttcttcttctttcttcccctttctccttcctcctctcttccttctcagcggcgcgttggcggcagcagcagcagatgcggcgcggcgacgacagcagcagcagtagcagcatcgatgcggtggtgcggcgacgagcggcggcagcagcagcggcgtggcacagcagcagtggcggccgcggcggcagcagctgcaacaaaaggcggcacggcgacgagtggtggcagtagcagtagcaacatcgacgcggcggcgcggcgacgagcggtggtagcagcaacagcggaaccagttggccatggcgctctcggcgttcggcagcgtcgccgcggggctcgtggcagtgccggtcactgtgttcggcactggcatcgacgaagccgtgctcgccaaatcattcaagaccgatgtgcccacaatccagaagctcaaggtgaacctgagtacctgactccacccaacaagccctaattaagcacgcttgctaatcttctctcgccattgtcgagtggctgcagtagtagggccacggcggcagcaatgagctgtagcgacggtgagcggcggcatcgcgagcagcattaggagtggtggggatggaatgagcggcgcagcgaggggaaagagttgaggggtagaaaatggggaagagagagaggtagaagatgagagcattttcattcaatacatgcaaaatacgtatctcagtgacaccactaagatttcaaacaagtagcagtggtatcgttacaaatatagacaaatagtaatgttatatttcaaaactgctaaaattttaatggcatggatctaattaacccttcaaacaatgccccttttcccaacccctttctctcgttttccgcgcgcatgtttttcaaactgttaaacggtgcatttttttaaaaaaaagtttctatacgaaagtagcttaaaaaataaattaatctttttttaaaaaaaattagctaatacttaataaatcacacgttaggccatgtttagttccaaaataattcttcaaagttccaactttttcatcacattaaaactttcctacacacataaacttctaacttttatgtcatatggttccaatttcaaccaaactaccaattttggtgtgaactaaacacggttattgccccgttttccaggctcaagcagaaccagcgaacacaccgtccttttcttacagaaaaagcctgcaaaactgcaacaaagtagtcctccaactccaatccattaatctcaaccgcatgtaaaagcacattcaaaggtcaaaatatgacaggttgctttacatcacgtcagtttagcctttaatttaacgttatctgttcttccattcccattaatccgccatcaatatggagcttttcgttaatcaactccaaagctaccatctcgtccgtccgatcggtacggcgatcatcgtccaccactagatcgatcagtgaggcagagacctctcaatctctcgcgtccctctcgctctcttcccgctattcttctcgtccagatctggacgtcggagcaccgcccaccgctcgtccccaccgcggccggtgcctcgccggcggccggctcgcccgcactgcctctaggtcgtaggagcactgccagctcgccagtgcggccgaagagcggcacgcactgccccctcgcttctcccctcctgccctctccgcgcacccgacatcgccgccccccacccaccacagcctccacggccgcccaaatgtcggacggtgaggagaagagggagatcgccgtctggttcctctccaacgcccccgccggcgagatccactacgtcgccaaaggcaatccccccaacccctcttcctgaccctcgcaatccaagctgtacagccccgtgtgtttcgttgtttgattcctcttcggcgtgggcgcgcagatgtgcgagcgctgctgggggacgaggcggtgtacgaggccgccgcggcggaggccttcccggagcacaacaaggcgcacctcgtggccctcgagctccctgaccgcagcggtgatgtgagcactgggccatctcctctccttgccgacttttgccgtcgcgtgttctcacgtgctcgaaattgagtgtgttctatctactgtagggttgtgcttgttgtagctcgtaaatcagcggttaagacttagcaaatctggcttttaggtagtgattaataaatcacttgtggctattgtgtttgttactttacttttattaaattcagtaagctattggtgtttctcattggtatgtttatgagcatgagactataggatgatgccttaacactcgagggtgggtgcttgctggccagacattaaaacaatgtgtcctcgcgcgcagataattatcacaacttatggggagcttgacaagaacaattatctggatcctaggactgctcaagttgctacagtggaccatattaaacaggtaatgctgcagactttacatctgcttatcctggatttagttcttaagccagctatgcatatttaacatagaatcttttaaagtaagagaacatatataactactaaacaatggatggtcatcttaacttatggtctatgaactatatgaagcagtttcacgtctgtaatttaatatgcacagtatcttgagcttgatggtttgactattcttattcatttgatgaatattaattgagaaatggatccaatcacaggatattgatactgaactatctttcttgaagaacatgttacattgaatatagtccacatagattagtattgtaactgaactctgcatgtaaaagtttgatcccacaagtttctactttttttatttacagtgttaactgaggaataaattatgaccataattatgaattttctggacatagattaagttacctattttcaatggaatagcatagatgtaggtaaaagagcttttcattatacctcaaatagtacatccagcagcagctgtattaagcttcagtaactagtattacaggtttctgcccaatccattttgtattaacttgtgttacctctagacaatggctttcattctctaacaccgggttagattgagatgtttggttaagtatttgtttttgaaatgtctatagttttctttgttcatttgaaacatgatgtgtctgctttaatttaagtcaccatgttttttgttttacatgttaaaagaaatgtacaaaattgaggccagctgctgatgaggagcttccttcagcatacattgaagatttcaggtaccataattatgctattcttttccccaaatttcttgaactccacattgccttgctagtcaatttatgttctgcaccttttgttatgggtgcaggagtgccctggatgttgaattatccaaatatgttggtgaagcttatccaaaaggggtgtgtgctgtttattgtaccagcggaaaagatatagagggaccaggagttgattttcgttttgcagcagttatttctgctgctaaacgcagcccacaaaacttttggtatgttgtctgagtctgcattttctctgttgttacagatacttgcctagttttctctaatcttgaacttgtttatatgtccattttgtgtatctcttctatacattttagatccttattgaggtttctagaaaattttggcattcctatgagaagctatttcatattcaacttctggatcataggtttgcacatctgtgagtgtttaattctttattttccctttgaactaatcatgtgttttgtgggtaccctctttatcatcttcccacaatattatggtgtctttagtttttatgcagaaaagtttagaattgtgctttggctgaatccttgcttcacataatctgttactagagtcgcttaagtcctctcgtcatagtttgacatttcattatttattcactgatggagacaactttgtattgagtcatccagcaacggcaattggcgctcaatttggactctggaattcatagatggattacagcttgtcgaaattaaagggaaaatacaggtttgcttttacttagctagcgctaaaacatggttaattattgttattgtaattgaagttggtaactaagatacatgtgcatataccaggtaggtgctcattattttgaagagggaaatgtgcagctggatactaacatcgattgcaaggattccaccatattgcaggttagttcatacaatacctattttttttatcctggcatgttatgaacgattgatggcatctgcttcttttgacctcgtgcagtaatccacacactatttcatcgtttgttgttttgctgctttaggtttacgtgctaagttcattctactgttcaatatattttggagaaaattttctcctgctttggtatgatttgctactgagttttagagaattatatatacatgtataccctgtaaacttagttgcgcatgcataagtatgtgctctgcattcatggatgaagtacagtttatgttactgatagattttcatagaaccttaaaaaatttatatctgcactatgcttaattgtgttgggttggtgcctgatactttgagttgttgtcgatattctattgatgcaaactgttaaaacaaacaaagttgaaattttatttatcctttttatttcctggggtgaactgaaaggatcaacttatgattgagtagattttttaatataaaaattgcacgggtaaattttgcccctatttcatttcctttttggttctggagtttttgcatgtgcttgtccggagcatttgtgtatgttaagcgtaatgttttgtttagagctgcattatgcttgcatcattttgcttgctttgtttttgcttgtttttaatcttcaccaggctgaaaaatgcgaaacccttaactgttcttttcatgtgctattactcgtgtttcagtctcctgaggaatgtgcagtatcaataactaacatcattcggcatcatgagtcagaatatttgtcatcacttgaggttgaaacctgtccctatttgtttattcaagcttatatgttaacataatgagtaatgccattcttttcacttgtgaacaggaatcatacatgaatttgtctgatgcaaccttcaaggtacaccaaggaggcagtaacaatttaagaatttgcatgatagttataatgctagtaaattttgttgctacttttacctatcctctgctcagttgtgtttactggttatatatgtgcacaggatcttcgaaggaaacttcccgttactcgtactcttttcccatggcacaacacattagccctcagccttacaagagacctcaccaaagaactggctataggaaaatgaagcttgtggaggtcagttcattagattagctttgatatggatttttttttatctccatgctatgtgttgttctgtagatcctgcaattcatatcctgtagccagcaattctcttgttttgatttctgggcttccacatatcagtgtaaatcaagaacatgcacttcttgtgaggaagttacatttcaagaatatatgatatctgaatgttgactgtgtcaactcatgttaactcttgctgccgtcatgaaacaaaccgggcaagcctaaatcgattctttgagatttgttgtatagaacattggtattatttgcttccgaaatagtggggtttcctgccaaaaattactgtgtttttacagccccattgtttcgcttattagcaaataaagaatcttttgtgagtaaaatttttatacttgtggctttagtgactcaaaagcaaatgctataaaataaactatgatgaaaaaaaaaaaccaaagaatcataatcaaaattaagtttaaaattcaaattttggcttataaacataagtataagaaattgcaggttttagggattagccatttattatcttttcactgccgccgaggtgctgagccaaatacgtcaccacaccattgctgctcgtacggacggtcatacgtcccaaaggctcaagcctaaacctccaacgatcgtcctgcacgattgttttacccaccatttgttttggtatcattgggctgggccatgatatttgcagcggtgtcaagcatccgacatcaacggcggctgcgtagattgcatatctcggctgaggctctgccgtaatttcagccccgtgtagctatgccgttaaaagcacttggctgaattcgaggttaaacagttgtgctcacagtatgaagttatttttgtgatactgtgtgatcaaacaattcagcatgaatgcattgatctcatgaaattgaaaagatatatatcctgatgagcaggatgaggctcgtagcaaccagcaagctaggatcacagggaacaggaaaacaatatgcttttttcccctttaaattcacaagatttggtctcacacaagttacacacgaatcaaatgagatattatcagacaagctcatcatatcgtacaacaaatatgtacaactccgaatatgcaagcagagacacgccagacggccggccggcgtcgttcaagcagcagcggtttccgggtaaggatcggcccaggacgcgtccgccgccacggcctccttccatctccggttgaatatctgcatctcggcgaaggatcgccgcctcaccgcgatccggccggccgacgccgaccacccgccgccgccgccgagcgaggggatgcccctgtgcatgacgtactcgctgtcgacgacgccgaccttcatcgtccggtcgccctgcgcgcagtagccgagcttgtagtcgaggccccacccgtggacgagatcgttctgcaccatgccccaggtgcaccgccacgccgcgcgggagaacaccggcaccatcctctcgacccaccccgtgcacggcggcgccgtgctgccctcgtcgcaccgcggcctggctcgcctgtagaaccgccggtgcacgtcgccaccttctcctcctcctccggccacggtttgtcgggcggtgatgccgtggtggatctccgagccgcgcgccagcgccggctgcgagacctcgagcccctccctcctgacgatggcgaggtagcgggcggggtcgaaggcgtcgacctcgacgtcctcgtcccacaggaagatgtagtcgtactcggccaccacgtcgggatggaggaaccgcttggcgaaccaccacttcgtctgccccgccgccgccacgtgcaccgcgcggccgtgccactccaggtcgccccactactcgaccgcgccgtcgtagtggaacagcatcaacgcgaactcctcggcggggaacttggacaccagcttgtcgacggccgccttgttcttgatcccgacggggatcgccaggaggctcttcgacgccttctgccgcccgtgctccgggtcgccgaccatggactccatctccaggttcgactcgccctgcacgatgcccctcgggagaggctcgctacggccgccgccgccgtcgctcgacgcggctggcgcttcagctcgcttgtcgtcgcgcagcatcttgcgcgacagggtgatcttctcggctgccgccggtgaagtcgacgggctgatcgggcgccggtccttgtggtgtaccgtgacggccgcgccggcgacgaacaggaggacgagaaagacgagcgccgccaccaacatgtgcggagtggaccgcttcatctgcggccgcggcggcgacgagcccatggctgctgtcaagtaatcgtcgccgctatgttgcaccatgattgccatagagtccatgcattcaactttatactgaggatagggtcttggaggccgactccgaactggacacgtacgacgtacgcgacataagctgactccgaacgggatttggactactcttaagtaatcgactgataattctgtcaaaaaaaaatcgactgataatactcgccatcggtataccgatcgctcgattattatcgggtgctccaataacaaattaagcaactgctctttccactccattcatacgtatctcgctctaatttactttttttccctgagcttatttttttgctttgagaggtttgtcaaaataatctttctcctaaattatttatccaacatacgatttgattacaccgttatattcgttgtaattaaaatctttacattaagatatcacatgatcatattatgatgaaaaaaaatatatctttcaatccatcaacactcgatatttcatatgcaatagcaacatgttttcaatgtgtgtttcaccatgttttataaaatttacccaactagctacttgcccctactctcacctctctctccactgcatccatccatacatgcatacatttatgatgctcaaaacaattttttttctcctaaattacttatccgatctagtccaatcacacgttgtatttcttttaattcaatttttacaaccagatatatattccatgattatattctaataaaaaaaatcatatgtttcaatctgttaacactcgatgtttcatacgcgatagcaacatgattcaatgtctttattgtgttccacaaaatttttaaatgtttcattttttttatcaaatataacttaatgttttaccgatggtcaactgaaatatttgaccgtccttttctttgacacaatcggacatccgatttggagtttcctcctaaattgactactaaaaattagaaaaagtaaattttattttgggtcaaatttattggagtttcatgatagaagtaggtacaaagtactgcctctgttcacttagagcgtatatattttgactgctcatttagaacgtattttgatttaaaaagaacatttggaatattttgaccaacactaataaaattacaagtatattaatttacttacaaaggtgaccaataaattctcacttcaatgtgttttcacacaatattgctttcataactatttaagatgacaaatcagtggtgaacgtttgcccttgaagatgttttggaatcaaaatatgcgttacaacaggcttgctaactttgttgctaaactcgtattaaaatttctaattctattatatgaaccaagggcttgctaacactactacgaaaaccatttttcgtggcggccattttagatttttgctggcggaatttgcagccgacacaaagcaaaggccagtgaagatcaagatcttcgctagcggttattgaccgccagcaaaaatacattttcgctggcgttggcttaagacggctgccagcgaaaatggatttttgctggcggctgtgttaaatcggccgccaacaaaaatggatttggggaacaaaaaaacacgcatgcagctgcccagccgccagcgaaaatacccatgtagccacccattagttcattaattttaaatttcaaatctacatctagattcgctgctcatttccaaattcaaacacgaaatacaaaatcatcatcagcacagatcaaacatcatttacacaatcaaacatgatctacacagatccaaacatgtgcatcatctggaacaacatgcaaaaagaaaaagaaaaaaaaaatcaaatctagccgacggcggagcaaggtcgacagtggcggatcccgcctccccgcggcccggtggcggcggatccggcctccccgcgggccgccgcccgctcccgagcgccgccgcgcccacgcccacgcccgcgccgcctcccgctgccgtcacccacccgcctaccgccgctgccgcgcacccgcatcgcgtcgtcgtcgccacgccgaaaccgccgccgccaactatggggtgggaggagctagttagtgaggatggatggcgccggcgccggtggagaagagacggaggagagacgcgagggagagaagggagggaggggagctggagagagggggcgggtgggtggtggactggtggtggtggtggtgggccgcgtggtctatattaatagatgatggtccatctatgcaagcggtccttctaccgccagtggttgcttaagtgggccgccagaaaaaataattgcattttccctaccggtctgtataacacgaccgctagcaaaaattatccatcttcgctggcggcacacttaagtgaccgccagcgaaaatagacgggctgca

SEQ ID NO: 5036 - DNA, 9946 bp, Oryza sativa
caactttgttgttgatgactttttcacttgatatcatttagtatttaaaaatgttgtttgaagttgtcatatttccaaattcaaattcaaatggttcaaaaaatgttatatagaaaaatgaccaaaataaaagttatagattttgatgagttatacaactttgttgttgatgactttttcagttgaagtcgttcactgatctaaaattctatttgaacttttcaaactttgaatttcaaatttcaaattgtttaaatagagtcagatggagaaatgaccaaaataaaaattttgcacctcgatgagttctacaactttggttttggtgacttttccatttgaaatcatttaattaccccaatttaacatcctggcctagggcataataggattaatagaatactcatactaacatgttacaattacttttctggaagccaatctctaaagaactttgacgttaagtgtgcttggtgtgcttggtctcgagcaatttcgggatgggtgaccgatcgggaagtacagatgaggcgctagttgtgacccgattgagatttgactggtcgtctgggtcaaaactatcggtgacgggctttacttagggcccgattgagatagaatcatccgtaacggccgtttgcccgattgagatagctcttcacatcagtgacttctagcctgtgacggacgccatgcccgattgagatggggtttaccgcccgattgagatgagggtatccgttctagtgatacctatggttttctgcaacttaaactataaaatgtggggttttcttcagtttactataaaaacaaggatgataatttaaaggtgatgtttatttttgtttaggggcgagcatgagataagaagaaagatccctaattttcaacattgttgaggctagtttgattatcacactactcaaaaaaggttattgggtattggatttcccaacaagcacccaacaggcgacaccttcgaggactcaaaggtgctggtctaggaactggcacctttgagattctaggaataaaaaaacagctcgatgcatcgactcgaattgagccgcttctcattacacccataccaccatcgatcccgaaacatccccaaagcagcacaaaccaccatcgatccatccatcaacacaacacaaattacaaaacacaatttcacatagcacaaatcgatcgatccaaaaaaacatccccaaatcacatagcccaaactgcacgccacgggagccctgatcagccgaaggaaccgccgtcgacgccgcgcctcctgccactgcgcctcctgccactgctggatccgccgcggcagccgccaccaccgccctgcccaccgctgacgccaccgacaccgcatctgccacgggagccgacaccgccaccgcctgccgctaatgccgcccaccggatgctgctccacccgccgtctctcacttggccaacggagaggggaggaggagttatgagagagagagacgaagatataaatcatactcttccgtcaagaaaaaaaatcaatagtccatacctagatttatagtcaggaattacgaagggtgtagttatgttattccaatacaaagaaattagatataatttagataaagtatgagagggagggagagagataaaaggggtggaggtgacaaagagagaagtgagcacgcgtagctccaagcataggcatcatttatgcaaggaaccaaccacgtgtgctcactctcttctgtcaccctcctagtacgagtagatatcaaacctttcatggaactatatatccttgcacccgtgctacatcattcccctatctatatatccatatgtgcatggttagacatacatttgaggggtctagcttgttagttataaatggatgatcgaaggggtttatatatagctagagaaaagttatttctcttttatgtcctcttgttaaaatactaatcttcttttttttgacaacaaatatactagtcttcaacttgtacatagcatatgctaggactctaggattaattagtggtgtttaagtatataagtatataacggtcatcggaagtcatcatcattcctaaagtactaaagtaatggttgggtgtgattctgttttgatatatatctctatctctactattataaaaattgaagatgtttttttggtattttgatacgccctccgtatttgagttagtttttaagtccgttcgcttttggaaatacaaattcgtgtttgagtcggattttaaatttatttgctgttggaaatataaaagaagtcatataagaaatatctttaaaaaactcgtatgctaacttgagatgatagtcggcctcctaattgtagttcatgattttctaaaaaatatatatccaagcgaattcccaaagttaatttcatcctagctaagccgtataacaataataagattaaaatagcattcactcgatacaacgtacgggtatttttttctagtatagtattaagattcacatataccccaattatttcacatttattcccaagctcgaaccattcgcgctcgaaagcattttgtgaattaaattctatcgagtaggttgtgcaagggtattcattccaagggagcccataaatatatcaacatgcatgagccgttgttgccttcgtcatgcttatgcaattttccttcattaatcttgtcatccttcgaaactatacttttgattttaaatcaaaattaaatcgcactcctggtataaaaacttgcatatggtgggtttcaatatatacaacttacaaattacttattccgatacaatggctaacttagctagtccgtgagagcataagccaagacggtcatcacaaaattgatctaggtgaacattgatgacatggcaggtacgaccatgttttgaagatcttatttagaatcgaataaaaagataaattaactgtttctttttcatgttttggatagagaataaaataaaattattttatgactttgggaattctgatcccatatataacttgtccgatgctcatttttgtgtagaagaccgatacaatttttatcatgcctcagtacaagtaagtcttgaaaaacattttgatttttatgtataaacactccattttcatcgaattttatggtcagtctaaatcttaaaaatatcatgcgaatagtaattattgcatattttgtcagcctaagtttgacgtgtaataataattacatatcagtgtgcgttatgttaaatcaattttgcttgcatggatcatttgtgctcaggtttgtacaaactagcttgcttgttttttaacatatcagcacacaccacacaagtaaataatttacttataaatcaatttaagatgcatataactcatgcaacaagaaaattttccgatcgagccactgcaccttcctttatatttttaataaaggaatctttattgatcttagataattatatcaagatgatacaatcactctaaggttgtgttctttgttcagtgttcccaacacctctccctcgtgttccgtacacacgctttttaaactgctaaatggtgtattttttgcaaaaaagtttttatacgaaagttgtttaaaaaatcatattgatctttttttttaaaaaaatagataatacttaattaatcacgcgctaatggaccgctctgttttccgtgcgcaagagatggattctcaacccatagaaaagaacacagcctaaggttacattcggtctctgcatagctaggatacgcacgacgtaaattttttttaaaaaaaaatgatatggcaacacatgttatgccacagtgagctacaatcaacagagatctttatcctcatactccaccgaagcaacactaaaaattatgataaaaatacccttcaaaaacaacgccttcaaaattaaataaacgtgaacgtgtagccgttgccatgattcaatcaacaaaggtcagactataagttatttagaaaaaccaaccgacaaacgtacatgacaaagaaacaaggatgctatcatgattttttcccaaggattttacgatgattttgcattctcatataacatcaaaactgccacagcgtatgtactttagattgttgatgtatataatgacaaaaatagggactcgatttcgttttgagattaattcgattgtagggtcatgttgaagttgttattagtagcaacgggaagaggactggcttcatccgaaatgcattcggtttgcagcgcaaatttttaaagggaaagaaaagaaaaggagatagtggaattgtagaaaggatgaagaattagtgctcagtctcttaatttggtaattaactttgtttctctctgctctgtcgtatagatattggtcgtttctcctttgaagctcactttgtctgttccaatatgcacccctgatgagactagacgtagaaagttttcttccagaatcgaatactagtatttttctttctattttttaatgaattttttatttgcacttgtgacagacagttcaaagtttccagacatgaccaaccatttggcggctcaaaaagagaataaaccagatatgggtgttgcacaaactgcagtatttattggatatatagtgaggtcaatgagcactgtgcgcatcattactgagtcgacaagctaatttacaagtagattcttattccaaccaagatgtgacattagccaaactaattaacgtgtcttctttttattccgggaaataaaagtatcttctctatttccattaggagaaaaaaacttgagctactcttgacttgcaacacttaaacattttcagtatatagctctgtcaatgatgaaaatttgttctctctccatttcagatccatttcaggttataagatgttttgattttagttaaagtgatggttataagatgttttgattttagttaaagtcaaactactttaagtttaactaagtttaactaagttaagtttaactaagtttacagacacatatagtaatattatattaccaaattagttttattaaattaataattaaatatatttttataataaatttatcttgggtaaaaaatattaattttttctataaactttgttaaacttgaagcagtttaacttcgaccaaagtcaaaacatcttataacccgaaatggagggagtagttgctataagccgataatcattacgtgttcaatgatcgtgcgaatttgtcataagtgtggacagataactaatatgaccgcactagtttttttgtttattcggattttggtgcggttttaatttcatccgtgttgcgtttctggtttggtaaatttggaaatttagttttcttggccttttttcgaatgtatgaattgtaccaaaattatatagagctcatacacagaaattactacatcgttttgtaaacactgacctcggggtactatttgttgggaaataaatttaagagagataagtttattgtgcaccaatctgaatctcagcataaaaataaaattcaggcaaaatttactataagatatatatctaaaatttatgatctttgttggtggactctgtaagaatgtggcacggctttaacacactttaaaaacttggtaattataacgccccacaaataattagagaaaaaagaaaaataagaaaagaaaagaagagataaaaaaaagagcaaagctagcagaccagcagcagcagcaggccttggccggcccatacaagcaaaacagcagcaggaatttttttcatttttaattttttttaatatttacagaaataatctgtcggcgaaaaaaattacaagaatagaccttgacgcccctacagagggcggtaagctgacgtggcagacgggggagggacgggcggtgacggagggaaggttttttgcaggaaaacccttgccgccccaacagagggcggcaggcctcgctgcctataaaaggcctgccgcccctgcccccagccctcattcctcccctcacaactccagttaaaaaaaaaagagaagggggaggagaagaaaagaaggggcgaagccctgctggattcagacaccgatttcagataatattcatagatcctatatgtgactattaagttaactactgtgtattttttaaaactttgtttgaataaatgcattatatttttagggttttagttgtactaatctagaactgcgtattgtagatatcggtaaatacgtagatctactagtttgaaatcaatactttaccattacattggtgtacatgagaagatattacgttgtaggtgtttattgcatgaaaaaataatatgatctagttatttcattgacagatatgtcgaacaaacaaatatttcaagtttaccatggcccaggaaacgtccattactggccaactggggtagatctgtcagaatttattgtatcagaaaggggaattgatagaccagcagagaggagtgtaccttctataaaaggatggttgatgagtggcttgagagttgatccacagactagtgacataacaatcaatgttatagtaagtcggacaactgagggtttttattgggaactaatgccagttcaaaactctcgaatgtggagatggtatgtggagaatgcattgcaacgcgggtggcctctagctatggttccgtttgttcacccgaaggatccaggtgtgcagaagaacatggatgatggcgagggaccaagtgctgaagtaaatgagagttatgtggaagaggtcaatgcacgagaggaagggggcgccgagaggaagggggcgtagtagctccagtgggcaatcaacccggtgatggagtggccgatgagggggagactgtcggtgccattgtggatgaaatggagagagaggattctgacaacgagcgtgtggaggaaggtgattcgtcagatgatgagacggatattaatctagccgaatgggctagtcaggatttttctggtctggtcgtatctgaagagaatagtgtgagatgggagtacaaagaaaataaggttattcagagagcgatttataatagagcagaagatatgaaggaggcggtaaagcattttgcagtgtcacttcatagagagttttgggttgccaagtcgaaccgaccacaatatgaagttcggtgtgttaaggaaaaagatcgttgtccctggagagtgcacgctaatatcaatattactactgtaatacctccttgtcccattactacatcgtcgttgtgttcaactcttgcactacctccctcctagttcgaatctaatatcatctatgtaaccgcaatggaaatagatgtatcatgttcaaattcgactactatttcttcatgttacataattctccttgtttaagtgcatataatgtttctacgaccgagactgcaataggcctatatcaatttcgcacactaatacgtcgaataagttacaaaataatatttcacttaacatatgaaattgcgaaacaaccaacttcaatacatttttataacattattaacaagttttaccaataaatacttctttaattattattaacgtaacatagaaaaatcatttggctggtaaattttgcatctgggtcccttgccgctctagcagagggcggcaagggacctcaatgcaaaaaagctagccccctccacaccccttgcatccaattttgtatctctccgcggagttgcaacctttttatttttattttattttttgatatttttttcacgattaggagcacacaagaaccaaccatagaaaaactaaactcaaatggacgaaatatgtgacgtggaattttctaacccctctcccctctagtgtagaggagagagatgtgcaacttttttatttttattttatttttttgatatttttttcacacttagaagaacacaagaaccaaccatagaaaaaataaactcaaacggacaaaatatgtgacctgtagaattttccaaagctctaccgaaaaacttctctcctaaaaaacacaatcttgcaagtggaatttggaggttttaatatcgccgaacccggtgaagcggggaagaatcggatataactttttctgtagatatccgtggatatattatttgcctgattccgagtccgtaagataaagttacgcctgttttaataaatgacactcgaatgacgtctattttcggtagagatttagaaaattttacaagtcacgcatttcgtttatttgagtttattttttccacggttgatttacatttaaataaataattctttaattattatcaacatatctggaaagaagcatgtggctgttttgcatctgggacccctactagagggcggcaagggacccagatgcaaaatgcaccagccaaatgctctagagggctgggaaaattgtatttagccccttgccgcaaggggctaaatgtaatttttccagacggcggcagacggcgcggtcaagtcgccgtctgccacgtcagcttgccgccctccactgaggcggcaaggtctatttctataaatttttccggcgatagattatttctgtaaatattaaaagaaataaatttaaaaatgaaaaaacttccagcagcagcagtagcgcggcggcagcagtgctacagtgccatcgtggaataatcccacctcaccaataggaaaggttgactagtcactggaactctgattttggaatttttttgttaaatcgaggacgaaaaacgcattgagttatactccctctgtttcaaaatgtttgacatcgttgacttttttacgtgtttgaccatttatcttattcaaaaaatttaaataattatttattcttttcatatcatttgatttattgttaaatatactttcatatacacatgtagttttacatatttcaccaacttttttgaataagacgaacagtcaaagatgtgctaaaaagtcaacggtatcaaacattttgaaacgaagggaatagcagtgttaggggtgtgtttagtttacatcaaaattgaaagtttggttgaaattagaacgacgtgatggaaaagttggaagtttatgtgtgtaggaaagtttcgatatgatgaaaaagttgaaagtttgaagaaaaagtttggaactaaacaggaggtgtggttatccaataccgtcactctaatctattagcacaattattttattacttttgagctaaatataaaaaagaaacatgccaaaaagatgaaaatgcctctcaggccacgagcatgtaaattgcttgggaggagagagattgttaactgacatctacctctacaggaaaggaagtcttttttttttaaggataacaggaacaactttattaaacaagacagaatttaggggatacaccccagtacatcacaaaggatatgatttaaggcaataatccatctctaacagggtagaggctaaccaatctaaggaagcaaatttcctgatgaaagtaaacaacaatagaggatcagatcgatagagttctgcgacaaagccatgacgactgaatactttggcctccattgacatgctcgtcgcttgacaatctggaagactcctacagctgtcaccacgaaaacggtatagatcgaaggtttgatgctaagctctagattttagtttaggtatcactggactcagcaaattggttctacggattctgtcgttagatctgaggagcagagtttgctcaacctgaacggtagaccttgcaaggatactgtcgttttgaaacaaaaggaagtaaaatttagaagaacagttagtcaacatcacaggggaaatcagatgttgcgataaaacttgtctttgtagaaggcctatgtttgctatagattcgtagtactgaagcagagtacgacagacgaagaggagcaagctgccaacaaagaagtagccttcagat

SEQ ID NO: 5037 - DNA, 36711 bp, Oryza sativa
tccccttttcctcttttctagcgttggcaggaagtatgcggcggcagcagcaagcggggaggagacggcggtagtgggcgcggcggggagcttgcgtcgcgcggaggccggcgggcgcggcgaccggaggcggcgggcgcggcgagtagcggccggcgggccgtggcgagcagaggcggtgggcgggggccggcggccgcggcgagcggaggaggaggacgacagccgcgtgggggccggcgggctgcgccgcgcggaggccggtggtggcggcgagcggaggcggtgggcggtgctgcgcgggggccggcggcggcggtgagcggaggatggcagtcgcggcgagcggaggccggtggctgccgtgctcgagttcctcgtcgtgctccttctgtgcttggttgccgtgtggggatggaggagatgggctctgtggggcccaccattggccagccaaatagagtggccaaatttggctaatggagagagggttttggccagccggttggagaggttgttggagcacttttttttggctagaatggctaaaatttggctaggagagtgggatggagaggctgttggagatgctctaaccactaacctaccgctccatataccaccatcaccagaattggttacaaagtcactcgacttggaagaggaacagtggtggagtcaccagacttggagatggatagagtgggggtccaaattgaaaaaaaaaggtaaagttagctattgtgtacatgaaaaaaatagttaaaggatgatataatatgaaaacttttaagaatacatagtacaaattgtaatttacttttttttgtctagcacaattaaatttgagttatccattaacaggtagtctcgattcaattgtgatcttcttttctcactgcatgacatatgatgactatctcttatcactatgtggcatggttccaacaaacccataaaactatatattggtatttccactatattgtttttttaatttttacatatatgttaatttggactaatatttttctcataattgaataggtaataaatatttttccatattttctataaaatgtgaataatgcatagtataatttgaaaattatattataagtatatgtaatttagtgttaagatatggacttgtagtactaaaactgccgcaccatagtagataggtagtcaaatgaacaaccataacataaaaaatatgagagaatctattgtgtgccactgatcttgtccatgttctacaatataccactaggtttgtcaagttctaccatataccatcatattttgcttaacttctataatatatcatcgtcgtccagttagccttcgttagtacggtaaaattttgtcttaatgatcgaaatacccctggataaaacttccaaattttgatcaaaatttctaaaatattagattgtaaaacttccaaaatttgagacggacaacttctgtgctagtttacaatatgatattttggaattattggccaaattaaaagggggcgcccaaccccttcccccttccccaggtggagttcatcgggaacggggtggggcagtagcctcctggcgagcgacggtgaccgtgcattggaggcacagggtcaacgtcaccgtcggtggagcagatgagaaaagatgggagagaaaaaaaaaaggagaaaaggagaacagggtcaacgtccacgtggtatgacatgtgggtaagaccactatcaaacgaagctttggactagaatgatacaataaaccaagttaagggatctcgatgcgtgatttgtaagttcgtggatctaggtgaaacctgcttataagtttatgtatcagtggtgtaatttactctattatgaaatttggtcttcgtagtaatacagcgtgaaagtaaaactttaactctatattcttccattgttccatcttcttcttgttttctcgttcttctttatttcgataataatattgctagagtcaaacactattacttacacatgaatactagcatctagctcatgtgtgtatgctccgtaatatatattatatatgttttttacataggtaaataattattattatcattgttatcgatattttatttatataagatacttgactagtttttaaaggacaagaaagatattttttttctaaactgttgatgcggaaaacacgaagacacgggagatttgcttagctctagtgtaggtcctacattttgatgaggtgcggccgtgccagctagtttgatcctgcaactgacaagatggataaatgacaagatggataaattgatggtcaaagagtctatcaaccaataagctgatgtagcaatactagctgatgtcggtagggtttgaaaaattggctatatatccgatgtagattctaatacttagataaaaaaaatggaagaacatgagcaaacaatccaatcagctgatgataatatgatgaagtagatgtccaatgaaccaatcatcagaaaaatgtagactgaatggttaaaataaacatcggctggaagtcagatgtaaagataacttatatgttagcactccgataaaacaatatacatgagttactagggtggattagatctattaatcaacagtaaaaactaataggtcggaccaaaccgatacaacattaagttacatcaacgaataaacctaataatatcgataaatcatgtataaagtgatgggctaagatagaagatcggacctaactgagacagtcccaactaaaccgatgagcttctaaacacaatgcacttaaagatagaattgaaatatcagatacgcaaatataccaattgaatcagagcaatccaagagatcgaagcgatgcatcctaaaagaacactagtgtagcgataaatttgccagggccaacggaacttagggcttaccccttcaccggagatcgaagccaatgcagccccgcgtcaggtgccaacttgcgccgatgataaaaacctcggaaaagagcgtgacgatgctccgagagtagttgtattgatcgagagataggtttacaggacaccgggatggatactagtcctgatcggacactaaacaaacttgcctgaagataaaaaggaaaattactgcaccctgcctaattaacactagataaattaaattatcgtgccgtggttttcatgatttctttttaaactcggtctcttctggataagtttccatcggttaattctggataagtttccatcggttaattgtctcatttcattaacaaatctagtaaaaattcttactaaatttggcgttaacataaaaataatctaaaatgctataaacattaataatattaataatattgaacgatatatagtcatataaatatatactatctccaatttttttaatatacgaccctgttgacttatcatttattttattgtgatttgatttatcatcaaatgttctttaagcgtgacttaaattaatgtttgtacaacaattttaaataagactaatggttaaacatttgtgaaaataatctcacaaaacgaacaagacgtacgaaataaaggtttcaaaggaaaatacatgtgtttatttctcgggtggcagtacagatcatcagcaatttggggcaaaatgttactacatatgaaacaggcgaaaaatacattcactgtaaatacaaaacaatccttgtttgtcatgacttctcaacagctcatcgccgaaagataacatataccgcaaacatgtgtcactgaagtgaggcaacaaacatcccttgttaggttaaactacttggtaattagcggccaccaaacgagccctctgcgaatactttggcgggttaccatccttcagaggacggattccagtaacctgcaaggcatgcagaaaacaacattatgataaaatgaaaccagaaggaagatcaaatatggagaagtgcgagtctgtaaacaaatatggggagattaccaaccttcaaatcactgaatgtactcgatgcggaaaatccaatagatatggggaaaaatgttgatggatcagctggggggacaacgaattccatggagccactgcaaataagggggaaaagagttaacaacggagggcaaaaaacccaaatagaagtacaaaacataattatatgaactcatatttcaaggacctgcggttcgactgatcgataagaagaatggaccattccaacacggagtttctcgagtcatacctgtatgcacagtgaaatgtgaaacaggcattagaccaataagctttcactgtgctgtctacgttattgccaacaaggaaaaaaaagttgagctctatctacaagagatgtcatttaggaccaattcatacaagggatctggactaaatcccgataaattcaaaacacatccctcttaagcatacagattaacagtttgagatgccaataagactgtcaggaacaaaagccagaattgaaagttatcacttgttatattttaatactcctaccatcaagactaaggaaggagacaagtatgacctgttggaggattattttagtataatataacagataagttcactaaagaggaatttgaaacattacttccattctccatcaatctgtctaacacttggagcctcccggagagcaggcaatggtatagagatgacaacattgtgcaggtcaaacatctcagcagcttcatactcaatgttgacataggtttcacttccagatactgatggccagcagttgactatgcgaagaaaaagcaagttaacaaaagtattaagcaaccagtgtaagaaaaatacatgtccttgaagtacgagttagtggacagaagaaaataaaatgattgtgcacctgatagaggtaacgatgactcatccatcccctgaattctccatttaaccagaggagtttcattttgaccacttgggaatggcctgtttggatcttttgctcccacaacttgctgactgttaaacagatccttgttgatattggggtgtgttttgaagctaagtccaggtacatcttggttttcaatctataagacataaatatgaaatgatcagctatgatcaatagtatctatgagaatggacagaacaatgctgctcatcggcaatgcaaacatggagcaacaatcaaagatgaaactgaacataataaaaagaaacaatgttgctcatcagggacacaaacatggcatgataagcataaacaaatgcaaatgtaccaacaaaattggaaaccatatgacatggaccagaaatataaatgtaaaggaattatcttagctgaaggtgaatattgtcgcaaaagaaaagatgacccaatataacagatgcattctatttacttatgggtacatatctgatatctcgtatagatttatataagaaacaaacaaaaattgtgttacattctttggtgttgagaatttctgtaaaaaaaagaattcaagcagaatgctataagttcagaaggaatgttacctgcaactggataaacccatctgcatcattaaggacctgaagagcaagggttccttgcacatcaaagttattaacacctccatctcttttaactgtaacattgagtttttcttcaattgtcactgtgacaggatcacttggtggaagaggcgatgcccttgactgaactgagctgggttgtacatcctccagaatgacttctccttcagctttcaaagactctaggaactgattcgtcttctgtgttttgcctaatttcataccaagacctttaccaggagcagtagcagctgcagatggacggcctgtgcaaatattgctagcaaacataagtaacattgtatagctgactgaactttgtcaagcagttttatgtaaagcaggagtactggcatggggaaactatattacgaatttaagtcttgagatatttgaatatcaagtaccacaagaagaaagtcctaggttaacacagtaagtttacccttaattgttatggcctaacattaatgctagaatataatatcagccaagaaaaatgcagagagttttcaagttacctcctttgggcttgctagcaaatgagtccatatccatgcccagtccacctaatccagaaccactcccaaatccactaccggtaatgctcatgtcattgaatgttttctcgattacccggggaccagatattgatgagtatcctcctttgtcaagttttcctctttccatctgcaagaacaccaaccacaaaagttcaccacttagacattaacaaatgacggcaatgccattgtaatttaagcactaaggtttgcgcgagctaagctggaaccaaagaaatgacaagctgacagaaaaacagaacacaaccaaaaagtcaaactagaaatagtaatggaatattgttttcctaatgatcaaagtccactacattaactgtcatttattttctcgatataatatgtattcttaatatgaaaaaagatgcagtacataccctcatcttatcaagctcactagctttcttcttcatcacgtcccttgtttcattgattttgctttgcatcatcagcttgtgagccttctcttcatggctctccatctcgcaatattgtttgacttgttgaactgttacattttccttatttccaagagagatggcttcatcgaaggcaaatataagctcaaatgctgttttacaaacaccctcctcatcaagagagggggagtattcaggcacctatacaactgttaaggagataaaagtactggattattgccaagaaagaaaatcaatgcagcttaggagcaagtctgaagatggatggatatacaaagcccaaaaacatgatagtttgcatgttggtttcaatctaaattcacattgaaaatgtagtgcctttctttcctttttgtccccttggtggtatatagtgacaagctcaactataccgagacattataatcttcatcttcattttatcccacaaaacaaacgttggtaacattatgtgatatacatttattcactacagagcaatatatgtgtaggttaaaaaaccatgttttatatgtttcataggataggattgtataggttagttaggtcaaaaaactggaacagtgaacatatgggaaaaaaggatacaagcttagagagcagcctcaaggtgtccagatcttcaagaatattgctctgcttgtttgtgataagtagcaagtacaggccttctattggctgataaacatagcgaacattttcagtctcaacataagtgtgctgcttcccagttccaaccagtttggggaaagctgcaagtaatccttcaatccttatgcgagacatgtcaacaaactgtcttgaaacaagtgctgcaattgaaaagcacagaaaagaaacagcatttagtctaatcacattaacttcctggaatgaagcatcaacaaattggtaaccaggaggtgctcactacataggattttagggttataggagttaagaatctactgaggtaacacgataacagctagtttagtatttgggttccacaaatttgcatatgagctaacactcttattagcataggtgaatgataaaaacttatacaaatactttttttttctttttctatgaacaaaaggatttgttttgattacaatataacaatataaattaaaaaaacttcttttcggcactgagaataatacaatacaatatataaacaacagaatatttcaagccagctgacctttcccggactttgaaatgatggaagcagcaagaaccacctgcggtacacaaaaaccaataataagctctcctaaacaaatcaaccacttgcttataccagcaaaatgtcagaatgttccttcttaatattacaaagagtaataaaccattaggcataccattttgagggcttttttggtactcagaattactgcacttaaaatggattcaggaattatgcgcctgccagaagtggaaaaaacaagagattattcaatcagtacgacataatcagaagatctcctgcgagcttagatccaggccccaacttttcttttttgcttccagatcttactacttagtactaagaaggttaagccaaattaagagaaaagcagcttccagatccaaaagagaagctatgatttaacgcgaatcgacagagaagaagaagaagaagcatattgggtagagatagatgggaaacggatggatggacgctcaccagcgagcgagcgaaggatgcggcggaagaagcagcggggacgccggcgctgctgctcgcgggatggagatcggctcaggcggccggcggcgagctcgcgaggagaccgaggagacgcagggagatcgctcgccggaggcagccgcgggatctcgagcgcctgtcagaatggctgatgaagtaaacaagggaggtagctgctggtcccactgtcagtaacttactacctccatccattgtaggccgagtttagttacaaaatttttcttcaaacttctgactttttcatcacatcaaaactttcctacacacacaaacttccaacttttccgtcacatcgtttcaatttcaaccaaacttccaattttaacgtgaactaaacacacccgtagtattaaggtgatttctacgtagggtgtgtttaattccctttaaacttttaaaagttccgtcacatcaaatatttggacatatgtatggagcattaaatatgaaaaaaaagcaattacacagtttacatataaattgagagacaaatcttttgagcctaattacgccatgatttgacaatgtggtgctacattaaacatttgctaatgacggattaattaggcttaataaatccgtctcgcagtttataggtggaatctgtaatttgttttgttactaatctatatttaatacttcaaaaaaaattaaaaaggaactaaacacggccaatatgatgtctcattctgtacatgggttgtgggtttttttttttgctagctttcccaacttaatcgtctcatttttcgcgcacatatttttcaaactgcaaaacggtatagtttttataaaaattttctatacaaaagatggcgacgtagagctgcatgaagatggcgccgctgagcctaacgaatcccttgagcaagccgagctcgatgccccagctctccggggaagttcttgacgcaggtgacaagcacgccggtgttggcaaacgactgcgagttggcgccagctccgctccgctgcagccgacgccctgctccactccgccggccaccgtcctcgctatctccgctgcgaccgacgccgccccatgcgcctctgagaatagagagagaggagatagagctgacatgtgggcccaagggcatttttgacatttcacgcgatttctctttcctcttcaaccggaaagtattattttaatcggcgcgatgtccactggcaaattaccacgtttatggagtgttttcccccaaaagtgagtttgggcagtgtcctagggctaaaaccacacataaacagtgtcctgtagcaaaatttgccttagttgttttaagtataaatcatgttttacgtgacgtaaaacatgattttgctgtacttatgtgatgagtttggttcgttaatacacgagatgagtaaagggataaaagtttagatatgttcatatctccttaatgaaaagtaatactctactccggtttcgagaattgaattgccaggtgttgtattgatctcacaatcgagttatagttatacacttgtacgcctccctgccttacttatatagctttgggggcaaggcttacaaggagaacaacctagccggatatgatttttttctatgcatttacataatcatatataacttaagactatggaatatagcttgaaatacaatgcaacataatgtccaaagcattcatacatatacttccaatagtagtacatctatgtgcaaagtcgtatcttcaaattcattttacatagacagagacaaaattatgacagaattacaaacttaaaactgtcaaattttatttttgttacggctaaaatattatgaatttgaggttaggattttatccctaagtgtaatactattgaaagtacatacgtgaatttttctagattttttagtgacatttgttagttggtgtgcacgtgtgtacacgtgaaagcttgtgtgcataacatatgttgcctcaccacaattggatcagaaactctacacttgttgtctatgagtttttaaccttatggttacgttcttgtatgattgtcgaggaagtttagtagcgcatgcgaaacgaaagctcattagcatataattaattaactattacaaacttaaaattggatttatttgattttttttaaataacttctatgtattctttttaaaataccattcaacagtttgaaaagcatgttaacgaaagtatgctaacaaaaaatgagaaagttgaagtttggagttgaaaaaaacaactgagcctaagagattagatattcgcttccaacaattggattggaaactctacaattacacctaacttagctatctacgagtttttaacctctaagagattagataaaaagaacttgttgaatgctggtgcttaaaaaatccccaaattttcaccaagcacaggagataacccactccaatccactcatacagacaaatcacgaagaccaagaaagagtagggaaagaatgaatctcaacaaactcaagccaatggcaccttaatatgctattgcaataaaatcaacaatcttagctttggggtggggaggggtttaaataccgcctcacactaatctgatggttggaggcaaagattactcatatgggcttgtggtaagccatggaaggtttgtaaatgcttatattattggtgaaagaggagtgcatttgtaaaccaggttagagatggaaaagtcccagctttttatgagctactcaacaaaggggtataatgctcttaaagatttgaatttcaacaaatacatcagcttcgcatctcaatgaaatcatgctatccatagtagttctgatttttgcttacttgtaccacgagtaacttgttgtttgtgctagtattgtttttctagtgctacatatagtagtcgttgccatcttgatcttgctggtgcagaatctatgtcggaaaaaaaaacccaccgccattaagcaggcctgaaaccccaaaaagaatattcagctcgttgatactagggtaaatgtatccagaaatatgagtattccttattcattgttgttacctggtgttaaacttgctgcaacaatcggtctccaacaggaacctataattactttatagagtttggcaggcagatacatggattgcaaaacgatcatgctagctgcaggcggggggttgtacaagtgatccgggcaaaatccacaacctactcaatccaatccttctcttcttcggctggagtatccaccttggctgctgcagaagcgtagctcacgctgctgtctctcatgctcttgcactggcttgactgttcataccgaacaaatctgatcttgatcttcgtcgaacaatgtttcagcatctggaacattatattgcataaagaggacgaagttatagaagtagaaatgaagagataacactagttagatcgccacaacgcttacactgaggaaaacgctgatggggtggcgcccacatatggtattttcatactcttgcaagtactgcttgaatgcatctggattaccagtctctattatctccatgcccatgtggtccaaggcctctatcgatttatgtatagcaccatggctcttgtcgtagtatgtgtaactaaacctgatgagacgatgcaggtgagcataatcatatgcaaatcctataagatcgaagtaacaactacaacttagcctggtgatgtatcatgggcaagcgttctttggtgtccaattatgaaatgaactgatctgggctgttcaatcacgttttctacactatcgatcaaagcagatccgggtgaaacaaagcctggagcaaattagctccctttttacttcccaccaaaatcttatgcaaataaattgtgtcgtccctgaaccgcaaacaacatcagcccacagcgacctccccccatcttcacactcctacaactccaaacgcttgcacactggtgatcaccatcgttgggcagatggtggaccccaacatgatcaggctaagccatgtggcagaagtaaaccaggatacatctacagcatccggtgtttctatagatgaatttagcagggaagcaaggtgctgtcaccatccaccagagatggattcgagattggggtttgcgatatagtgttattacaacatgtgccaggtggagttgtttttttctttcaaaattgagatggttctaggatctgccaattggatctgatgggttctcaaattccatctgatgcctatatcgattattcgagcctaaatgttattccacatgataagttgcatttatgctaagtggaaatacaagatactgcacaacaatatctagagtactcttgctatgaggggttcaattgatagacaaatgctgctcatatgatggtacccttttcgttattgagagcaaattttgacatctactgaagttcaaatttgcatatacaaaattaagattttgtactgaaatttaaacttggaaagaaccatatttgtaagtgtgatgatgagttgatctgaaaagagagtcatagctaaaactgctattatggcatactatctaccttctggaaagagtacaggtagaaagactaagaatttggacaatctataggcctactaaaaaaatattcggcaagagaactctaagattgtggattttgcatcatgagctcattttaactaaattggctagcaaatttaatgaaaaaccaggcatgccaactcttctgcttttctacatggccagatctttagcctcgaataggccaaacactgcaaacttcattaattagttctgcagaactagtagatgacaaatgtgacacaggacaattaaagttttctcacactaaagattaccataggaaaacaagcaagttggcagagcatgaaaaagctgacagtagaaattaagtatttaccgggttccccagtggcagaaatctgaggagatagaaaagaagttcttcggatcgtcaagatatctagagagcaactgcccatacatggcttcattttggtctcaacccatttacagaaaaaggggtaagttgattagtgggtgcaggagggtctcaataaggtttagagatttaaacattggtttaagtaggtaactttgcaaaagatccgaaaatatttccttttgtaaggcatttgacctggagaggtgcctttcagaattttttttttccaatctcgtctaattttgtgatgacccagatgtttcagttgcccagtctttagaggaaggtgtctcagatgtttcttttagaactcttggaatatcagaatgtactgaaacatgttgctatatttgctgagtagggtgcagttctataaagtgtaaatcatgtgagttggctgttgagaaatcttaacgccttttctggtcaaatgcatcgtttatgttaagagagaactggctacctaccacccagatcttctatacagatatataccattgatttttttggttctccttgatactatcaagaccttctgatccttcctctaattatcacacatccattttctcacattaactgagaccctgagctaccctatctggcatgctatacaccgtcccataccaaagccctccatccttaacacatagaactttgcctttgtaaccaccttggagagaaggcctagtgtgcaacatggccccctcttcccctcagaccagacttatactaatttgcttttgttattcttgatagatgggtgaaattcaaacaaaatacaagcagattgtttaagcacaacaggaagagatttgttgatacatcgtgggtaagaacctgcaaagagagaacatgaattcccttagcgcgttggatcatcgaataatctgagccagcggattctcactaaacctgggtaaagcccaggtttagtgagggatgtgacacccctactatcagttattgtgctaggaggggtatgggcatgctcagcgctttaactgatagcctgagagttttgtttagtgaggtttgaaggctaaatggtttgttctggacttgcttattttgtttatggcttatgctggtctcccttgcaagggccttatgaccatgatgtttgctttgatcaatgtaactaaaggccatgctgctactgagagaaagatactccatccgacctaaaatatagcaacctaatacttgattagacaccacctagtactatgaatcttgataggggtctgtccacattcgtagtaccaggtggtgtctaatcgagtactactttagtattttgctatattttaggacggagtgagtatatagatgtgtggtttttgcatcaaaccagttacacattgtttgcaacgaggagcacttgacaatgtttaaacacattgaataatataataactcatatactgtacagtgtgcctgtggcaattcacttatattggactaatgtgtgatattgaaaattttcaggcaactcaagaaaaagtagcaacgatagcaggtggggtggcagattattaccaccactactttaaaaggggaatcttaagcacaaatggctctgtctgaaaatatagaaagttcaaaacagaaataattaatacggatggatgtctaaaaataattatgtcgtaaaatcatattagtactgctaaagtgctaatcatgcatggaaggcatattgggtcaggttaagggcaatactaatgttggtgttctggcctattatccaagagaaatcttaggtaaagacggtaattagattgcatggcatgtaatatgaatgtaaaatattcaagtcagtaacagcataccttcatggtctactggcaaatccccaattggggtgctataaatagtagctcttgttaatgcgcattttggagtatagtagtgatgtgaggggcctaacaggaagacccgagaactggatcacatacaggaaaacatattagatgggcaaagtgaaaattagaataaagtaatcagctataataatgtaagtagtattttttggacattcttaaaagctgaagctgattctgaatttcagagtttgattttgcatctctcttttcatcattgttaaggagacaagtaaaaaatctaccaaaactattcttaaaaatacatattcaaaattcaaaagtagcagaactattgcagtgtttagaatgacaaaagcatatcatatatttatgcaacaaaagtgaatgttttatgattatcttggtgtgttcggtttgaatagacatgggatgtttggaaactgaggttgtcaggaaatggcctatagctttggtggtgaggtaggtgtttaacatcctcactcacccgggtttaaactctaggattaatacatgtgaccatctagttctttagttaatgctagaacccatgtccaactttcaaaataaaataaataaaaatgcatgcatcactcataaagatcactttaccaattataccaatgagagataaaagtacaggttgataaaatggtacatccgaggtacttttacatgaaagcattcaagtcaaggtattaccagtacagcaagacagtgatttactattagaagatctgaaattttgagagagtaacagtaatgtgtaaataacatacatgttagttggatcaatgttgccaaaagcatatgccgcacaccgccctgagtatgaatagccagcatggctgtaatggcaagaaacaattgttaaaatagaacagaagaaattcaccatcatatgaatagttaaataccatcttacggcgcaattactgcactcacatcaggggacttggttagaccagcagccctcagccaaccatcaagttcctcatccagtttcctggctaacatggagtaacgaatttaggagacagagctaaagtggtaaattgtcgaaccaaaattttaaaaagaagaaaatggttgagatccctgaaagttttcaacaaattacatgcttttatgaattaatgttggaaactgcagagcaagaagataatggagtcagctaggaatgaatggttcaactcccagtaaaactaaacagctcatgtgtttccagaatggtctgacagctaaaatagttattgcatttgcataacaaatagcaaatgatccagtttcatcaatcatgtcagcctactacgtgtttgggcaaaaaagaatgatattaatctaataagcagtacctaaaatgtcatcatgcctgatagcacaataaaattgatccatgtccatatgataaggttgccggtaattcattccttctaataaaaaactattccgaaagtgcataatttatatgaaaccatgtataacaatggcaagcggttcctgcatttttctaacaatataaaaatagttcccacaatcttagcaactaaatttgaagcaagagagccgtaatgactggtgaaatcatccaaaatgccaaccaaacaattcaagcacgcatatttggatgactatcaagaaaattattcacaacaacctgcaaaacatcaaccgccaacatatatcaagttatcaacagtttgaagctactagactatttacactccagatcgtttaaaactaaaactccgaagatatgcagcatcctcttttgcattttgaaaagcgcacacaatcgaacaagtcaacactcactcctccacaacaaacaacacaagtgcactccaagaagctaggctaggccgcggaattgagtaatcaccaccaccgaaccggaccccgttaattccccaaatctcgtaagcaagaaatccctcctctaacttctcccccctccccaaaagtgggagaatccatcgattggattgaactagtaagaagcctcctcctccaaccccacacccccctgccccaaagtgggagaatccatcgatcggattgaactactccctccgtttcacaatgtaagactttttaacattgcccacattcacatagatgttaatgaatctagatatatatgtgtgtctagattcattaacatctatatgaatgtgagcaatgctaggaagtcttacattgtgaaacggagggagtagtagagattgcagtagcggaggagagtggatcaagtaccattgttggtgtaccaagagccggcgtgcgaggccctcctccatccccaccccgcagcagagaagaagagcggtttcgatggcggcagcaaggaagaggaatccctccctcccctctggccctctcgtcttccttgttagcttaggttggtttttccgtctgggctgaaaaataaaaagtaatcactgcctcaagttgccactccaactttcaagaactgcaaaagaagaaaagatatgtagtgattgagaaaaaatgagtcctgaagaaaatagtatttgatggcctgtttagcaagagaaaagaatgggctctcctcatcaccaaaagaaaacctaacacaaagttagcttcaacagacaagcaccaagccactgagattaatccgttcaccaatttcaagttgaatactcaattgagaccacgtggatctttacaccgaagtgcatgtattatgttcatgtgcacacatgcaagtataaaaggtggattaaagtagatagtgtcctgctgcaatgaaaatcccaccgattcacaagtaaatagcagaaaagatgacagacgatatttcccaacagattcgggtgcactgcttaaggcaatactacaaacaatattcggattcctatatgaacagtagtaaacagtggagtaccttaggaaatccagcgatggacgtcgggggcggacggatcagatcggcaacggggaagagatgttcctggcgatggcggttggatcatggggatggggggcggcgcgagaaatgtgcccggcggctgaatgcggagatgcgcggcatcggtgacggcgatgaatcggcggcggcacctgtgagggcgaggcagagatattagaggaggattagggtttggaagcgcggcgaggaaggctgagcaggagcagaccgcgaggagatcttgacgatcttgttttgcccggcgcggcagccggcaggggcaaaggcggcgacaggacgagaaaatttacatattgctaactccaaaaacgggtttcgctcaaatgccgtataggagtggtttcacctgaagcctacttactataatacccgaacagacaaaaatacccttatttctacccttcttccacctccgtcggtgaccagcggcgcagggatagctggtctgcggccggcgcggcgcgcggtcgcgtgtttgtcactgggggcgtccgcgcaggctacgaccctgccgtcacccgctctggcgcgttgtgggaccccgcggcctcgccgcccaccgccgcgtgggagccgatcctgccgctgcgcgacgggcggttcagccgcggaggccgtctgctccggcggcaaggtctgcatggtcaacctccgcagccgcaacgctaaggagcgcttagtgttcgacctccgtgccgatcgttggaaggacatgccgccccgcatgctcgccggttggaagggccccgcggcggcgtcgcccctggacaacggcgagaccatctacgttttggatgaggagcgtggcgcgctcaccgcctacgactggggcaccgctcggtagaggatggtagctgagtccgagcgcctcaagggcgcggcggagatgaccgtcggcggcgggaaggcatgcgtggtggccctcggtggtgggaaggtgttgatcgtggacatcatgccgccgtcgctgctcaagacgtcaccagcagcgaggagggaatcgtgggacaggaggtggcggcgccggctgggaagcaggtggtggcaccagatccacgcgctcgtcggtggcggcggcagtcggtgaactacgcactcggcggcaggcagtgaaccgcgctcagcggcatgtggatgaagggtagcattctggcatgtaaccttcggttgaaagtggcattttaaagaaacccactaccagcatggcatttgagctaaacctggttttgaagatggcacaacgtcaattttctccgacaggacaggagcagcgatgaggagcctcagttggatgaaaaccgtcggaaaaacactataccattttcattttcttttttttcgtgaaaacggaatgggaacgttagacccgaaaacggtaacgaaattggtaatattggtatatcagaaacgggaccatcgaaacggaatatactgatattggttggaagtcaacaaatcatatcggaatcagcgaagagtggcatagaacaccgagaaaactaattcacccatacacgctggcggcgcacacttccacgtgaggcatacacccaatgaaacctgctacttctaccgtgtgaaaggtctgttgcatgattctatatttctatcttgcacaagttagttaatccatgcccacgcgagattttgcattatttttttcgtgttttttcttaatcacgcgtgcatgattttttttcacgatttttttttatttttttgtgaattttttaaatcatgtgcacctgaatgcgcctgattcaactcgaattttgagtcaaaagtttttaaaattttagttaaaagttttgaattttgagatgaaagttttcatatttgagttaaaagttttcaaaatccgatataaaagtttttaaatcttgactttgaaagttttcaaatctggattaaaaattttcaaaaaatcttgttaagttttcaaatctaagttgaaagttttaatttgaaactttttaaatctaagttgaaaattttccaaatcgttaaaagttttattgatgtactaggaggagaggccgagaggggctgtgccatctagcacgcacgtacccattaggaatctctatagcacacatttaactatgcgcgaagatgaccttttaactttattcttacatcatcacactccacataacatcattatatgatgattaacgatatgataataagtttgataaacaatataaacaaagttcaacagtactttagcatcgataagctgaggagaccaaagttcagcaaaatccacatgccacatcatagggttagcaacattttcttggtcacttccccttttttatgagctgcaagcgtaccaggctttcttcatttatgggcttccgatgggtttggccggctgagccactggggaactttcagatttttttttcagaattttgacgaaaactaccgtacaaatacagttaccgacaaaccggtcgggaaaacctccatcctatttccactaccattttcggaagatattatcgtttccatttccaccaccgtcggttaccgataccgactgaaacagtcgatgcaaactgaaaacggcagccgaaaatctcggaaatttccagatcgttttcacccctacgaggaggcgggttgtgtcgtggcgcaactgggcagaacgcattttcgggtggtggtttggtctttggtggatgtgaaggaggtgggaagcagtgcctaggcatgttaacacttaccccctctgtccgaaaaaaaaacaatcttaggtttgaacctggatacatgtgtgtctgtgtccaatttaggttcaaacccatgattgatttttttttggagggggcggaggggacggagggagtactggccatagtggcatcggtggcgcagctttgcgtcgtcgtggtttgcatgtacactcagccatccgcaagtggccgctacgcgtgcaagttctctagtgtctggctaggattgagcgagccaaaaatatcgtataaaggaaatgtgcatatggtacattttgttagcacctaatgtaactggccttagatttatgccgcttccctccttgctcggccgccacgcgctacccctcatcactcacacctggagagaggacagagaggggagagagatgaatagaggggagttgaggagagaggaggggtgagaatgacatgtgggacccacgtggcccccaccattttgaaattattttttttggtgtaattgacatgcgggcccacaattttattatttttcaaatcaaattgccacgtaagcgccacgtcactgccacatcatatgaagtccgagtcaaattagccacgtaagcgtcacgtaagcgaaaactgccgttcaaaccgccataggacctatattgcaccggttttgacagttgagggacccgccgtatctagtttttcggttgaaggacgaaaatcggattcgttgacaagctaagggacctcagatgaacttattcctagaagagaagatagatgaagtacgttgggcttgggcccaaggtgcggcccatcccttcccagccgtctcgtctctctctctctctctcaaaaaaaaaaaaaagaagtggagtaattttcccgtctccttcggcggcatccaccccaattcatccgggaaggggaggaggcgtccttccttcgccgctaagcaagcatccagcccacccagccatccatccagggaaagggtaggggaaggtggcaatgaggatgtccatgcccaggtgactcttagatttcttcggtttgagggaagggaggaagggggatcgatttcttcttcggttctgatttggcggaggaggaggaggagcacgacacccaacgatatggtgggcgtgctgtccaaccgggtagatcggctggacctcgccgccggggatcacatctactcttggagaactgcctacctctatgcgcaccacggtgattcttcttcttcttcttcttcctcctcctccgatgcttgctatgcttcttcatccccaaaaacctagtcactcttcatccatgtgaaatacaatgtgtctgatctggagatggagaagtagtagtaatttgttcatggaaaaaacaaagcttgtatttattttcagttagtatcccttttccaagtcataagtcaacaactgtgcctgctcaaggctccagtgaacaatcacctcctatgctggctgttgatgctgcctgatgcaaaatgattaacctggaaatggtcgaacctggctgacatttgtccataacctgttgatgctgtccgctgtgtcttaccgatttaagccatgtggattaccagtcagctcaaggaaatcggtaccattttccctgagcactcaagaatacaattttgggcgatatctttaggagtctggttgtttggccacctggatttccattcttttcttgtttttaccattgtccaaagaaataagtctggaggcactaaaaagaagtctcgtctgttgagtcgcatggaacctgcatctcaatcgaaggattctgcttatctttccatttaagataaatccatctcaaatttagagctctcccgaacacaggtaggtattttatgcccaacctgcccttttttttggtgtacaaaccttagacaattaactaaacaatgcccaccaatccaccatcacaatggccatcccctttccaaataaagcctctcctattctaatatattgacgtgcaatcattttgcgcattcccgaaaataaagcctctcctacatgctggtaaccgacatatgcacaatataccgtcggcgatgtcatttgccatctattatggaaaacataacactcattacttgattggcatgccacgcaacatttatgtgctccatgtccgttaaccccacattatacagtcagttcatgttttcctgttgacttatttgctaaggagcaaggatactcgctaagaccatgtctctgacctgttcccgaaattgaacttcattttcagggatatatattggtgatgccatggttattcattttacaagagcaactggacatgaaattgggacaggaacattcttggacatgttccttttcagctcatctccagcaacggaggagggtcctccctgcgagaaatgtggtcacctgattaagcagcagggggtcataatgtcgtgcctcgattgcttcttggatgggggcaatccgtacctgttcgactacgcggtgtcccccgctttcttcctcgtgaaagcgcgaggaggaacgtgcaccctggcagcctcggaccccgccgacatcgtgatccaccgtgcccagcacctcctgaacagcgggttcgggacgtatagcctgttcaagaacaattgcgaggactttgcgatatactgcaagacggggctgctggtggagaccgctttcagcgtggggcgcagcgggcagctggcctccctcacggctgccttcagcgcggtggcctcgtcgccgctccggttcctgacgaccagcgctggtgggctggtggttgtgacgagcggcatgtactgcgtggggcgatatgtctcagatatcggtgttcgccgcgatgtcgtcaaagtgcccgtggagaggctggtggagcactggccgccgcgggatgttgctgttgctcctcctcaggaaagccatcaagaatgccaaggaaatgatgttgctcctcaagaatgccatggagacggcgatggcggctgcgtctcggagtcgctgagctaagctcttactaataggaaaaaggcagtgtgccattcgatctgttgccgattgtaccgattatgaatgtatcatcgtttatgttgctcctcaagaatgccaaggaaatgttgctcctcaagaatgccatggagacggccatggcggctgcgtctcggagtcgctgagctaactcttactgataggaaaaaggcagtgtgccattcgatctgttgtcgattgtaccgattgctctgcgctgtttgtattctgtgattctgtccatatgaatgtatcatcgtttttatttactgtatctgcattctggtaccttgaatggggaatcctgaaatcgatgcctgctgtcattgtccgacttctcggttcccattgaaccaagatatccagtgttttgcaggaatttggagctagatgcgtccaagcgagtgcttgctgctgcaattgtgtcaagctgtagactgattgaacaaaatccatacttttgggatactagtaagcagcgcacagatcgcatatcatttgacttacagcatacacattaattcttcaagtctcaacttggattacagcgagattaacgtgcgctcctccctaacacctctacgtcacatcccgtagttaaccggacgtagagagagagagagagagagagagagagagagagagagaatacatctattattcagatattattccaatgtgtttctggacaagtagcctaaactccgatcagtctcgagaagcctgcccgtgtgtgcaaaatccagaaatcacccaggacaaatttacatgatcccaaccgtatttgaggccattaacattgattaaagtcaaactatggccgttccgactccgaaggcgctatcatagttcctcaccatgttcttcgtcgagggcataccagcaacaacatcttcttcgatgccacattcgtttgtgccccttatgatcttgaagtacccatcctaccagtatcaccgaccaaacattattaatagctcaaaaaatacaaattatgcaacatttcacttattgaacttatatatttgccaaggacttacatcgccccatcctctgttccactggtttgcaagcagctgtaacacacaaaaggatgaaagaaagaaaattagtgcttaaatataggtttaattaatagataacgtaatatggggaatagacaagtacccagtaatcctcgccagcatccgtggttccccatccaatcaacttgacagcatgaccacccatcatgccacctgtgatgtgcttgtatactcctgatttgtagtgtgcaaaatccttcacaatgttggagcattaaatcaaatcaacaatgctatgcatcaaagagaaatcatactcttttctgatagacctcagaatgttataaatgaagtcacaaaacatgcgtaaaattagatgtgtagccaattgaaccaaactccaacgtttgaaagattactagtgtgcacatcttctcatgtagtgcaccagaaaaagataaatactccaggccccagaaaatatctaagaactactttcctgtttgggttattttcatcccccacccctcttcttccgtcttgttcttcctaagccttatctctatacgtaaagctctttttaagaagctttatattctgcacgtcatattttatttgaaagtgacaaagcagcaactgcagcctacagtccattttgatttctgctaaccaacaatcaacaatttggtgaaagagcatggaaaaaaaatagaaagtcaatggtacctcataaacggtgaaagcaacttctacagggccattttggtagacctctgccattatgtcatgtggatcagaatttactctgtatgcattgacactgaaatgcttcttttccagccaaacttggttctgcaccttgcatttcttctcgcacactggcgtaggataagcaggttcgcatcctggatgcttacaaccgacctgatcaaagtatggatcgcactgcaaaacaatggaaaatgtgcattttctgagtatatcaagctgaactaatgttgcaggagccgggaaaaaaatattcacatataggattactgctggatcatgcagaaacattcatgtcatagcatgtagaaaatggacaatacctcatcggtaacaacaccattccgaacaaagtagcgccatgccatgataggatagcctccatcacaaccatcgccgcacatgaaaccgcagcatgccactaggtcattgacagatagcgaaatgttctacaaggaataaaaaacagtagcttggctatgtgagcaaaggaacaataaattaagttagaagccttggccatgagaacggacttgtcattcatattcactgaccatgttgaaatgaatgcagaaacgatcctggagacactccacagcaccaaatgcccaacacgagccacagtgaccctgtcattgtcaaccaagacataatacctattatatcttgcattctaaaccctcatgggattaacaatttatggtggtgcgcgtagtttacctgatctgcgcatgaaaatcaacatttcccatggtttggtggaaaattattgaggaaatgaagaatggttagtgtattcattagaactaattacaggtcaaacattgaggtactaattgaacttaccaagtatggtcccaattgtgttacactgtgaccatgcagacctggcatcaaactcctttggaagcatcagcgatcttggataagttttgacagggacatcatttagcacactatgcggtgttggcttcactccaaggatatgtttgaattgcgcagtctgtacaggaggattattgaggccaccgaacaagcatgagataaatgttttgatgtatgcaatactaacaacaacaggaaggtgtccccgcaaaaaaaaaaaagaaaacaacaacaggagggtgttgttatttacagtatagtttgcaaagtatggattccgtgcagccgtccagccagcattgggatgcttgttgattgcctttatgatgtcgtcctgtgacaacaaaataccattgaatgatatgtcatgagtaaataagaaaatacaataaggtgagaagaacgaattgaaatagaaaggcataacctggatgattcttgaactgccgccctccttggtcatgagctggagatttgggattggctttgcagctctgcctgcctgtgcatgtgtacatacagatgtgattcagctcacaacataattcaaggtacagttccttctctgttttgttttgtgtagaggaaacatgaagcttttgtgtgcttgtattcttttatttttgtgagggaaagggaaattcattaaataaagtaaatttcagagaactgcaactattctatcgaaactatcggtttactacaactttagtcagacatttcagaaaactgcaacaatagtacacggtgttatcataaaactgcagctttatacacttgacgaatctagacccattagtcaggcatttatgtaaaactcacacagttacacatcgagcccacatgttagacacacgtggtgggttaaagttgtagtttattgataaaatcatttgctaaagttgtagctttgtgaaatggctgactaaagttgtagcaaagtgatatttttgatcaaataattgcagttctatgaaatttactcttaaataaagtgaactgtcggaaagggaaaattcattaatcatgagacaattcctcacacataagatgtgaaaatgaggtacaccaattataacactggaagcctgaaggagcttcctattttgtgaaggattagtcttttgtaactgactttccatatttctgttttgatcagaattcccctatttctggtcatgagcaactttgtctccctgaccctaagtatgcttaactcagatctatctttctccttgatataagcaaatctatgacaccactacagtccatttcaataatcagatgtccactgtagggctgtagagatgcctccaatgcacgcaagtgcgtttttctattcagtaatccatcctcagactaaggagagaactagcgcaaatagtaatggatggagcatatctgcggcagaaaatctgcctgccccaagaagaaatttcaattggattccaccagtaaagaatcgaagatacttgattggatcttagtgttagctgttggttttgtacagtaaaaaggtgaattgctggtcgaaatgtatggatagatttgagacggctagatcgcagaaagaaagaaagaaacaagtaaaggtgatgagaaaaggacctgggggccagcagcgacgaggatcagcagcagcagcagcagaggcatgcccatcttgttggattgcagctagggccgattgcctgtgttctgaaatctgaaggtgaggactgaggaggattcctcttcctctccactctccagacctacagcttgcaaaaatgaacaagtcaattaacaagaggatggatgtgggagtgggattaatggtaggagatgatagtggcagagcaaaatatctttggttgggataccttgaagagtcctccactccttgcgtgttgctgttggtgttgcttgcttctcttctcttctttcccctacctcagtcctcagcagctccccccggctgtgcccccggtctgtctctctcatttatttatagctgttgtgcctcttgctgccatcataaacaagaggggaaaaaataataattaaaaaaaagcatcaatagagatgggcgcgcaggtactaagagcaaaaagtttaatagtagtataaccaactattagctctaaatcatctatagctaatataatagtcaattcatataatagttgcttactatactattaatacctgattctacctatcatacacatattatatcttgaagtctgtattgcagctggctaaagatttatagcccgctactttttttcttactttctttatctcttttaaaatatgttaacgaggtgaggccgtgaggcgaggcacacgagacagagaccgctgattttttttccctatccttttccttgggagcactcgccgtctcgcccattcctccaccaactgatttccttgcgtgccgtgctcgccgttggctgttcttattgcgaccacgaccaactgaggcccccttcatttctccaactaattagacgaagataaaaattttcgtggcatgttttttaaattgcttaacagtatgtttcgtgcgaaaactttctatatgaaagttactcttaaatatcatattaatctatttttcaagtttataataattaaaacttaatcaatcatacgttaataccacattgttttgcataaaaaacataatcttcatcttcaggagaaaagaacaccacttgagatatattgagtatattataattaaggtaaatctaaaccgagagcgttctcagtttagttttaacgagtgacgcactcatacgcatacgtgagtgatccacacacttgttagtgccttagcggtcggttacaaaccattcattctatctgtcatatcatcttcattaaaaataccagagatagatacctaatgcttgtttccccacattgttgactctcgcgtcgccttccccatgggttgcaccggaggcgaaaacctcgccgctcccctcctcccccccccccactcctccttcgcctcgccaccgcgcgagtggccgccggcaacgccacgcggccgcaaggacggcggcggcggggcttcgcccacctcgtgcttgggcggctaggggagccactcggggtggcggcggtccggccaaatccgcgccgcaccgtctggatctagcgagagggcggcggcagttccgatcgacggaaggtggtgggacggaggaggcggctggcggcagcagtggaggtggccaatggcggtggggttagcgacgacgtatgatggcgatggccacgtctccgtggcgcgtggcgtcaagtggctgcgagcagtagggatgagacggtagcggggacggtgatggcatttggtggcgatggtggatgctacggatccggaacggccacgcccggatctagccgtcccgtgggtggatccggcaactccgcgctggatctggctggccacggcgcggcagtgtggcttcggcaggaggtcgacggctggacagcgagtggcagcgacggctgaacgacggtgtggtgtgggtgaacgatgatgacggcgaatgtgctcaagctgatgaaggtgccggcggctaccaaggttggcgcgggtggcaccggcacggaggccggtgccgggtgttcctggatcggtggccggcggaggctagcgcggcgcaaggacacgcgactggcggtggaggctggcacagtgcgacgagggtggccgtgtggcggcacgcggaggctagccggcggatggtgccgatgcagcggtgaccatgcgctgacgaaggattgacagcggtggagcatggtgcatcagttgtggatagacaggtggtcggcagcgggtgaaaacccagcccagacttggccgagctggcaacgagggcgttctcgagcgtccctttccctcttgagggccttgccatgctgtcccatctcctctagggggcctgtcgagtgaaaacctagtcctggtctccctgagacctcgacggacgacgacggcggtgctttcgccgctcctctccctggagacattgtctaggcacacctcttgacgaaacctccctgacaaacggtgcaagctcgctgtagattccagtcctcttgtgtcgaagctctagcttatgcaagttgaccacgtcggagggcctaggagggagagcgattccatcattctttctcaccctctctccttgaatcccaaagatgtggatagagtgcggttagtgtcggttgttaggatagtgttttaggtgatcccggttgtagctccattgttggcctagctgttggtatttcttaacgacattactagaaatataattcccagcaatggcgcataaatactcttggtatattatggttacagagttcattcgcaagcgcacggatataccattgtagcatttcacccgagagtattctaagggtatcgtatttgtttaatcccgtgggaagatcatagtagagagaaccgtactaataatttatatgttacttgtaataatcacagtataagcaggggttaagataaatcaagggtagagtgacacacaagcagggagctactcattctcaaactaaaatatctaagctaagtggaaagaaaatagaaaagagaatctattcatatacttctagtatacatatattctagttatacgattaactagctaataccctcttttcgatgccctcctagtacttcgagaagccacccttgactgccgagttcgttacgacagcccgtcatgaccatacaacggggttaaatacagaggagtacctgttgatggtcgttagcgattagtttcgaccgtcaatattaccaaaatagaggagaactagttaggcttgcaatacatatacatgttagaataataatattccactagtatttggttcactaacccttttgcagagaataaccataaagtagaggagaatcgacatcgaatcagacgataaatcaatcggtcgatgtcgagaatcagacttatgtaggaatgggccaagaacatagaattgacacgataaattgggccaaaattcacaagtctgcagtgagcaacagaagaggaggccacctgccaagtttgagccaggtgggcccagcccatggttcggccgaaccccctgcagcgccattcgatccaggtttctcttggacggttgagatggctccccaatgacggttagtgggtattaccgacctttccaaccatcacaactgtaattgggaggctataaaaggagctctcatcctcccttcactcacacacctcaagtaaagctttctcatattctctcaagtttagtttagtattcttaagctagtggaataggaatagagtagaaatcggagtccggaagccttcggaaaagttcgggtatggctctagtagctcttctcttctcttttgtaagctttgtattattattacaatactcttctttatacatttatggtattggaatactttctaagtatatgaatgccaactctatattatgttcatgttatactgattatactactagcttatctgggagatgctttggtgtgggtgtaatatttgcttatgcaattactctatgttatgacgatgatattagagtagtatctggtactttagacatgatgtctagattacgagatatcattatttgggttacgacctcccagggttataatcttgtatttttttcatgctttatcaatataaactttgcgctgtatggtgcgagtcgttcaaaaaaaaatgcttgtttccggtggttaggaatgcagatcaaagcaaatgtggaagcaaatgcagggttaatcaaccatctcatcgccaaaatccaacaaactacattcgctgatgtgtagcaagtgctcgtctccgtggattggcttgaccaacatctatcaactctggaaactggactacatttctttcttccttcctagcttcttactgaacgaattaactttccttcattgcttgtttgctcctccttttattgagcgatggtcgatccatttcagtttgacgagacagccgtactgaagcacttcagctggttggagagaagagacgacatactctaggaggcggccttcgaataccgtcatctcaactctcttcttaaacagatgacagtttaggctcgtcactgatgatctggtttggcgtaggggttcgatttcagttaagaaatttaaatttcggccattaaatcatccagagcaaaatatcgtagagtacccatgtcatgtgggggattcagttccagagaaggaggcctggcgcgacgggagaatcaagtgcggcaattgcttaggaatttggttttatctttttcttaatattagttaagtttgttagcaagttgttagaagtaagtttgctatttaaaggatgtactttggatgttttagatcaacaagaatcagattaatccttgtcgtgctgctcgactccggctccatgcacaacttcatcaactccaccgccgccgtatgcaccggcgtcgtccttgacccccgacatggccttcacatccgcgttgccaatggcgaccgcctggattgtgggggcgtcgcgcgtgacgtcccgttcaacaatggcgacacgacgttctgctccgacttcttcgccatccacctcgatacgtttgacgttgttctgggcgtccaatggctccaagattctaggtcccatccattgggactatgcgcaactcagcgtcacactcacacgcgcctcgctgcccgtcacctggcgggggattggcggcccctccggcgaccagggtggcctcgctttcacgtgtttcgggcccgatacattagctgatgagctagggagggctttagcactctcttcgctgccccgcacgggctgccaccgccgcgatcacgcgaccaccacatccatctgctaccggacacccgccccatggcagtccagccataccgctatgcccaacaccagaaggatgagctagcgcgacagtgtgcagacatgctcgcccaaggcatcattcgtccgagctcgtccaccttctctgcccctgtcctcctcgtagcacgacaacagttggcgcttttgtgtcgactaccgtgccctcaatgatcgcacgatgaaagacaagttcccaattccggtatcaacaaaacagtacaaaaacaagcataaacagtacatgtggatatttttaacatgtagatctcgattttagatgaatttagcaacttgaaccactggaatccgacttacgatgatttagttatgaatttccaaagtttaatcagattttcatctaatacaaaaaaaatattacgatttaaataaaagatttatggtgtcatcacgacatcatcgccggccatggcctggaccacaaggttaccagcgctacagagctcggttgggctttccgaagacaccaacatgaagaggatgacgacacgaactcaccgaagcaaagaactacgacgaacgatgacagacgatgaactccgacggcggcacggctcggctcgacgacggcgacggctctctggcgagatgcagcagcggcgaaggggcggacgggatgctcctccacctggctgttgatgcgaaaaatacacactggcctgggagatctgcttaactccagtgcaagtccaaagattgatgagatgcgggtgtgccagtcagtttgatcctgcaactgacaagatatgtaaacagcagataaaacagccgatcggctgacaagccgatggagtagttccagccgatagccgataatagccgatgccgataccagccgatagcgatagggtttaagcaatcggctatatgtccaatgtagataatgatatgaaggcaatcggctgatgatgatgtaataaaataacaatataatccagtataaaccaatcggcaaataatgatatgataaataagcatcgatccgaaggttaaagcacacatcggctggaggtccgatgtcatgaaatccacaagattagattaaacaatgaaacctttgttgtcatcggctaaatccaacttatatgtatgtgcaatccttatgagccgatgcaacgtccagataactcaccggctgaaaccccgatgaaacccttattggcaataaagaagcaggctggagattatggttctaagcacgacatagtagatcaaaattaactgatgcagcactaaatatgaaaagaaacataatatctagacaatcaagccgttgactgagttttcagggtggtagatgtctaagctaatctaatctagcaacacgatttagccgataccggcataaaccctaaaacgagaagcagccgatagagctaaattgatatgctaagactagattaacaaagacatatgataaataggtaggcaaatatatcatccaaaccagagcaatccaagaggtcgaatgtactgatgctgccttaaacgatgccgacgtaaacgatacaattgcctggacagtaggaacattggacttaccccttagccggagatcgaacaccgatgcagccccgcgtcaggtgccaagtcccgccagacgataaaataaagtagaaaaggtaaaaggtggcgatgcgccgaattgtattgatcgtagcgatagattacatagaccccgggtgttcatatttatacccatgggttgatacaagtccttttcggagaagaaagaaactttcctaaagataaaagaaaaagataaagtccttataggacactaaacacactttcctaaagataaaaggaaactaacagactattcctaattaatagataacttgccatgccacattctctttaaactcggtctcttctcgataagcttcctttagtagatcaatttccttaaccgaatatagcaagaatccgacaactgacgacttgacaactctcatcggctaatctcaggacttcaaagccgatgctgactctaagccgatgactattccgggcttaccaaatttcactgttaacactggtgaacccgacggtggtgacggaaggcggtggcaacgaccacagcgagggcgcaaaacggtttaagcagcgacggcgacggtgacgctagggctcacatggcggcggcgctacgggcgacggctgcagcttggacttgaggcaaacggaagaggacgactaggggatgctatttataggctcggattaaagagatcgaactctaaacgaaaggaatcgaaaccggaaaatccgatggttagtttggagagataaactcgaaacgagtttgatttagttgaaatacgaggaattaaactccggctttttgagggaaatgaaagaggacaacgaggagataaattcccctcatccaattggactcaggagcaactgatggaggtggattcaaaggggaggcggcagcagctcgggctcagtcggctggcctgaggttgaagaagaatagtgccgagggagtcattgtagactttcagagaaaaggaaaaagaaaagaaaagaaaagaaaggaatggagcagcaggctggcatggctggcagcccgagagaggctttgtgggccgaaaatgacccacggcctagagaaaggttttaatacttttccttatttgaataattcgtgaaatgctatttcgttgattaaaaatacttcccttgctcaaataattcccagaaaaaatccaggaaacagataaacaagcaaagtatttaatgaaatttcatctaactcagttttatgttgcgatttttcctagattattagagttcaacttgtaaacttttaaaataatttctaaaaatgcattaaagaatgaactattaaattaggcgattttcagggcgtgacaatcgctgtgtagaagaaatcgccaacaacaactctcaaactggctcaactagtaagatgttcttaatttctcattagccgatcatagccaatcttatgttaacacttatctctttttgcagcctcctcctcctcctcctccttcccctgtacaacaatcaccaagtaaccaaaccccatcggctacagggagccatcatgttgaagaagaagaacaaccagctgctcttgctatcccaatacgtttccctttgatacaagaacttagatcggctatatctatttagcttctaactattcctaaattattcttgcaggtcttagccgatctgttctcttttgacattaaggactatctcgatgagacag

SEQ ID NO: 5038 - DNA, 20781 bp, Oryza sativa
agtattttatagaaacaccccgaagttttccggttggctctacaaaatgatggactagacgacctgagtttgaagtctcaccccttttaattatttaatattaggtcattccttcgtatttagatcttttagggagcatttcatctaaacggcccgtacaaatgcacggacaggattaaaaggggaacgcactatattaattacaaacccagatcatagcaacgttgacgcgtgtttattaatcatggttgttgcaaccatgattaaagtcttaattaaggcctgccgttattggccacattgtcactcactcatgcaccaaagtgatcaatgcatcacgctatgcttttcccccctctaaaacttcgtaaggatattatagatttctaaagtttaaggtggtgttttcttttaattaagatatgctcttttcttctcaatttatcatcatatttgtaaataagcaacgatggtatttactcatgcacagataaataaagagatatgtaacgatgacattactcctcctattctgcacacgtaaacgaacaaacacgcaacgatgtcatttaattctgcaagaataaacaaatagaactggttagatgatgaataatttgaaaatatcttaagggatgattaaattgggatggagatagtggattttaccttaatttgcgttagtacactttttaaactactaaacattgtgcagaggtggctccaagtgggtgttcaggtggtctatggaccacctgaattttggctcaacgtatctcatttatcccaaatactcgacctagtaataacctattccattttccaccacgcccaattctaggtttatcgtgagtgcgtcatacatgcgcagttgttgtgctcatctcatgtccctcggctgcggtgctgctattcaagtatatatgctagaatttttagaaggtgaagtaggcacacccaacgggaatttcttggagccgccaatgacattgtattttgtacgaaaactcttcatatagaagttgttaaagtatcaaataaatctaggtttataataattaaaattaatttattatgtgctaatagcttttttaacatggcctaacttcatcttcatttttattagaaaagaacaccaacttaggccagatgaagtttcactgtgcacatttttgtagaaaaaaaataacatgctgaaattaatttccattttttgaatacatacaagggtggtttaatttgatcttggagtggactggtcgttgctctaactaattgtaaggttgtactatatgcaactaccattgcaggtatcgactagtgataaatagccccaaattccgtgaggctctgatcgatatatatacaaccgtgcatatactagtgtacagtgtactggatgatcgagttggtgacgcatctctatccttaacgcctgctttatttgtcatctgtcaccgaagagcggccaaatctcccacccactttcttcttcacgagattattaatttccctcctccccggcacgcagttaattaatttcaccttaatcacactcaacgacgtacgcatgaaccggctaatatgatatgtttttttatcccaacagtataatactcacttcgtcctaaattatagggcgcccccattttaacaaaaatcaatctcaataacttacctaataatcatactgagtatatctatactaagtgttatatcactagatttatattttgaaatactttcttgtgatgctaatttcatatttgttggaaacatactctctccaggttgataatacttgtcattttggacaagagcacggtctccaaaaaataattttgatcattatttttcattataatatgtataaaattgttaacaaatatatgattttattaaagtacttttaagactaatctatacatgtagtcaccatatttgaaacacaaatattttaaaaatgattcataatcaaatattctaaagtttgacctcacacttgtccaaacgacaagtattatcaacccggagggagtagcatgaaataaaatgctggtcaaagcatgtcattgaagacagtgtaagaaaaatatatgccttatcatttgggacagaggaagtagaatttattctggcttttactttataaaagctataaccagatattataaatattacaatacaaatgttatggattataaaatcataagttgatttaaaactacttaaaataccactcaaaagaaagatttttcatctatggttagtgagagtctgcatatccattgtttcttcacaatgccttacatgttagatgtaatcactatattccttaaaccaaaaatagaatctccgaaatcagcggtcgatcgaatcaagcacacatcactgccagcaactaatgtcgaaccaaagcgaaaagataaaccgaataaaaacttagctgtaaacaatcattcacccatatcttgcgaccaccatatccatcaaagccgattcaatgaaaatgcggtcactaacaatgccatatcaacatgaaacctccaatgaagcgcttttaagaaggccacaacatataggatcggtgtcacggttgctatttcaatcatccggactggttttcattcgaagactccacataaggcaatatcagaaaagagaatgtccattacaccgttcacatgcgtcaccaatgtcaatactccattgaccctagatctatggcgatttgagcttgacctcagcatcgagtggcggtagcgacaatgatggaggtgactagcaacgggaagagggacaagacgcccgtgccaacagcacaacgttgtcccaccatttaaagagactgatggtagcaatgggtagggtggaggctctctctcacagtggctcgatagtaacttcaatgggcataaagagcacatacttcggccatcctcaacctagaaactattaaatagtttccatacttgtcatgtcatatagacactatacatagaaactatatatctaatggatggtgtcttcaaattaaattctcatccaatcatctcccttctctctcctttatcgacctattctcttgtttcattcttcttggttctcgtgtagagacggtttcttcatcttttatctctctcctcattaactcttttgccacatcagatttttacttatgtgataatgtatttaatactatggacactatatgatatggagggatgtgaattgccttatgtatcaccaaattaaagccggatccggccaagccccgctacttccttcctcgaaaaccacatgttcgtttctggcgttcccctccagcggcatcaagaaaagaaaatcacctcgattacacgagatcccctgaacacgcaagggtgttagttaggtgcagacggtaagcgtagctagatttttcctgaaaaaaggaaagtatgtaacttactagatgacaggattaacatggtttgtatatgttagttgtacgtaatggtaatctgacagccatgcatgtacgtacctgtagctaatacttgtgtaatgcgcataagtagttaccatgttgtaacggggaaaaaaaaagggaaaatgcagcacaacggaactacatccattctcaaattgccagcttaggtagtacgtattgctgtgttttgtacagattttgatttttgggagcatggcagcaggtactagtactacgctactagtacttctgtagttctgtgcagaagcatgtgtacatgggagtgaaaccttccaacgtaatattgtcgttaacatgtgctttactttgatacccacacatgtcatcgaccacgtcactgaaaagttcacatcagaggaacttcttttgtgtatatggcatattggcgtacgcataacgccggagacagctcccgagcaaattgggcgatcatgaaaacaccggtgtataaaaaaaacactattaatcatggtttgggtcctagtggaaaaaactggaccgatgagtgacaaggacgacccctcggttcaccggtccgacggtctgaccgaggaaccgttggctgaaccacagttcaataactaatatatgcaatatgtatttcctctattacacaagtgaaaaagtgtaggatagctagagccaagtgcttctagtgcaaagacccaggtttgagtccccgcgccacaagcattatttatgttatttttgtacagacgaaatagtcacgtgggcctggactgggccttgatatagcccattatctcctttgtccggtccgaccaagacggtttaatgctaggtttattcaaaactcggccggttcagccggttcaatccgagttgaatacatgtccggtcattcagcttaaccgtaccgtgtagacctctggctcggttttgtccggttgaaccttcggtcaggttcgggtttttccactatggttcgggctcaacagcgctccgccacctccgccaccgcgtacgtgcgtgcgtgcgtgcagctagctaactaacgaatgaatggtagttaaggcagagccatcacaccgatcatggtcataaaaaacccttgttagtactgaacaggacaaagggcccggccgaccaaatcgccccctgcacgtgaatacgtgatcatatgccattgcattgccctgctcgatcaaacgaatcagctgcagagcctgcagccgcccgtaacagttactcgtacactactaataaaattttgcaatatttactcgctgtaagaaaagtaatttaaaattggtaatgaaccaggaattaatttcttcaaccaccggccatgactcgccatttacccgagttgttcactttgcttcaagacaacgaagtgagattgcttttacagttttacgtggctgcgaaaaataaagttaggcatgggcaacgtggcaaacacgtgcattatcagccttatgatgatcagcacaggtactaccacgcaacagcgagtagatattcatgctttcagatgcgccgcttacttacacacgaggcaacccatcgatcgatccatctgcattcgagctcacatttttcatcacaagaagggctgcaattaattaggcagctccatatcataagccaaagtttatacattaaaatttggatctgtttgaaaatataagtttttccgaaagttataatataaattataagatgaaaaataattgtgattggttgagatggaaaaaatagtgaaaaaatttaataacatgaggctgtttttagttgagataaaagaataaaagaaatatttaaactatgacataaaattttaattatattatattttagtacagtgggaacactttgttttgttaaggcagttgaacaaagaaagttggaacacatgtctcctccatgcggcgccagctagtctggttgacagtccacgtaagcaaagggcggccccacctgcagagcaggaaaaataaaacagacagaaaagggttggcatgtgggacccaccatccatcatcccaactcccagtctcccatccagattttccatttcattaattattaccgctccaaccactatcctaaagtagctaacatagggccggcaccggtcttccctgtgggccccaccagtcagcccccacccacacacactcttttctctctcctctctcctgattagcaacagtagcagcctcacttccactaatcacactctacagtctcactcctagaatctggtgcctccctctccctctctcatccacctccaacccaaacacaactttttaacagttaattaattagagattaaagcctttctctccccaatcccaagaagcaaacctagagagagagagagaaaatcatcagcaaaattaccaggagagggtgttcacctttgcccctgaagaagtggagattagtagggagagagagaaagcaattagccactaacagagagcaaagaggacaccagctgtgacttgacttacgagtccagtgacgcgtgaggcgccatggaaatggagatagaagcactactataaatatcatcaacgtattaaaatatagtaacctttgtatagataagatatatcttaatattaagaatttgatactcttcagattattggacacattctgatactatgtctagattcatagtattactatgaatttaaatactgcccaaatttataatattataatacgtcttatccgcttaaggttgctatattttttaatggagatagagagcaggagtagacaagaaaacctgggcgaggagagagaaagagagccaaggagagagagagagagtgtcctcatgtgccgtcagtgagagaggaagcctctcactctctccggtggagggaaaagcaccgaaaagcgcggcctttttttcttctttttttccctcccttgttcttccccacactccactccactcctcgcatcgcatcccatccatggccgcctccgccgtcgccgtcgcgttcgtcgtggcggtggccgccgtgctggccgcggcggcgtccgcggccgtgacgtacgaccggaaggctgtggtggtgaacgggcagcggaggatcctcatctccggctccatccactacccgaggagcacccccgaggcaaggcgcacacgcttccccttcctcctcctcaccgtgcttctccgacggcgacgcctcctcctctctctcgccggaggaatgccggcgaggcggctggttgcgtggctttgctatgcttgctaacttgtttgtggggggtggtgcttactgcttgggttgcagatgtggccggatctgatagagaaggccaaggacggcggcctcgacgtggtgcagacgtacgtcttctggaacggccacgagccgtcccccggccaggtagttaccggcaacaataaccgtgaaaacaagttgtttttcgtgttcttgatgtggttggtttggtttggttgatttctcgcagtactacttcgaggggaggtatgatctggtgcacttcatcaagctggtgaagcaggccggcctctacgtgaacctccgcattggcccctacgtctgcgccgagtggaacttcgggtaacagcaccaagaacatcttgtgttcttagttttcctgcacttgcagtaagtagccaattggtgtttgctgtgagatgtctgaatctgggggttatgggaagtggcagaagtctttttctttttctttttggtgggtgtgtcaaattgctctatttataaggtagttaagttgatattgttgctgatgggggctgtttgtggctgcagtttggctgacgaggaataattagaatagaattcttgatgttgagttgatttgaaatatgctaattttatgctcctttaaccccttttggtcgcagtgggttccctgtttggctcaagtatgtccccggcatcagctttaggactgataatgagccgttcaaggcaagaatcctttgacagcactaactttaacctttactaatctccttgacccctctgtaaaaatttcctatgatctctgtaaaaaaaaaagaattgacttttgcgtgattctccaaacaggctgagatgcagaagttcaccacaaagatcgtcgaaatgatgaagtcggaagggctctttgaatggcaaggagggcctataatcctctcccaggtacgcttgtaatcgaaggtgcattcttggtatttgttgatggcattctcttcaatgcaacctacttttctgagtgtcccctgcagatagagaacgagtttgggcccttggagtgggatcaaggtgagcctgccaaggcatatgcatcatgggcagctaacatggcagttgcgctcaacaccagtgtgccatggatcatgtgcaaagaagatgatgcccctgatccaattgtatgtactgtaccacttctctttaatacagagtacatgtactgggggaagcagttcctcatttctttaatgttctttgtgaccgttgtccaagaaatgaaaggatatgatcgatcatacattgaatttcctttgttttaaaataaaatctcctccgctcttacatgacacatctcatacagtacatgccaattggggtagaaggtttcagctgagctacgtcttacttcgatttatctatgacagattaatacatgcaatggattttactgtgattggttctccccaaataaacctcacaaacctaccatgtggactgaagcctggactgcttggtagtgtcccttttctttattttcctgaggttcttatgatggctatgtgcttagctttcgccttacgtatatcttctgttccctctgcaggtatacaggctttggtattccagttccacatagaccagtagaggatctagcatatggtgtcgccaagtttatccagaagggtggctcttttgtgaattattacatggtaagtcccatcaatacgctttaaagctgaaatgtaccatgttattgagtagtctcaagctgtgacactgttgcttttcagtatcatggtggaacaaactttggacgcacagctggtggcccattcattgccactagttatgactatgatgctcctattgatgaatatggtgagttaagcactttacatatcttgcatatgattgcttattaaaccttaagaaatacagtatccattagtaagaggtatatactttgcacctgtttcctgcatgtaggcatttctgctatccaaacattacagacatgttacatctggtaaataatttgcaacacaacgggtgatgctctacgcaaaacgaaaagatatgggttgtaaaaggtccccttttttttctaccatctctgatactatgcaaatatgtaaaagttttactatatttttgttactgaaatttcactcaaaactattctagtagagctttattgaaacttttagtgtagtttgtttttgtatttgtaaggcatcttttaaatttgtctagatttgattttgtgaagtttttgaatttatggggattcaccaaacggtaataatttatttgagttaaaatatttttcattttaccccccgacaaaataaacatgtgagctgttggatgtttatctagttattgaaaaaagtgagttaaaaataagaaggaaaaactggatacctgctgaataggatggtccctatgtgctacatcatgtttaccaaattgatatgaactttcttcccttcgctacctcaggtttgttgagagaaccaaaatggggccacttgaagcagttgcataaagccataaaactttgtgaacctgccttggttgcaggagaccccattgtaacttcacttggaaatgctcagaaggttcgttacacattccgttctctattgtcccttagacctacaatattttgttctgaactgactcctccttaatttgctgttcagtcatcagtttttagatcaagcacaggagcttgtgcagctttccttgagaacaaggataaagtatcttatgcaagggtagcatttaatggcatgcactatgacctgcctccgtggtccataagtattctcccagactgcaaaacgacagtcttcaatactgctagggtgagatagatactttagtttttttttttttggttgtcttgtccatgctataattttcttcttaatatacttgagttgcttgttcaaaagtgggtttttgttgctgcattttaatacatgtagcatatccttggtacaactgttaatgaaaatcaatatttttttttataaatttattccacatccaatctgaatttggatccttttatcatgtgatcttgttaatatctatcaattgaaaatgttaaattgtgattaatcttaaataaatttatcatgtaggtgggaagtcagatttcacagatgaaaatggaatgggctggaggatttgcatggcaatcatacaacgaggagataaattcctttggtgaggatccacttacaacagtaggattactggaacaaataaatgtgacgagggataacacagactacttatggtataccacatagtaagtactaagaagctgaacccccaaaaatacaaatacatggtgatgtgcaataccatgtactaaacatttttcactttcagtgtcgatgttgcccaggatgagcagttccttagcaatggggagaatctcaagcttactgtgatgtcagctggtcatgctttgcatattttcattaatggacaactgaaaggtaaaacagataaacctatactctgtatgcccgccatatgcaggtgtttcttgatcctcaatacacttttcaatttgctggcaggaactgtttatggcagcgtagatgacccaaaactgacttatactgggaatgtgaagctctgggcaggcagcaatacaatttcctgcttaagtatagcagttggcctcccagtaagtagatgttcagcctcaggctcaaatagtactcttggttatatgctgtttgatccatttcagactcagttaccattttcctctatcatagaatgtgggagaacattttgagacttggaatgctgggattcttggcccagtgacgcttgatggcctgaatgagggaagaagggatctgacatggcagaaatggacttatcaggtatatatcgtttgccatttgatgaggtaataactgtttatctaataatctggagtgtacatgagaaattgttgtgtttgtacaggtaggactgaaaggtgagtctatgagtcttcattcactcagtggaagctcaacagtggagtggggagaacctgtgcagaagcagcctctaacatggtacaaggtaatgaagaaattattaattcttgctcctataataaaataatgtctatcattacactaatcctgttatgtcgcctgtttaggcttttttcaatgcaccggatggtgatgagccattagctttggacatgagtagtatggggaaggggcaaatctggataaatggacaaggtattgggcgatattggcctggctacaaggcttctggaaactgtggaacctgtgattatcgaggtgaatacgatgaaacgaagtgtcaaaccaactgtggtgactcttctcagagatggtaggcattccataaaagtatcattctatgataacattgtagtactgtttacacgagaagctcttataaatctaatgtcatggtctgtcaggtaccatgttcctcgttcatggcttagtcccacaggaaaccttttggtcatattcgaggagtggggtggtgaccctactggaatctcaatggtcaaaagaagcatcggaagtgtctgcgctgatgtgtccgaatgccagccatcaatgaagaactggcatacaaaagactacgagaaagcaaaagtccacctccaatgtgacaatggacagaagataactgaaataaaatttgctagctttggcacaccacagggctcctgtggaagctacaccgaaggaggctgccatgcgcacaagtcgtacgacatattttggaaggtaaaggatttgcgttcactgtgtcgactaaagcagcactgctaaagttagtctgtctgtctataccatgaacttatgtcatgtattgatgcctgttgcagaactgcgtcggtcaagaacgctgcggggtaagcgttgttccagaaatatttggtggagatccatgcccagggacaatgaaacgggctgttgttgaggctatatgcggttgagaaccgcaaactcagatcctcccaaatcatcctatatcttagtttcgacacggttttcggcttaccgaccttctggcaagaggtgaaagtcacagcaacagtgacgcacggaccgtcagaagttacagaaaatttagttgtaattgaagcatcagtgtatgtacattattctacatagaaattcactgggaaggaaagattcaggactctgcagtgcaggaatgggaaaccaaggggctgtatgtatggtcctctggacagtattggtttttggctggggaagggcgcataggagactctgctgatacatgagtccatatgcgcaatggcttttgcatattggattggaggatcaactctgtttcatacgtgatgtgatgattcatttttaagctcactgaaaactactgcaatgtaatgctggtaatgtgcagggtccatcattgatgtattaaattgtcctcttaattagctaattagcaatgtactaccttttcagcttataaataaatctgctgtatgttattcaaccgtatgtgaatgaattctctcaggtggtcatctcaatgcccacttgatgattaatctgatacacattcctgccccatttttgactgattaaagcagtggcgaacccaggatttttatcctgggtgtgcctacagcaagccaaaacaaaaacctcaagcacaaaagtacagttacatcttaaattatccaaatgtagtacaattagttcattttggggctcctcactccgaattgaattagatgctcttgaagttgaatttgatgctctaccactacctacagttatatcttcttgctcttcattttggggctgtactggtggtggtgttggtgaagcctgagcgtgtggtgattcctctgttgggattgaagaagaagaaaacaacaccaattgcaaagtctcattttctcgagtttcttcagttactcttccttcctatagttaccccatgagaaatgtgaagccctgtcctaggagatgcagaatctgaattagggaccttgctcaataaagaaagtatgcccatatttctgttgttcctttttatatctgacaaattaattcaacttgacctctgcctaagtgcctactgcctacaaaatacaaatcacaaaaaatgtaccctcaatttcagtttccaactttgcaaattgaatcgatgaatcgaatacaaaaatctcaaagtgaattagtgaaatgacatacctgcagctggatggactgctgagcgactgagctgaggactaggagctaccaagctgagcagctgccttgttgctgccgggctggcctgccagcgccacagaacccatgccgaatcgccgacccgccggccgccgcccggcgcccattgccagtcgccaccacggcaccaccgccggccgccgcagtgcacgagaaactgagaaagggattgggaaaagaggaaccctagagacgagaaaattgcgattctactgtcgtaaaatggtttcgctggataatgcaatcctaaaagtgttcactaaaatgctattttggtctttttttaatagaaatgattttactctattttatttttttgtcctgaccaaaatacccttctctcttatctctttgaccagatcgaatcgatccagaaacgccaagaagcaggtagttgcagagcaggaatgccctgtgcgtgtgcacccccgccattgccgcaagcacaagcaagaagaagctttctcacgatctcttcaaggatttgcgaggaatcgttggctgagagagtgcgagatgaagtggagagcgagagatcgatgagttgaagggagagtctcgccggcgaggaggggatttaacgaccgttggtgctctctctgtcttcggcatcggctctagcgcccctccgcatcgactccggctccggcgccggcgctggcccccggcgctcccccacttgctcctcccctccctcctcccccaatccactcgcgtcgccgcctcccttcgcgtccgccaacaccggccgatgcgctcggagtggcgagctcctcctggtcggcaagcaccatctccgcatcctccttgccgttggtgcgcccaccgctccaggcagcggcggccatgggatcgacatggagcccgttcttctcggtgaacccggggccggcggcggcggatgaggaggaggggccggggaacatggcgcggccacaccggtggcggcggcgaggccgcgataggatgggggtaggggcggcacgccgcgccgtggcccggccgccggcgcgagggttttgggcgagtcggtcgccggcggcttctggtgcggccgctggtggagcgacctcgctagagatcgggatggtgggggaggaagaggggaaagagaggggagagtgtatgacaggtggggcccgcgtcaggggcattttggtctaggaaaaatataaaattgagaaaaaatatttatattcacacaaaagaatgaaaatagcattttggtgaaacctctcagtttaggatggcataacataccagtgaatcagtttgaagcgatagcattttaacgaaaccactcttttacgataatataatccaattttctcccagactctagcagcacatggcacattggctagcagattgggctgcctccctgctagcacgttgggccttgtaggccttgcttttgatccaacgaggcaccaatctattgatttggcccgctgctaatactacatactatatttttatgccggtgcacacccggcaccccacataggtccgccgctgcaacattatattcaacaagaaaaagttacaacctcattcttacaaaagagatataaacaaaacttgccaactaaattacttattggcattgcttgtacttgggtttgctaacatcacgtcaccaaggaatgggtcttcatgcaactcaatcccagtgcgcaaaacaccgtcatttcttacttgaaactcctccaaaaatttgtctagcaatgaatcatcagccattcccaattcatcccagctaatactatatttattatcatccgcaacacttgcattgattattcctatatcaatgctttcatatatctcattttgctgatgatgctcaacatttgtttccctctcatgttcttcttgaccattgataactatagcagcaacatcactagcaacatccatggtgccactaatatctacaccctccggtatagcaacaattgtgtcattgttactatgtaagaacgaaggacatgatgactctcgaaggatagcagggttaaaacgtccagagggagcaagacttgcttgatttgcaacattaatgtcaccaatactagatccactaggatcactcgagttgatcatgttcattgtgcagatggaatgagagtttggtggatttagtgatgtccctgcaacttctagtaaagcaggactcatcatacttgcaagaactgtggggctactacaaccaacaatattgtctgggatattattgttggcgaacgtgctgatattgtttccttgtaagcctagaccccttgctatgttgtgaatgagcaacattgatctattcactatgggtgcagaagccatcatcggggacacttcttgtgataaggatggatattggaacggtatatagtgagaaattggtggcattaaactaggagtaatagggatggccggagtatatgtaggagcaaattgtggcagctgatgttggtagggcatgtgagatgtggaaggttgatcgactaacctacaacgctttgtagtaagtgtagaacaaggagtggatttgtgtttcacacgatgattatggaggatatcaacaagaaagtcataagactctgtggaggcaatggctttagcaatatccgtgtctagtatgatgcaacgattatgggattgagcagatgcccatgcacgcacagcaagttcttgtacgaagagctcacacatcttcgataagaatgctggcatgtcaaaggtcatcatcatgttacccttttgagaagatacgatcttcttcaagcgggccatagggatcgcatgctcgctaaagtcctttgttgtttcaatctccttttgtcgatccctccaaaattcatccatttgttgttgagcttttggcgccagtagtctcaacgatctaggtacgtccaaagtttgctccattccttcccttcgttgctctgaataatagacctacatagcaagcacacacttttgttacttctttttcttacttttctagttcaaaaattagcaaaacgatgttacattgcagtctaacaaaaagagatagctagcttaattacaaatcaaatagcattgctcaaatcacaaattttcacaagtaccagtacaaaaactaattaatactaggcacaagaataataagctagtaggtgcattaccttacttgagctgcaactacagaaaatgctacctattagcactaattggttggtagtatgaagatgaacacaatatgacacgaggatgaacatagtatgcaaggtggggtggtttatataggcctaaaagattctggtttctatgatatctgtattgttgagaagggagacgaaaaagagttgaagaaagaaaaaaaggtttattagtttcttgtgggtttggtgaaatcttttagccttgcgtgtatcttttccagtgaaacagctagctttaatatatgtggggctcacaaggctaaaccatgcattccacacttcttatgctaaagacaaccaagataaagtagtgcagtttatttgcgtaacatattagtcatgtcacgaattgacttgcttgttaattgaacatatatttgtttgtcctctcctataccatgcatatgcatcatgatttcaaattgatgtgtcatacatgctaatctatctctaagttagctagctgatcaacggacggttagctctagatgtgtgcaagatatatcgaggagtttgttttgctttagattcacgcatatatgtgatagcttgattccagccaatacatgctacgtggtttaatgatggatggatgcatggattgatgactagatcagtagataagtactcgatccattgctagcaaactaagtgtactttcggcgcctttcctgctggagaattttgtattttagcttaatatcctacatttcttttgtacattgtgtaacgcaagcaattgtctaatgacctatttaataataaaccatgatgtccatacatatatgcatgatggactttggctggcctacttgcttgcagtaagtgcatggtttgcatgcataccatgcatagatcatgtgttgtttgtggtcctagctacataacttatactccatgtacttaatactttattacttttgtatgttattcagcaaccactagctaacaagctttgtatgttagtactttacttttgaatgctaatatagagtttgtttgccacattgctctctctcatgactcgccatcttttcaattttatacatacttaattacttttgtatgttagcagttagctacaagcgacgcctaaggaaaacgggctaatcaaatataccactccaaattgtacattgataaataaactcatggaacttgctagcttaacaaagagtaccataccacatacaaataaatagtgaaacacaataaaagataaacgaaatagttcaaggcatatatagcactccctttattccccaaaaaacttgattcctagtcatcccaagtattttagtagttaaggataaaaacaaaaagtgcccctcactaatagaaaagtagtattttttttttgacatgaaaatagcaggagagactcctactgcaatatatatatatatatatatatatatatatatatatatatatattataagagagagatatttacaaaggaagggagagagggagaaaacagaaaacagaaaatttacataaagctatctatccatgattgccaaagtatagaaaagtagtattagtataaggggtatggaataaataaaacttcataatttatagaccgatggtaggtaagctaggggctataaatcaagtactttacccgcaaaaacaaaagaaaccaagtctttttttgaataaattttaaatgctagaaatcaagtctttctgggtggagaaaatcacataaactagagggacttacatgggtataggtagatcctgcctttggctcgatacatgcaagatgatgtagatggaaccttgtttgtaacccacaaattttcatgtttctagttcctactatagttgaactattacatgtgatattcctgtaaaattcctgcgtccccgacctaatcttcaccctcatgttataaaaaaaacatcacttgaattagtaaattaatattagagactaattattggttgcaaaaaaaaacttttgagttgaaaaactcataaggagaagataaaattaccttgtcatttcgatatatggcatgtatcaactttgcccatagataattataacactggtatcaaccacgaacagtatactcatcaataacgaaagagatccacgggtagcataaaaggctaaatatacacgaagaggaagagatgattgaggcctagtagcccttagagggtaagtataacaactgagcgctaggagatcaaggctagagaagctgctcaatccatcggtgctcctagtgcacattgtgggtcgacttttatagtgctttctatgctttgggacttcatctttctggagggttcggtttggcacgatatgccaattgtcatgtgctccgcccgttttgttttcaaagcatattgtatttcaatcattttgcgaatataagtatgcacataaatttactgtttttcctattttcccacaataaatcagatagcaattctcttctataatttaatgaggaacatcttcctcaccgatcacccatccataggttttactaagtttttttgaggtagtgaagtgtgcatgcacgatcattttatcacctatatattttttttactcatatataatcctctcaatacttgtgtggttgctaacgatggaaatgtctccatttggggcagggccctacaaagaccagggacatctagccctatatatctaattagatggttagccgaaatcatataggccatggatgagtccatgtacttttgatcggcgaggtcttggaagtataaaatgcatggaacaaagtggcataatagaccaaatagagatataaagatacaagtatagtcctaacctatgtggctcgtttagttgatattagtcccatatgatgtttacatggcactacaaggaaaaagtaaacgacaaaaaatcaatagcaccctgcatgtcaattggtgttagttaaaaaaatagtaaaaatgtttgtgaggcccacatgtttgttttagggcctgttcactttgatgccaaaaaaaaccttaccaatttttggcattgccaaaattttggcatagttgccgaaattttggcaacttgccaaaaattttggcaggatttcttatatagttaccaaaatttggcagtaaactaaatgcagccattttttttcgattttgctatatctcactcgaaagatttttttcttatctctcactcgattttctcactcaaatttacagtgcattttcttgtaagttacagtgtaatttatgaaacttacactgtaacttttgtaagttacactgtaatttttgaatcttcgcatgtaaattttaaattttgtattggatttggtctttttcttgaggatatggtaatttagtgtccattatggtgtttcttaattgctttttgctttttattatatctatcggattttaatccaaagattaaaaatctgtgtgatacgatcataaaaatctttcgaaagatgtataggtactcccttttttttgacaactttaccaaaacttggtaaggttgaaaatggcattaaagtgaacaggcccttaatgacacaataaacagtgcatgggctaactcggtgacctacgatgaaaattaaggcccaatatcatccaaaagtgcaatgccgccggctggcatagagataaattagcattttgattaatacatttgttgtgtgtgtctatatatatatatatatatccgtgtattaatacccttcagtcttatcaaattttcttccgtgtatatatatctgtgggcgatcgctactagtactacctagtagtaatagattagtattgtgatttatacatttgttgtattaatgaccttatggtcacaagacccatggctacctacctagccaggggcgggcccactagtgattcaagggtattcagatgtatacccaagatttttggacaaaaataagtatacgtgctctttacttcgtatatgtattcaaaaaattaaaaaagaacgcttaaattagtcatcttgagccctgtttcatcatttatactctattgggccgaaatttcccactcccctccactttcttcttagcctgcactcagtttagaccgcaactagtccatttcccctccccgcctaggcacagcaaacaaaatccttaattcccaaatcgggcaaaccctaaccgagtgaggagaggacgtgcggcgcggcgacggctcgggcgtgcggcggcgactacattgactgcggtgtgcacggccacgtcggcccgccaatccgccatggcgctagcgccactgcccactgagctgaaccgagcgctgaggagcaggcgagcagcctgcagccaagcccctcctgggctcctaacctccttcaccggtagtccggttcgtcctccttctcctgttccccagcttcctattgattgttgtttggtgaaagtgttgtttggtgaaatggattgggaactacattcagtgatttagtatacttgcttgcttgcttagtttgtagaattgtagttgcatagttgagtatttgagtaattgagtagtggtctagtggacactgggcagtagttcatagttcttac

SEQ ID NO: 5039 - DNA, 7360 bp, Oryza sativa
tctatattaatagatgatggtccatctatgcaagcggtccttctaccgccagtggttgcttaagtgggccgccagaaaaaataattgcattttccctaccggtctgtataacacaaccgctagcaaaaattatccatcttcgctggcggcacacataagtgaccgctagcgaaaatagacatatcttcactggcagctggtacaacgcgaccgccagcgaagatccattttcgctggcggtcggtgccccttaccccctcgttacaattttgctggcggttttggcatttctccgccagcgaaaatcatataccaatgccatgaaaaatcgtttttctagtagtgtaactttgttgttacttttaaccctacaaaatcgaatttggtagaattagatgtgtgtcgacggactatacccgcagacgatatttgtagagtatgatgatcgttggaaccagggtatacatgagattgaggcatatgagacgaaagacagagatttttatacagggtcagaccccttaactggcaggtaatagactaacagccatactcctattggttgaaaccggtgttgcttttatatatcagtatcatacaagttcaatatttgggatgacctaatctaatctagtcattgtcggcttggaggcatggagctctcacatgtagtcgatagctagtataggtttcttccttgaatatgaactcggtgaaattggagatagctctagatctctcatgtcgacctctgaaactcctacattgggtttgtctatttctgtattggcttgtattccgttgaattgtcctctcttctcctaggggttcttgtatttatagcgaagatcattttcctctctaagttgaacttgaagaaatataacaggatatagactaaggagaccttatcttccccaactaggattctaacaccttttatttcaggaagataatttccttctttatccgccgtattttcttaatcaaagtatatcttctcatatactattagatatatagtatttttgtatatcacgaacccatgtataagaggtatgccttatccttgacactagccatgtgttcttaaagtcttatcaaagtttttaaagtttttaagagtgaacttttgaaatttgataaaatatcaatattaagaatgtgtttattttgttgccctaccaaatttgaaagtgaagttggtaacaaagtgaacaacctgcaaaggattaagcaattcttagttaaaaaaccagttaaattagtggttatgaagcctaagataattgataagagtgcttaaagtgtacaaccgaataaggccttagaaattaaacaactcctatttttttttattttaatatataccctcacattatattggctttgttcggatgatatagttgcagtagcgttgcggctgtgctgtagccagctagccagcagttacatgagttgcttccatccagtattgagcagttgcttcttgcagctgtgtgtctgtgtagctgaatggctagaatgtataacataggctagaacgctgcaacaatggtctaccgaacaagcctattatgtttaaagatttctagctccatttttgttttttttaaatcactcttacaattttcagaataggttttttttcatggctatcttaaaaaaattaaggctcacgacaatgatataaacatgtgaaagatttcatttttttttataagaaacaaatcactacctcatgatgtaattctttggcaacgtgtaagaatgaagccggcaagaagcgaagctcgatggtcagcaacgacaggacacggctgctattccgcttctttccgctcggaccagcccactaccggcccactactgaagtgaaaccaccctccgccgccgccgccgctcgccgtagtcacctccgccgccaccctctcttcccagtgctacctccccgccccgccgctttgccgcctccggctgaggcgaatttccagtatccaagccagtcggacataagtaagggcggggaggaagccgtgcctgcgagtttcgaccatggaaggaggcggcgagcgcgcggcggaggcggaggagtaccactgccacgacttcgagtgggaggacctccgggcggaggtggaagccaaccctgccttctcctaccacctctccccatttcccacgaccgtcggcaccccggagacgccgccgccgccgccgccctcggaggcctggacgagcttccaccgtcgccacacatgcggcaagtttttcaaggtttcaatctccgctctcctccctgttaccctgcgcagatctgtcgtctactttttttttccggactgcgcaaatcgttaggaattaggatttctattgtgcgagatagatgttcttcgtcgtggagacctccagtcctccacacttgttgaagctgcgttgttgttgttgtgatgtgagctaggtaggcaggagatcgagggaatgacagtgccaccgtgttccactgtttctcgaggcatgaaattagaacggaactccccatggtaatgcaatcccttgcatagatcgacacgatggcctgtaataaattccatacatttgttaccagatcgtccaatcggagatgatggtttggaataatatgctgctctgtttattctcccatgttattcatggcttgaggggcatatatcatgatggatattacgggccttgtggacctcttcgcagcgcagcatcttgttcgtatgagttttgactctttgagtcctacactagtaactcataccacagggttgctatttacatcaatcgtgtttcctttgtgttaggtgatctagtgtttttctccacattttccacagtttgctgctattgtgcttgggtacaatgatatcaagaaaatgtgacctagactttttctgtgaataggtaaggataatatgaattgatgtagtaagacactataactaaattttaaggaaacaaataagtacttttaaggaaacaagtaactaacctgatcatctcattttgttaggaaagaaggtatttgctaaaggaatttccagaacttcttaacagcaaggatagtgcaaaggttttagaggtgggttgtgggaatggaagcactgttgttcccattttacggtaatgtcctccaaagcattgttgtatttagtaaaaaaatatctatttgtagttgcaaatgcaaatcgttcaatgcttattttttttgttatagagtaattaaacattgatgtaggattatagccgcaaatatatttggtactttggttatcaaagtaaataatctagacaaaataaaaagagaaaaaaaacaacatgcactttttaacacgcacactggtgattaaacagctaatggtcactagtttgctagtcaaattgccagtatgctggtcagacacatattctcgtgacatttcttacctgccaacgtgctgcataaaagaattgtacccaatacaaacaaaagtgatttcttgctttttgcttagacttcttggaattccatttccatgttaggcatgtgcatatttctcacttaagaaatcatccaatccagcacaaagtccatgaagtatacttcaatctccaccgatccagcataatatcaaagcaaatcaagcgatctccatgagatgcttttaatcgctcgttgccattggcatgcagctgatgtagtctggttctgaattttttccttgtttaactgccagttctgtactgtttaactattatgctttctagctcagagttggtttggaactttggatttgtcaagttcatgcatctttgaggataaagaatacttttgcctatgggcatttgaaaactgttgacacccagcatcaacaaatacttctcctttcaatttcttctgcttctgaagttatacataatcctggaatgtaaaattttctgtctttcttttctttctttgtttgtaacatctgatgatttcagtttactatatcatactttttgttaactagaaaacttgttaaatttcattcttttttatttttcccctgaaaagactatttttggtttgccacttttccaacattctgttctgtgcatggtgctttaatcagtactagtgatgtatttattaaggaattttatcgcaaactggatagctcaataatgctatgaacaatcattgtaatatcttcattgaagtgatgcatattggatcaactttcaattagcgatgaatatgcaactcaagcactttatggattaacacttatggcatgatactctaattatgtatttataattgggcgagagcaaaaagaatagaattaccgctatatacaaccttttaggagcatacatatatgggatggaagttgcagataaacttcagagttgaacgtgcttgccataacttgaagtttatgtagttcatggtttaagtgattgcctcgtcataactactaatgatgacatcgttgctatctactctttctacagctctagtccaagcacaactgtatatgcttgtgattgtagcaaagaaactctggagaaggcaaatgagattgtttgcagcacaaaaggagttgaagtcaaggataggttccatccttttttactggatgcttcgaaggaaacttttccagattggttgttctgcaaatcctgtcgaagtccatgtgcgaaggatgttgaccttttactagtttaattaattgttttgaaattttcttttacccgaattatctactccaataatgtttgattcgatggtaccttttcctttcaggctcaagtaattgtaatatgatagaagaataccctgcctttctcagagacaatccatgttgtgttgatggtgtggattttatcactatggttggtagcactatctttaccctattttttgtcaaagcacttccattagcattataatgttgccatgctgtgagttctgaatgtatattgtaaaagtcaaacctccactatttatgctcttgtttacatcaagtttgtatgtacgcttttcagatattcacattatcagccataccttttgacaatatgctagctacactagagcgttgtgtatctgttctaaaaccaggtggccttgttttgtttagggactacggtaatgccctggccatactattgtattatatatcattgatcaataatcttgctgacatctctttattgtattaggactctatgacatgacaatgcttcggtttttacctcaccaaagagtgggattccgggaatacatgcgctcagatggcaccctttcatacttcttcacattagatacagtgagagaactctttcatgcctctggactactagaggtaactcggattgttttgacatgttctcagttttctagttactttccacctttctttgcccctgcatgtgcccctcatggtagcattcaatattttatgaattaaagatgtatgccttagtcgattgtttcgttccttgttagaacttctgtgcagatcataataaatgcatcagaattgctcttatcactattaaaattactttgtaccaaaccaatgtatcataatttctgtttcgctccaaaataatccagctatatatgattaaaatcatgagatatatttcaggcttctgtatatttgagtcatctgaaatttttacatttttgtccttttcgaaaacttattttataaatggacccctggaaaaacttattccgggagtggtcctttttggtgcaccagagtggctggcgccgtactccaacatagcggcgctagccaccctggcaccgtgaccgtgccaccttggcacaagggcaagcgttgaaggggtgacgtggcaaatgggggcgccagccactttggcgccgcccctcataccatggcgccagtcaccctggcgcacccctcctagggggccaagctctaaccttctgacttaggcgggaggctggcgccacacaccccaagcacagcgccaggttggctggcgccggccccccacccacccccgaggacttctgcctcggccgaattgctggcgctgcccctcgaagcatggcaccagcgtgcttggcgctgctcccccaacccgtagatcttctgccttgggcgggtggatggcgctgccccctatagcacgacacaagggtgactagcgccgcccaccaccccccgaggccttctgcctcgaacgattagctggcgccgccccctaacacggcgccagggtggctggcgcccgacctcttcctccctgccaacttcaaatttcatttggacagtttgcaaacaatgcaaatatcgacaccaaatcacagtaaacatacatatcacaaaacaggttacacagcaaatattgacaccaaatcacatatcacatagtccacaagataactagattgacgaaaaagtccacaagtccacaactccatcacatattccacacatcaaacaatactacaaatccatcacgtacttcatacaaccaacaagtccaaaagtccgtgaaacaagttaacatatgacacatagatcaacttcatagaaatcactttttccgttggcgccgaatagcttgtgagcccggagtgtatctacatttgaaaaaccaatgtttaaaacatttaaaaaacaaagtgagggaaatcaaataacacttgagaatggtaagctcattttacctctttttcgctggccgagtggatcacaagttgtattgggtgggctgtgatgcatgaggtgcatcggagactgcgacatgcctatctcctcggcgtctggtgcgatgtagccctcatcctcctcctcctcctcctcctcgtcgtcgccgctaggtggagcctgtgccttcccctttccccttccctgtggaatgcgtgacgacgacgaaccaccaacttgttcacgctcttctatcctgatggagtgtcgagcagtacttggacacacggattgaggtagtggtggtggtactctccgcggttggtacacgtcgtccaatccaaccgacctgtaacctaatcttgcagcaagtttgcggcacctttggcgaactttttgaattaaaaaaatagaagtttgttaggcataagtcaagtaatgcaaagtgttaaatcatttttacctctaagacattgcgaagtgtgttctccgtatcttcaccaccccttggagatcagagggcatgtcccatttaattcatactcctaaggagctctctggactaaaagcatgagaagatgtatattagggtttagggtgcaaatggaaatcattttgacaaatgcaagaaacttacgactctgtctctaagtggggcgtgctccatttgatat

SEQ ID NO: 5040 - DNA, 10225 bp, Oryza sativa
tgtccttgtgggttgggcagagtcgcagagacaaccttagaaattactacacgaagaaaaaaattgcgaccacacttctttgagaaataaagtatgctgtttctaaaaaaaagtctggatctttttttggaaaatacaggattagaaaaaaaaagtgttagaaatacaacgtgtaatgtaggagttctgaaaagtactggaagatagcccgctcatttacacgggaatgcatcacggctgcatttcatatcttataaggtataatattgaccacataatacaatttcttcacaattttttgtcaacattgcttagatattttttctatcatattagttagctttacatcgtcaatatttaattaatccctataagcaattatctataatcttcatcgtaggtaacctaagtttgtttagaagaatatgtaacaaattaagtgtaatttaaaagtatggtgtttttgtttatgaattggattcttatgggttaactttttctaatttttaagatgtgatatgattcgacttaaagatttttctaaaagtaaatttaaaggttgaaaataatattaataggtcattgatttatgggattgaggattgggtcccgactgggatgttcactggggacctcttcggcgacatggttcctcgcacctcactctccatcacggggtgctggagggcaagaagggccttgagctattggtcctattgtagccaagaaggtgttgttgaggtcggctattgtagaatgtatctatccgacccagtggtctgcctcagggaaaatgactggattgaacggagtttgtctcaatagcaagttgaccgcaataaggcgttcgacaggagttcgaacggggtccgagggttctctaagagcaccaagagctagatcacgcggtttatcccctgaacgaagttcaccatcttcgcgtctatcatgagtgactccggattaaaaatgacaaggtattataaccttgttcttacaataaaagaaacccaaagacatagcaacaaagaaaaggaggctctggatcaaaaaataccacaataccacaatagatataagcagacaagtatgcaaaattaaaattaaataaaaaggcattagcccccatctttattcctctcacaaatcaagaaacccaattagttaatcaatgacctgacatacgagcattttcaaaccttcattggagaacttacaaacaaaataaccgctgacaaaatcataggaaaagcactaagagactaacaaaatctaatttcataaacattgtgaagaacaaaccctagactcttgacatatttaaatctttctaaagactttaattaaaaatgcatagaaacttattgaacatatgaagagatctcctatttcctcgccgctaacatgggcactagagaggggagaaggaatgggacgaaaggacagtaatagctaagggcccccccaaaacccggagccatacattctttttacataatagattgaaaaaacggtctcgatattacagtgagaatcttaaactcaaggtgacaaggagacattggaggtggtttttcaaatttacatggtatttagatgatacaaagcaagcaagataaagatacattgttgatatcaaataatcctgatttcgcccctcggccggcgtgacaacgctgcgtccaaaaaagttccaattttcgcaatgagtttggaagagattttgtttctaaattcaaaaaaatgaaaaagaaaataaaaatgttggatcactgccatgcatgggaatgaaaaagtccgatcctgcatgcagccatcactggttggttagtggttacgttacggttggtggatggcaatgctagggaaatgaatcgtgcatacgtgcacgcatcatgtatctctcggctctcgcagtggtggcctggtgggtggggaggatgtacttacagtgataagagtatgttatggtggtgtttgaaagttctgaagatgaagatgaagatggagattaagtgtttcacgcaaaacgtggttgtaataacatgtgattaattaagttttaattatttcaaacttgaaaaatagattaatatgatattttagagcaactttcatatagaaagttttcacacgaaacgcaccgtttagtagtttgaaaagcgtgccacgagtatccaaaatttaatccaattttagttggagaaaagaacagggccatagtctccaagtggaaaagaagataattttgagttgtgcccacacatggcatatggtgtggtgctcgctttcatttatcactttcctcgattagtagtgcccatcctatgggaaagcggaagtacgtacctacatagccgatcctgtgggagaaaataactttttgtcgtgtttttctcgactggtttctgcttttattcgaacgagtagtcaagtaggagtatatatagcatccttgtattgttacacgctacacgggtgacacagagaaatagttttttttagccgggccggcctaagaaagacggaccaaatttacttaataaaaggagtatttacacatatacaagtttcagtatcgaagtgaaaggatgttgccaccgcagcaacttcctaaaagaaaaaacaagttacagaaggttgttactctcctaaaacattgaaaaccccagcttctttccagattaccgcttcatctttaattgcgccaaacaggaaccccgttgttcggctctgattctggaatactcgcgcgttttgcagcaaatagttacacacaacacagattacattaagcattctattgcaaaaagaaaaaaaagtaccgtatgtaaccaaattgagaaatgttatgggccttcagcaataggagaattatcacgagtcattagtttatttgatttcatttacctgatacattctgcaattccatagcaaagatacagtatacatgatgcaaatgaggaaattatatacccccagaaaactgctccatgacttgtggtaactaaaagaaggtcgttcttggcaggtatttcggtgtgcgctattctgctgcttagctgcatttttgcacaaatgatcgaatgccagaaaagaaagctgatgaaagaaaaaaggaaaggttctttcaacaaaatggggatctgctgctgtatgagcaaatccggtcaaagcaagttgatactgtgagaatattcacaaaagaagaactagagaatgcaacagacaattttgactcaagcagagaactaggggcctgtttagttggtgaaatgaaaatttttggatatcacatcggacgtttgaccggatgtcggaaggggtttttggacacaaatgaaaaaactaatttcataactcgcctggaaaccgcgagacgaatcttttgaacctaattaattcgtcattaacacgtgtgggttaccgtagcacttatggctaatcatggcctaattaggctcaaaagattcgtctcgcgatttacatacaaactgtgcaattggtttttctttttatctatatttaatgttccatatatgtgtctaaagattcgatgtgatgtttttgataaaagtttttgggaactaaacaggccctaggaagaggcggtcatggcactgtatataaggggattctcaaagacaacagataaagcgctcaaagagtatgaatatgatttgagaaagatgaatttgtgcaagagatgattatactttcacagatcaaccacaggaatgtggtaaaggcttctaggttgttgcttagaagtggaagttcccatgctggtctatgaattcatcccaaatggcaccttgttcgagcttatacatggtaaatatagtagaataacatccatttcattggatgctcgtctacggattgctcaggaatctgcagaagctccagcatatctacattcatcagcatcccctccaatcgttcatggcgatgtcaaatctccaaatattctcctaggtgacaagtacatagcaaaagtgactgattttggagcatcaaggatgcttccaaaagatgaaatacaatttatgaaaatggtacaggggactccaggctacctagacccagaatacttaaaaagttacaagagcgccagctaacagagaaaagtgatgtttatagttttggagttgtgattctagagctaattacaggaaagacggcaatttattctgacagtgctgatgaaaacaaaagccttgcatcatccttttccttctggcactgaaagagaacaggcttcaatctatcttggacaagaacatattaggtgttggaacagagctgttccaagatgttgctcaactggcaaaatgttgcttgagtacaacggggggagaacggacattgacgacagaagtagctgaaaggttaaaagcaataagaagcacctggcgtgaacaattgattgagagtgctaacggtgaaactgtatgtttgcttgaaaactcatgacagtatgacccttccatcactggacaaagtggaagcttgatgacactacatttagaaactggtagacgatgagtatgaaagtaccaatgaaaggttatagcagagtttcgattagcatttcctgacataaatatcttgtaaaaatgtatcgttcatgttcaacaataaaaactacaggaaatcaatgagaacttacatttgacatgattttaacttacatttgacatgattttatgaggttcagtatgtccgcacaaagatttgccatggaatgatctgtcccctttttgttttgcctgatggtttgtcctactttcaccatggaagatcttcagagaaagacatagttggcacttcaatactggaagtggatgacttcagtgatgcagaggaagattggaaagatgctgggaggtcaagatggagagttggactgttggagactatgaagagttcctggaaaacaaccaccttttgcctctttgttacttgctcacttttgaaacttggttgagatggatggaatggaacttgttcctgaagagctggttgggatggcgccagtttctctagaagaggagctctgctcgtctcttgtcttcgttttgttaaacctctaaaacttcttcacacctctagttatggaaatgattttttttttgtgaaaacatggaagttggcgctaatacatagaaatagaattacatcacaaaggatgggaaaaaatcaatatatcaaaataaaggcccaaactatagatcatttctcgaatgataaattaaagtagggtgaaacatgattagaaatgttagacaagatagtacactaacgagccttttctgccacagtgatcacaatacactcttctgtgaataaacaacaactgacgattgaaggtctctatcaaccttgaagtgggagtgaaaaaatctcctaacctgccaaacaggacacacgttatgatgttagggaatgggaaaaactaagaataagagagaaaatattttaattatcatgtcatcatgcaatgtagtgctacctatctgtttttaacattttaagagagagctaattcacaaattgtaactacaataaactattaactacctgagtgcaacaaacaataaccttattgtatttttgccatcaattgcaaagcaaaatagaacttatgtcagatgctcacctttcaacctgatgacaattctttctaggaagacataaattcacaaaagaatttagtaatacactggacacataattcttgagaacaggatacttgggagtcatctgatcgtgcataaaaaaaagaactaaaacatgaagggggcaaagacaacttaaaaatgcagcccatctttttattttagacatttctttattttagttgaatcaactaaattgtaagccttatagaagaacttgccaatctggacaatagctttgattttttccccacttttttattagaaataatcagttccctctggacatcagcagtccaatatctgactttgatattaattttcatatgcatatgctagtgcaaaattatattgcaaatctaacggtatcaattccacattactaatttaaaaggcattttagacaattactggtcgaacttagagaatttagggtattactaaaacatcatatatttataaacaggctactaaataaatgcgtatacctattgaactgagggaagaagagatttttaagattcaacagtgttttacctcttgaaatgaattgcgcagaagcaacttgacatgcctttcttcagattcaaataatacaatatgactgaacgaagataaatttccaaaaacctcgcccacaaaatctgctgggttcatgaggaaacggtctgactcatccaaggtccctttgttttcactggtaacatgcaaactaagtcaggataattggctatgatgggtacaacatggtaaaaagaaatgctatatctactggactagaaacaatgaaagaataatcacctaggagtacagtccaaaaagcgcataggtaggttgtaatgtaatgtagagtaataaggtgtcgaatggcaaggcataaggaagaggacactctttactcttccatcatgggcttctcgtgatagataaagcatagcatcttcagttcctctctgacataatgaaaaggtacacatacacataacagaagtaaaggaatcttgaaaagaaaagttaactaggcacaaatagaaagcaaccaaattaacccaaaacacacacataaagaacatgtttacttaaagtagtacttacttgatggtataaggacatatataaagccattggaacatttgttaggatgagcagaatgacagagagcttcaacctcgaaagtcgtcctttctcattgtgaccttttcccttgagttgtgccattgcagctaagttatgtcctgagaacatgaacataaaaggaagcaccgggagaacaaacctgttgtatccgatccatttatatcagggcatgtgtgtactagtctagtgataagagattgaacattacaaacttgtgcgaagagataagtacctgaattctttatgtccaagtatgctataaaccactaatacccagacaataagacctgcaagcctccattctcgagacttcaaaattccagaaatggaaaacggtaagaaagtccaaatcatcgatggaaaaccttggctgaagtaccagtggaacacatgtgttccatagtagtctcctcctgaagagaagaggttaaatttcaaaaaattaagtggcactatgatccgggaaccatacatccaacaatcaagaaacgttgtcacggcaaggacaaagaccctgcagacagattagaaagcatgtaaggtttataaaagtattcctcaattgtgagaaaaagaaaacatgaccttacaagaaaagcaatgcttcaatcatcaagcgtttggataacaaggcaatcctaattctaacaaaataaactgaagggatcaagagagctcatctaagaaatgatatgcataatgctgatgacacgataaacaatctatcgcacgtgtcctaaagctagtgtttgtgcataaccatcttacttatgaccatatggtaatcaaccatgcattcttccttttggtgccatttggcatgacagatggtaatgctgatccttcctgtcttgaacaatgtgaatgactttcttaacaacggtgcagcatgtggaaacacatacctactatccaatatgtttggtgtgtttttcagaaaacctactagcgagacaacttaccatgggcaacaacatcctaaatatcaccagcataatgcttattcaatgcgaaatttcaataaataataggcattagcgttatgatgcaaaaattcaagaaataacagagataagggcattataaaaatttgccatagacagcatcctaaattcatccaatttatacatatccagtgcaaaaaaccgagaacgaaatatactgtgagaataagtttgacatgaattttaaaatagtttcatacccgagcggaacgacctcgagaaaaataaaccgggattttgatttcatctgaataaaatccaaaagaccaacatatagccatgttatggcacttgttggccgaatagcacaagctaaggctgctatgagtagagccatttttcttgatggagggctttgcttgctggcagcctgctgctttgaaacaaccgaatttccctttacagactctattgcaacaaaccaatagtaaagtccagtaacagtcaaaactgtctccatgctgtttgagagagtccgtgtaatacagaagaacatgaaccagttaacaagctgtgaaaatagctggaaatgacttgttaaggtcaccattcaccaggaaaatggacttgtttatttacgaaaaaggaacatcatatctacataaatgagttcaaggatactgcccactgggcaacgtgattattgaaaatgagttttgaaagtttatataagtagagatccccaaaagatgcaaagactgattgtagaagacgtggagccatcgcctgtggggaaaaaaaaacaaagaaaaaataagaaaattctgcttctcagtgcgtaaaaaaaataaagccatgcagagaggagtgatatttgattcacatatatataggtttcctatccttttatagtgaaggacttgtttgcttaggattgagattgaacatagaacaggatacaaattgtggattggttagaattaagaacccaactgtaagctatcccaatcaattcccaactaagaatctagttacatgagaaactgttgatactgagcacttctatttcttttacatgtgacttaacaccatgactcaaaccagaatcctataactctaagcttcatttctaatcttcattcagagaaatacacaagaattttttggcgtgaattcaaaaaatagttaccatgaaccatggggaatccaagtggagcagcgaaagaatcttgtagagagcagcaaagatgaaggggtggaggtaacttcgaagaccacgcttccactcccaagtaaggtggccatacctgcaacgaacgaacagagaaggctcacaaaatgcagcagcttaagcatcccactcccttggactggagtgcccgctggattcgaagctaaacaccggcgaagagggcggcgagttttacccgaagacgatgcggtgggcgacctcgaggcactgccagtgctcgtcggggttgaagtaggtgcgcaccagcagcgcgttcgccgcgcggaaggccagcgccagcgcgagcacccttcgctccgatcccagcgcccacgcccacggcagatccggcctctcctcccccgtcgaagaggcctctgcggtggacgagccgccgatgccttcgggaggcggcgggccagcggcgttacgtcgcctgcggtggctcatttgcagcgaggcagccaccaccttccgcgctttgtctagcgcaaggctagcgatggggagtggaaggaggacgaggaggaggcgcagccgtcgccgtcgccggagtcgcggaggaggagaaggagccgcttatcgccgtcgccggagtcgaggaggagagtgaatttctccctatggtttgggccttttgggctgtggaaattcactctccggcccatttcaactgcattttcggcctgcagaaaaaaatattaaattcgaaatctatgggattacatcctgaaaaaaaaaagagattgaattcgaaatctttcaaaaccaacagaagcagcataagggatgatcatcctgaacagttgttgtaatcatatctgataagaatatcctcacaactaggcattaccaaccttgcatcgtgccgtgaatcatataggtttctgcaaatacaccacagggtattttttttgtctctgattttttctatgttatatacaatatgttgctgggtttgccaagttctaatatgccattgcatttttctgaatttttatgatatactatagtcgtctggtttgtctttgttaaaattgtacaattttattataatgaccaaaataccgcttggatgaaaaattccaaatatcagacaacaacttttttgcatagtttataatatgatatttaagttgagcgtatgattgaaatcatcagtgagaaaatcagggaaatttctttttcgtgcggtttgagtttcgacaaatggttttgaaatccccctgtga

SEQ ID NO: 5041 - DNA, 14394 bp, Oryza sativa
  unsure (1)..(14394): unsure at all n locations
tattgatccccacaagccatctatcctacatctgctcaaagaccaggcctcatcatcgacaagtacaccgcgcgacgtgtatgctatcgatggaaccggcacatctggaggcggccacacgggaacggcggatcaattggttacaccgacgctggcccaacatatcaaaactctcaatgcgatattgaacaaaagcccttttgatcccgtcctgtacgctgatctcgatcactgggcagaatgactacgggaatcagtggctaatctcaataacgcgttcgcagaggccgccgccagggcaccactagaacaaccgcggatcgatggcgctaatagggaacaacgagatggagacctgcccgaggacagtgatccaactcagcggtcgccacctcgtcaacctactcctccaccccgcggcactagtgatctccgcgagcacctaaatggccgccgagaagcacgactcgctcgagataatgaaaaccgttgccgacatcgtgcctcttcacgacattgcaagaacgaagaacaaggaggacgtccgagccagaaccgagaccgtgatgattgccacaaccgccgcgaacatgctaatcgtgaacagcggatgccgagtgataccagtcgaggtcgacgccgtgacgacagtgacaacagagatcgacaccgggacaacaacgatggacgacgacgaggttcacgagaacccgagcatcgtccttgaagccgtgcctcggaaccaagtgacccatcgtcgtcatcatcatcttcatcatcggacagacatccacgatgagcgcgtgatcgccaacaacctactacccctggcggtgggtgcagggctttcactcgtaccctgcgagatgttcgatggcttgagaagttccgaccgggagcaatagagaaatacgatggaagcaccgaccctgaagaatttctccaggtctactccacggtcctctaggctgctggagcagacgacaacgcactggcaaactatttgtcggctgcgttgaagggatctgcacgttcatggctggttcacctcccgccctactcaatttcttcatgaacagatttgtggcaacagttcatcgccaacttccaaggaacatacaagcgccacgtgatcgaggacgacttgcacgcgttgacgcagaaaccgggcgaatcattgagggaatatattcggcgctttaatgagtgtagaaatacgatccccgagatcaccgatgcttctgtaatccgtgccttcaagtccggtgtccgagatcgctacacaacccaggagttagcgacaagacggatcacaactactcgcaaggtgttcgaaattgtcgactgatgcgctcacgcgaacgacgccctgagacgcaaggaaggcaagtcgaagataggagaggagtggaaaccagccaaggacgcacctgagtcaagcaagaaaaagagccgcaggagtgggaaacggaaagctcaagcggaggtcctcgcaacagaacatgttgacccgcccaagaacccagacccacaaggcgacgatacgaataaaatatggtgccttatacacaagacggacaagcactctctggagacttgtttcatcttcgaaaaggcactcacaaagaaactagcgttggagaggggcaagcgagtacatgtagtcgagaaggccgcagaagcgactacttaggtctcagattcagcttacccggactccgacctccatgtttcgcacatcttcgtaggttccacggcgtactcctcaaagagagagtacaagaaagtggagcacgaagtttgttcgacatcacagggggctgcatccaagatgaattggtcagagcagaagatcgagttctcagaagtcgaccacccaaagactaccgtcacaccagggcgatatccgatcgtggtcgagcccactattcggaatatcaacgtagcacgggttctcatcgacggcggcaactccatcaacttactcttcgccagcaccttggacgcgatggggattccacgaagcgagttgatgcccactgatcaacccttccatggaattactcctgagtcatcgtccaagccattgggcaagatcacgctactcatgactttcggccaagcaaacaacttccgaacggagcaaatcacctttgatgtcgctgagttcgacacggcatataacaccatcatcaggaggactgctctcgcgaagttcatggccgcatctcactacgcgtatcaagtgcttaagatgcctggaccgaagagaacaatcactattcagggaaacgcgaagctggcggtgcagtgcaacaagcgaagcctcgacatggtcgagcacactcccaacccacccgccgcagctgagccgcccaggaaagtgaacaaaaccaacaagacgccgaagtcagacggcgcaatcaagattgttccgctctccagtgccaaccccgataagaccatcaagatcggggcttcactggacgaaaaataggaactcgtgctcatcatcttcctccgcgataatgcagacgtgttcgcttggcagccgtctgacatgccgggggtccccagggaggtgattgagcacaaactcatggtgcgacccgatgccaagccagtaaaccaaaaactgcagagatttgcaccggatcgaaaacaagccatacgggaagagctcgatgagcttctcaaagctggcttcatcagagaggttctacatcgagagtggctagccaacctagtcatggtgcgcaaggccaacgggaagtagaggatgtgtgtcgacttcactgatctcaacaaggcgtgtcccaagggtcacttccctcttcctcgaatagaccaattagtggactcaacggccggttgtgagttgttaagttttcttgatgcctactccggctaccaccagatcagcatggcaaaagaggacgaggagaaaacatcattcatcatgccattcggtgtattctgctacgtcaagatgccgtttggactgataaccgtaggaaatactttccagcgcacggttcaaggggcactcaacgaccaacttgggcaaaatgtcgaggcttacgtcgatgacatcgttgtcaaaacgaagacaagcgactcattgatcgacgacctccgggaaacgttcgacaacctccgacgataccgcctcatgctcaacccagagaagtgcacgttcggagtaccgtcgggcaagctcctcggattcctcgtctccggaagagggatcgaagcaaaatcccgagaagatcaaggcgatcgagaacatgaagtagccgacaagactaaaggaggtccagaagttaactggatgcatggcagcactgagcagattcgtcgctaagatgggagagcgatgacaactcttcttcgccctcctgaagaaacaagacaaatatgtgtggacacaggaagccaaagacgcatttatcgcgctcaaacgctacctgtcaaatccccctatacttgttgctccccaacctaatgaagaattgttcctttatatcgttgccacgccatattctgtgagtactgtcattgttgtcgagagagagaaggtgcaaagaccggtttactacatcagcaaagctctccacgacgcaaagacaagataccaacagatctaaaagctgctttacgcagtagttatgacatcaagaaagctacgccactactttcaagcccacagagtcacagttgtttcctccttcccccttggagaagtcgtgagaaacaaagacgttgtcggccgcattgcgaaatgggtagtcgagctaagccagtttgatgtccactttgtgccacgaatagctatcaattcccaggttctcgctgattttatagctgactggactatgtctgagaacaggccaaacagtcaaacagacagcgaaacgtggacaatggcgttcgacggcgcacccaatagccaaggagcaagggcatggttcatcttgacatcaccttcgggagatcagttcagcaagcacgcaattcacctcaacttcagggcaaccaacaacacagccgagtacgaaggactactcgccagcataagagcagctgccacactcggagtcaagcgactaattgtgaagggggattcagaactagtcacgaaccaggtgcacaaagactacaagtgctccagccccgagttatccaagtacctcgcagaagtcaggaagctggagaagaggtttgatgggatcgaggtccgacacgtataccgtaaggacaatatcgaaccagacgacctcgcacggcgtgtgtcccgacgagagccactcgaacctggcacttttctagacgtcctgacaaagccatcggtgaagaaggtacacgacgaaggtagcacggtagtccccgacattagctagggggctacagaggcggtacacgtcgttgccgatatcgagactacagacgactggtgaaccccgctgatcaagttcctgagtagcgacgagttgcccgaggatgatgcagaagctgagaagattactcgacaagccaagatctattgtatgatcgataatgatctgtacaaaaaaagagccaaattgagtacttctcaaatgcatctcgtccgatgacggcaaacatctcctcctggacatacacgaagggatctgcaggtcacacgccagcggacggacgttggtgggaaaagctttccgacaagggtttttctggccgaacgccctcaaagacgcctgcgacatggtgcagcggtgtgaagcctgtcaattttacagcaaacacacaaaattgccagcgcaagcgctccagaccatccctcttacttggccattcacgtgctgggggctcgatatactcggaccattcccacgaggacagggcggctacaggttcctgttcgtggccatcgacaaattcaccaagtggattgaagcgacgcccacgggggaaatcaaggccgataaagctatcaagttcatcaaaggaatattctgcagatatggattgtctcaccgcatcataacagacaacggctcccagttcatcagtgccgacttctaggattacagcattggattgggagtcaagatttgcttcgcctcggtttctcaccctcagagcaatggacaagtcgaaagggcaaacggcatagtgctacaagggatcaagacccgcgtctatgacagactcatgtcacacgacaagaagtgggtcgaagaacttccctctgtcctatgggccgtgtgtaccacaccgataacatccaataaggagacacctttcttcctcgtgtatggctcggaggctatgctccccacagagctacgacatcagagcacatgagtacagaagtactccaacgaggagcaggaggagcggtgaagcgatgatgtgaatctactcgaggaacatcgagaaagagttgccgtcagagcagccagctaccagcaggccctttgccaatatcacgagaagcgcaccagagcacgtacactttcgatcggcgattacgtcctccgacgggttcaaagccaaacagggcgcaacaagctctcacccaaatgggaaggaccatacacgatcacgcaagtcttgcggccgggcgcattcaagattgcagacggcgatggccgcaagttagcaaattcttggaacattgatcaattacgtaaattttatgtataaatcaatagtatccatatttgtaagatatcttacgatttcaataaagttgatttcaggtaaagaatattgccaaagtgttcctttccaacgatcccttaccacgacgacacctagagttgaaacctatccttttgtccctttacgccgtcctggcaaggcctctgaggaacctaagggaacttcggctggggacgcccagagcggataaggccttgtcaggttatgcagagacaaacgaccatgtaagatctggtcatgtaagagttctcagttctcaccgtgcgtattaaccaagccgtgtaatcggaaattgagttttccaacttcacggctgggggctaaggtcagcgctttttcaaccaaggtaggtcaagggtccaagagtcttatcctcccaaaacaattctctgacgacaaggctggggtctagggagagtgtatggctcaagtgactgatcgaggtcgcaaagtgagaaaacactcgtacacaacatacccagagaaataaaaactaccaatatggccaacgccaatccatggagtagaagaccttctcggcaagtggcgccatcgactgcgcaagactgtcgatttcccaggcgtcctccgagaacgagagaacccttcacgaaagaactcgaggtgcagctgcgggctgtgatctcggatgcaggctagcacgtgtcctccgcgcgtagcggctcgctcgacggcactcctgcttcagggcctcgtcgatgcgcttgccaatcccatcgagttcggcacaggcccccttcatccacgagatgtaaccagcagcggactcctcgggatcttcacggggaactcggagctccctacaaactcacgccatggctgtgcagcaactcttgaggtatgagttgaaccacacctcgtgaactcggagagcttctatgccctggtccttcttcgcttccacaacggctctttcgagttcagccacctcgaatttcgtcttccaatactgcattcgacgatctcggtcagccaacgcgttctcgaaatctacccaacacggaaaggactaagtcaagctactcctctctttcgagaacacagctaattaagtcaatccaaatacgaggagcgaaagaaatcaagacacaaacctaaagaagtcatcgccatgttcgcccccgtggacggaacctgatcgacttcgacctccggcacgtgcggctcaggcgtgagcgccggaacaactaccggcgtatcgggctgcccgcactgctggacatcctcgacatcaacatatctacaataaagaaggtactcggaatcacacgctgaggaaacaagggaaacggttgtttaaataaaaacagtgtcgacccacagaaagttttacagcatgaagattaaggagtacaagggaaagtaaaaaccctactcttcaaaaaggggaggacatactcccccaagtcgccgacttcctccatcgtacccttgcgcgcgttatcggtggctccccgatccaacgcctctttgaggttcaagtcgggatgcgccagccttatgcacgcaaggacttggcacgccccggtgtatataccgttggacgtctcctcgctgatcctagccgcgtggcgggaggggatcgcctccatcaccttagccaacttggtgagcgatgacgtcaatgaccactcgtcagggtgcgccgggattgaaatcacgacgccacattccctggcaagttggtgcaggccagtgaatgatgtccgcagcgatccccggatgtctgtcagatggtccttgagctccgacatctggtgctcgagcctgcgccactgcgtctcgttgctagctaccagctccttcatcttttggaggtcctcgcgggcctccgccaatcacgcgccagctgatcggcgcgctggtttgccgacgacgccgccgcccgggcttcttcgatctcgcggcccacgccgcgggcgcccgcttggaggatgcgctccatctcagcctggagctctccccaagtgagggcatcggcggacagaggctgggcggtcacgaggctggcgataggactatgtggtgccgcctcctggtccttggtagcgaccacggctcccgtcgaggtcgccacaggggacacactggaagcagcatcagccccattgtgcgcatctttcgcccgcgccatcctgcgaagatttttctcttctctgtgaggataggtgatcaagactttgagaacgaaaaaacctcaaagacatttacttacttctcaccgatcgtcaccaacctctgccttcgcggaggcggtggagacgcacccgagtcctaagttggatgatatgatgtgaggttaagtcgttctgattatgtactctaggacgaaagagaagcttaccgccgggtccgtcgccttccggtgggtcccgagcacacaggagaactctcttcccctcttcggaacattgctgccactcgtggtggcagcagcagcgtctaatgcttccttggcggcgccctccttcagcgacgtcacagcctggtgatccacgagtggtccgatgacgtccgtcagagggagagcctgcacaacatgaagtcacgacgcgatctcgagaagaaagatgaaaaggaatcatcgagtacactcacgttaatcgcggcagcgcgttcggctgagcccttgtcgcagagtgggacagggatgttacccacctccgagggtccactgatcattatctggatgacgcggcgctgcacagtgtcactgtccagacctgtaaatcgagaatgagaactcgataagtcaggagaaacagatgcacttaaaacaaaattggaaatgcgaggataaataccccgagaagagacccgggtcacgtcatttggccctgagtaatcgaaggccggatgggtgcaggcctgtagcggctaaatccaccgacctatgaagtcggtagcgacttcatatcccgacaacccccgttctcggaggtcatcgatgatgtcgataaaggattggagggagggagccagggcgggtttagcagtccactctgggatcttttctgactggtcctcaggaataacaaggacggggtccgagttctctatctggagatagaaccatctcgtccgccacttgctgcgagaagaagggcactggaaggggatgtaacgcgactttaggccatcccgaagtcggaatccgacgcatccagataccctgttggattccatccaacgcagctcgtaataaaaatggaagaggtcaagaaaaggctctaccccaatgtaggcctcgcaaagatgagaaaagatgctcagaaaggcgatggagttggggttcaagtggagtaaagaaaggccgtagaaattcaagacaagaagaagaaactcggaaggtggaggcagaaaaccgcaagaaacataatcttcaactacaaccatgcggcccaaggtgggttcaggttctatacctccagcctccctctgcatggtcccgtgaccggggagggcaccatcgtcctgtagcttcttcatggacgcggtgtttgaggaagacttctcgaggtccatcgtcgccggaggatcgccggagaataggactaaggaagtgagttatggtttttgcggtgagcggagaagacgaagagcgctagaaggcaggagagttttctggcaagcggacttcaagtgaatccccaaaattcccttaaataagcgcactaccgacggtgcgtattccaaggaaaggagagagattgccgccggaaaattctgggtctgttgcgcatggtagtttctcagacttcaatttaaattcactcatgaccgttgaacttcatgcggtgttgtcgatggctctttgtctttatgatttttacaccgggatcgaccagatgagaacggcaacaattccgaaatcagaagtcgcgatcgataacatgagttcatttaagtagaagtcgggggctactgtcagggttacggataaggtataccctctatccttggatgtataccgtatactaatacggtatacctgcgcgtatatggacagtttccgtatacattaaggaaatctatcacgtgataggggtggtatctacagatggaaggagttctactcggacaagattgggttttagccatatcgtgaggggtccgatgtcttcgagtcctacttggagatcaactgacccgtggtatataagggaccccctgggcaggacctaaggcattgaatcttactgccaacacaaccaccacagcctgcggagcgcgcaggagccaagtcgccgggagacctagtcgaaccaactcgactacgatcttgtcggtatcatcgagttctgctattccctttgtaatctgtggtttccatcatataatcccataccaactggattagggctattacccatcaatgggcctgaaccagtataattcttgtcttttatctgcctgatgtcgtcttacatagatcctcgtatcaacggaccccaataccctatatatccggtctgcgggtatcccccgtcgacacatatatcattgcacttcccatttgtactttaagatgttgattgctctctctccttgtatgtaggccccactggatccttcttgcgatccatttaaacgatggattccaagatagttgtcttcgatggactgaggaccccgcaagccaagttccaatacatcattgacactctcaataaggcacttgtgaggtataagaataagtgtatttgacacgctccgtgtgcaaatacattccaggtttgggcccacccttattgcttacgccaggatccgggcacgagtacatgtggattctacctaatgaaatttatgtagattttcatggatgacaacaacgggacatntatgnatgcgatgttcgcccatcctcttaagacgtaaatccaaatttctaaacacacaatacgttttcacatcttcaatccttccatttgcaaaaattaaagctcccaacaagtaaattgctaccacatgcttgctttggccttgctgaacaactatgtggattcatctccaatcatatcatctcgtcagacggcttatacaacatttcaaaagctcctattgggctcgtgggtttcattgaggctggttgccatagtgacattttagatagccgttcaacaaccaaggatacgcagacttataattagtgggcataatgtaccctttaaaacctgcagtttgttaacaagctagtaaactgttcttccttttttctagggtgaactgaggcttacctgtatttttgttttcaccataagtagattacaagtaaactgttcttcctttttttctagggtgaacgaggatttgagcaactgaggcttactgaagtttgagcagagtgaactgagaaacaccatgctggtaagaaccattttttcttctaatggaatcatgcggagatggaattgatgtacgataacttgaatgtggagatgaattgcatttatgtgtgtatgtttggaaatttttggatgtgggatgacgtgaatttgtgaattgatgtttggagatgaattacatatattgtgaatggataatctgtgaactagcttttttttctacaagattataggtgccggctataaacttagaaccgacatgtattatactaatcctacataggtgccggttggtgttaataacggtacatataggcttgcgagggcatccattatttgctggttctttaaaagaaccagtacctataatacctcttaggtgtcagctcatactaattggtgccggtgtcgaaaccgacattaataggcccttccgaaccaacagctatggtaattcaccgttccgtttcacggaccaaaggaatgtttcctaaccccctcaaaagaaacggggcctagtacaggctgcaaaacgcatcatccggttctagaatctgcagtattagctagtagtatctccattctataatataaatatttttagagttggacacagttactaaaaaaatggtaaaagtgaatgatggatagttgtgattggttgaatagtggaggtaggtgaaaaaagtgaatggtggaggattgtaattggttgggaaaagaatgttggcgaagaagttgttatattttaggacaaatctttaggactaaaaattgttatattttggaaaggatggagtacaaacttatgatgctgattgtctacctgcaacgcaatcataaaaaggaagaaaaagctttttttacagtatggactgtactactctataaaaaataaactctagctactaatctagacatatatctagattcgtactactctgttccaaaaaatataaaccctagctacgaatctagatacgtatatatctaggttcatagctaggattaggtttttttttttacggaggagtagctatgattagacttttttttgcgatagaggggtatggtagttgacgtgtgatgtgcttttacactgaggtctggtttagttcccaactttttcttcgaactttcaacttttccatcacatcaaaactttcctagacacacaaacttccaactttcaacttttccgttacatcgttccaatttcaatcaaaattctaattttgacgtgtactaaacacaccctgagtgcgtccaattgtactaataaaaaaaaatcagctgatcaatctgcctcactctacaaggctctacaaggtaggctgtacgatgtttctgttgaacaacattgccacttcgtactgcatctcctgtaacctgacagggctcatacctgcacccctaacctaacatgattgtactttgtacctttgccattgatcatgagagagtggacaccccctaagacatccctcgttatttgaaagttatttaaatacataaaattttctttccctcgtaaaaaggaaaaaacaattataaaagaatttaaaaacatttgagaaggtagattaatatgtgatatatcatgatcaatcctcaaacatacaagttaaaatttaacttctataaagtataaaaaggaacaaattaaattataactaatattcaccatcaaatttattttaaaaaattgcagaagttaaatttgctattgtatgttggtggggtattaatatgtcttgttgatttttgaaataaaactataactattttataactatttaagtgccatacaaataacgagaagtatccttaagagtgtagaatcgttttcatgatcattgcatatcactatagacgtaacaagtgtaacctattagggtttcccttactgtcagtgttggggttaccgtacctggcgacaagcacagttaccatgcggtaaccatgacaaaccatacaaaatttatcaaaaatttaaattatttttaaaatttatttggatttaatagggttaccacagttttatctttaacttatcccagcagtaagaatgattgctgctataaccgtgccggttttttaaaccctgtaacctactagtgacgatagatttgcatgttcctaatgtcgacagtttcagattttacctcggttttcgttagcacgtttttcaaactattaaacggtgagtccagtgtgaaaacattctatataaaagttgttttaaaataccaaaaatattcatgtgttaagtttataataattaaaacttaattaatcatgtgccaatgattttttttcattttacgtgcgtcaacttgatcatcttcgtcttcatccgtttcatcaatcagattcgcaggttacaagaaacggtccacatcttgctgggttcaggaacctcatcatgatattccctccatcccattttaaggctgtgtttggagggaacccctcctcccggcacgcaaaacgaagtttattttattgcataattaattaagtattttttaaaacaacttttatatagaaatttttcgtataaatcacaccgtttagcagtttgaaaagcgtgcgcgcggaaaacgagagaggtgggttgagaaaatggaggaaagaacacagcctaagtgtagctatggttttccgcacataagtttgaccatccatcttatttaaattttttttaaaaaaaaagttaaaaacataagtcaagagtaaagtactattcatgttttatcatctgacaacaacaaagatactaattataaaaaattttcaaataagacatacggtcaaagttaggcgcgaaaagttatggttgcatttaaaatgggacggatggagtagtaaaaattgagcgctatttgaattttgaaaagcaaaagtttcaccccaagctgtttgatttacgtactattgcaaactaggaaacccgtactctaaattggccctacttttgtcgctaaattaggctgtgtttagttcacgataaaattagaagtttggttgaattggaacgatgtgatggaaaagttaaaagtttatgtgtgtagaaaaattttgatgtgatggaaaagttggaagtttgaagaaatatttttgaaactaaacacggcgttaatgtatggccactagtgcaaaaacccctgtaggcaatagataccggttttccagccggcaccaatgactaggtcatagaaccgacactttgtgctctctcggatttacaaaaaaatgaagccgtgtgctctctcggatttaaaaaaaaaaaagaagccggctccaagcatggagccgagcc

SEQ ID NO: 5042 - DNA, 49768 bp, Oryza sativa
  unsure (1)..(49768): unsure at all n locations
tatatagtacacagctttacatgtgagattacaattgcgctctttgttgggcccacatgaaattacaatcgtgcccctgccatatcaacagaccctaagggcattttggtacattatgggggtcattatagtcttttggtgcaagctagatggagtggttgagtggtccctgggaatattctcttggcatctttattgtccaagtcgccttcttcatggccaagagtctttttcaccaacatggatcttctcctcgaccaagggtcttttccaccactatgggtcttttccatggcaaatagtctttaccatctcgaccaccctttccgacttatccgatagctgacctgttattaactcatgaaaaactcaaaacggataatgagacttagtgacaaggactcactcgaacggtattttccgactcgaatagtgttttccaactcgaacaacattttaccgtttccttgttcgaatgaccatttgccactcggatacttagaataaaaactcaatcttacccaatctcttcctctacagtgttttgggccaaatagagaggaacggtggtgacccctagctacaacataatttcaagaaaaatcctgaaaatcccgagaaaattctagagagtataattaaccacaaagagtttaataaaaattaaatccagccatgctttatatttaggaaattttatttctcacatttaaattcacttgtaaattaatgaacatttaatataaattctgaaaataatttattaaataatttataaaacctgaaacgaaaatcaggatgtgacagctcctcatcagagctagctcgatatcatcgatacagcctaaagggggtcctgggatgctcaagagcatgtccatcatgagagctgatgtaatttccccgctggtttggatcttgtctacaaaaaataagctaatcggcaattggcctattccaagctgcctggcagcgctcgttggatgatagaactcatatgaaacctaaatattcctgccttgatggatgccgacagggagtatgcagggggaaatggctgctgtaagaacttcatgattgatttgtcaaatctaaaattagccggaagctcaaaattttcggaatgatcataagcaaaccatattctggagtccctggatacccatcacaaaaattaccgaaccaatcagaaaaaagctcagccgacaactctgatccagcataagatgccgcctctccaaagnacatgcatcgactggtggaacttttatttccgtcatcatcttcagttggatcgtcggcagaaggaaatcttgcttcagtcagggctgacctttttgataccttgatggtatgcaaattcaaacaaacttggaaaagccaccagggaccaccagtgccgatgacggtatcgacaacagtcttagctgatgcagaaccaagagtttgatacagagccaccaggaggtacttgcccaaaggaagttgcttcttgtccactagagccacaccagatgctgccagttggaggtaggcccacaacttggaccacaaaacaggaacttttgtaaccacatcatcaggaaggccacatgttccctaggggttacaagaccagaccccatgttcgaagtaacaaagccagaccagcctccaatgctcttggttttataggaaaactagcttttggtgctcaaactgattgggttggctgacgacgtgacatccaaactcgtaatcatgacaacgtccaagagagttggagtcatcggtccctggccgaacaagaaggcattcaaggtattggaccagaagtaagcggctgcctacagcatgggctcatcatttttcatatcggctatggtgaggggctaggcattgtgaaatcccaagctcatcccagtgagtctgttcgctagccaatatcctcctataccaatccggtcaagttttgacattggaggaaggccaagacttgaaggtaccagtccaatggcctaaaatagggttagtccgtctaaagaggactttgttggtcttggcattgataaactgagtaggatctgtgtcactgattgggtccaaaaagaattggtgctggttttgcaagctaggaactgcaacttgacgggataggtgctacaatagaaggaagaagagatcagggaagggagcacaaagtggtaaagagacagaaagggcctagccgatggtgcttacctcggggaactcgaccaccggagcgcttgagggattggcagaagacattgccgaagtcgggccgccgccgaaacaagggatcgcctgcagagtcgctgagcgaattactggagtgattgggggaagtttttggccaaggcaattgaagcgggggagacgccgtgaaattttcaaggtggttgacactatttaaaagggcgcgttgacggccgaaacagaaaagaaaccctagatgcaagcggaaacaaaatcgagcacatccgcaacatcgcaaatatcacggacttgaggggcatgtgttaatgatcaaaattggtaaatcaaagattggatccgaagtcagaaccaaagtggatttggtggaaatctgtagcctcagaaacagaacccacatcagctacgggttgcatcggctgctaccaaatcgggcaaggaggagccgatataactgatcccggcaaggcgatcaggagattgttgtctagatcggttcaagtgctacaccagtattgccaagtgtggattgagtccggagaaggcaattgtacctattaattaggatattctaatagtttccttatagatattttcagtaagagtccacaggacttgttcgtatttttgagttgtaatagagatagagtcgtgttcggcaaggacatatcatgtattttgggtataaatataacccaggaccctgtaaacaaacaacatcagttcgataacactttcggcgcatcgccacccttttttcattgtttcgacgagttcttgctttcgagttgggctgcatagttttcgatctccgacgaaaagtgtggagattatggataccccatacctacacggcatgtatatccgactgggtatggggtgccctgtatagatagaatatctttaaaaggactcgggttaattaccaaacttgtatgtcaaggaaatacccgggatcctagtcggttacgattgtattttatctggaattatctattccgttagggatatggtttgtactttgtaatacggaccccttcccctatataaggaggggtccgggtgcctctaggggcacgattttctcccagatcatacgatcaataatacactctgcggatcaatccccggacaggagtagggtattacttcttggttaagaaggcctgaacctgtataaaatcccttgtctctgaacccatccacttttccagcttgatagccacccccttttagtattgccgaaatcttgtttcgacagttggcgcgccaggtaggggcagcgtcaagttcttcgccgactagtgtgatgggttccgtctccggcatcgacgacttcgtcttccctcccggacaggcgttccggttcggcagcctcgacttcatcaccaacgacttcggcaagatttctctcctcgactcggattcgaaccagtcgggaagaggtcagatctccgccccgttcggtaccccgaactcggccgaggtctaccccaagatcatctctgccgagttggcttcaaaccactcgtacgagatccaatctactcggacacgaccagatcaagatgatgggtcctatcccccaatcctgatgagacttcccgatgatctggctgctgtcttcacgaccaaggcatctcccacccgaagacctagacgggatccggcttcggcttcgatccaatctagttctagggaggtaggcgttatatttcagcctctcgggacggtctcgacggaagaattggattgctacctcagctcccccggcgtcagttctcgaccaacggagatcctcgagtacgacgacttcggctatcgctacgactacggtaacttcgacgacagctacgaggacgactacacgcctctctttttcggtgtattcatggccaacaacgagacggcagaacagtgctgagcccgagaagcggaagaagaacgcacacgacaagaagctgaatgtcgccgactggaggaagaatgacaacgacaagagcgagaacgactacagcgtgaacaacaagatcgcgaacgggctgcaaaggaggctgaggatcgacgacagcgcgccttggaatccgggcgacgagcacgagatctcatcgggcaacaagtcgtcgacgggacagcggttttccgcacaccctaacagaacgcggttgcagcgatcaccctcctcgacaccctcctcaaggaagacgcgctcaatcaggctgatcacgtcgtcaacatcttaaaccagacaaagaccatgatcgccgcctcggtcccggctaactccgcaagcacccgcacgccgactggcagccgagttccccctcttcgatctcaagactatcaccaaccaagcctcagcgtcatcggcgcgggatccagtcgcaggagcaggggtcacgacgagcgatctgtccattcgcctcccgaacgacacagggagcgtcgagttgaacgacctcgtaggcaccccatcgatcttcgcgataccatcaaccagcgccgcgcggcaagaggctgtgctcccaaccattcaccagaccgctacgacgacgacgtggatggagttgctgccttcacgactgacctgcgtcgagtggattggccagccggcttcaagccgagtggaatcgagaagtatgacggcaccactaacccggagtcttggctcaccgtctacggtctcgcaatccgcgcagcaggaggaggtagcaaagccatgatgaattatttgcctatggccctagcagattctgcccggtcctagcttcacaggctaccccgtggcacaatcggatcttgggcgaaacttcgcgaccacttcatcgccaatttccagggcacctttgaacgccctggcactcagacgatctctacaacgttgtccagaagtccggagaatcccttcgagattacatccggcgtttttccgagcaacgcaacaagatctccgacatcaccgacgacgtcatcatcgccgccttcaccaagggcattcgccacgacgacctagtcggcaagttcgggcgcaagcctcccaggacggtcaagcagatgttcgagaaagccaacgagtatgccaaagccgaagatgctattaccgcgtccaagcagtcgggcaccacttggaagctgaagaaaaatatgccgaacacaggggggagtggaagtaccaatcacaaggatcgcaagcgtaagcccgaggaacttgtggcaaccactacaccatcctcccgacaacgttcgcgcgtcaatacttttgataagatcatgaactcccaatatccgcatcatccaaattccaatcacgcggccaaagattgcttcgtctacaaacagtttgcagagcaatacgccaagaacgcacgcaagaccgctgacggagatcaaagcacgtcaaagaagaaggatgatgaagacgatgccccgactggttttcaagaccatcgcaaggaactaaaccacatctttggcggacccctggcttatgaatccaagagaaagcaaaagttgactgaacgggagatcaatgctgtccagcccgacacgccccaatatcttcggtggtcagagacgacaatcaagtttgaccgctcggatcatcctgaccgagtggtccacccggggcggtaccccctggtactagaccctgtggttcgcaacgtcaagcttcgcagatccctcatcgatggtggcagtgcgctcagcatccttttcgccaagactctggacaacatgcagatccctcgcacggaattaaaaccgagtaatgcgccctttcacggagtcatcccagggctatctgctacaccacttggccagatcactcttccggttactttcggcactcgggagaacttccgcacagaaaacgtttgttttgaagttgctgatttcgagacagcgtctcatgccatactcggacgcccggcgttagccaagtttatggctgtcccgcactatacctacatgatgatgaagatgcctggtcctcgaggagtcatatccctgcggagcgacattaaataagccgtcacatgcgacaaggaaagctgcaagatggcccagacccgcgagatcaccctcgctcgagaagaaatccgactggctgcgtccacagcaagcgaaggagaagtgcctgcaaccaaggtgccaaagagcggagaaagcgacgccaagaccaagaaaattcctctagatccctctgatcctactaagactgctgtaataggcgctgagttagattgtaaataggaaagcgcgctcatcacctttcttcaaaataataaagatatctttgcgtggaaaccatctgatatgccaggtattcccagagaggtgattgagcactctttacatgttaaggaagacgctaaacctatcaagcaacaactccaccgtttcgcacaggataggaaggatgcgatcaaggaagaattgactaagctgttagcagcgggcttcatcaaagaagtccttcatcccgactggctggctaacccagtcctggttcggaagaagacggggcaatggcgcatgtgtgtcgattataccgacctcaacaagtctagtcccaaagacccttttgggttacctcgcattgaccaggtagttgactcaacggccggctgcgagctactcagtttttttggattgctactcaggatatcatcagatccgactaaaagaatcctactgcttgaagacttcattcattacgcccttcggggcctactgctacatcaccatgccctttggattaaagaacgcaggagcaacttatcaacgcatgatccagagatgtttttcaactcagatcggccgcaatgatgaagcttatgtggatgatgtaatcgtgaagaccaaacagaaggatgatttgatcgcggatctagaagagacctttgcaagcatccgcgccttcaggatgaaactaaaccctaaaaagtgcatcttcggagtaccgtcagggaagctgcttggatttatggtgtcccatagaggcatacaagccaacccggagaaaatcaacgccatcctcaacatgaaaccgccgagctcacaaaaagatgtccaaaagctgactggttgcatggcggcgcttagcaggtttgtttcgcgactcgacgagcgggggatgccctttttcaagctgttgaagaagacagacaatttccagtggggactcgaagcacagaaagcctttgaagacttcaaaaaacttctcactactccaccagtcctagcttcaccacatccgcaagagccgctgttgttatacatgtcggcaacttcccaggttgtaagcacagtcctggttgttgagcgtgaagaagaaggccatgttcaaaaagtccaacgaccaatctacttcgttagcgaggttttggctaattccaagacaagatatcctcgggttcagaagctattatatggtgttttaattaccgtccggaaattatctcactacttctaaggtcactcggtcacggtggtcacatcgtttccactcggggatatacttcataatcgcgaagcaaatggatgaatcgcaaagtgggccttagaattgatgtctttagatatatccttcaagccgcgaacttcgatcaagtcccaagctttagccgaatttgtcgccgagtggactgagtgccaagaagacatgcccgaggagaagatggagtattggaccatgcattttgacaggtcgaagaggctttcaggcactggagccggggttgttttaatctccccgactggagaaaagattgagctacgtattgtggatacatttttccgcgtcccataacgtggcagaatatgagtcgctgcttcacggattaaggatcgcgatctccttgggcattcggcgtctgatagttcgtggagattctcagttggttgttgatcaagtcatgaaagagtggtcctgccttgatgataacatgaccgcttatcggcaggaggtacgtaagttggaagacaaattcgatagacttgaactcactcatgttcttcggcacaataacgaggcagccgacagactggctaattttggttcaaaacgagaagtagctccttccgacgtgttcgttgaacatctttacgaaccaaccgtgccaaggaaagaaacaattgaagccacggatactcaagacgtaagtatgattgaagccgactagagagagcccctcataagatttctgatcaaacaagaactcccccaagataaagatgaagccgagcggatttccaggcgcagcaaactctatgttattcatgagaccgagttgtacaagaaaagtccatcaggaatcctgcaacgctgtgtgtctttggaggagggaaggcaattgctaaaagatatacattcaggcatctgtggtaatcacgctgctgcacgaaccatcgttggcaaggcttatcggcagggttttttctagcccacagctgtgtccgacactgacaaaattgtgtgaacatgtgagggttgtcaatttttcgcccgacaaactcatttaccagctcaggagttgcaaaccatcctgttgtcttggccgtttgcggtttgggggcttgacatggtcggcccattcaaaaaggcagtcggtggttatactcacctctttgtggctgttgacaaattttccaagtggattgaagctaaaccggtcattacaatcatggcagacaaggctagagatttcttcatcaacattgtgcaccggtttggggtacctaatcgtatcatcactgataatggcacttaattcaccggcggagtatttaaagacttttgtgaagacttcggcattaaaatttgttatgcctccgtagcgcaccccatgagcaatggacaggtcgaacgtgccaatggtatggtacttcaaggaataaaagcgcgagttttcgaccgactgcatccttatgccggcaagtgggtagaacagctgtcgtccgtactttggtccctgcgcaccactcccagtcgagctacgggccagtcgccgtttttcctagtctatggagcagaagcaatgtttccgagtgaggtggaatttgaatctctacgatttcgcaacttcagcgaggagcgctacggagaagaccgagtagatgatatcaaccgactggaagaggcccgtgaagcagccttaattcagtcggctcggtacttgcaaggggtgcgtcattatcacaatcgcaatgttcgctcacgagcttttttagtcggcgacctagttctgagaaaaattcaaactacacgggatcggcacaagttatctcccttgtgggaaggaccgttcataatttctgaagtcactcggccaggttcttatcgactcaagcgtgaggacggtactcatatcgacaactcttggaatattgaacatcttcgtcgtttttatgcttaggcattacttttgtatcttcagctttgactgctaacatcaagcttttccttgagttatcagtcgggggctactataataataatggagtgtgacttttatcaattcaatttgcttacttgatttatcattgccttgtttgattttttggcttagtcaatgaggactgaaagttttttaacaacttttgtgggttttaggctcaaaaaggtttgacaaaaacttttaagaaatcgggagctaagtttgaaatatcaagcacaacataaattcatcagtattgtacaaattgtgcctccatcatcatcatcatcatcagaatcactgttacagtataatatcaatcagtatcagttttctcatcatcggaattattagatccagtcggccggaggtcgttgtcctggaatctctcaactacatcaatggctatcttgtcggcggctttctacgcatcgttgatgaggtcaagggcggcttcttcgctcgtcccgtctgcaaatccatcaatggtgtcaacatcaatcttcggttataaagacttggtcattgccaacgccaggcttgctcccatacttccggcctctttgatattcttaaagtatgtatccggagcgattctcagcttgtcgaagatttcggaagcatcaaatgtactcggaccattgttattgaagaacatggcttggacgagtggggtagcagcgttggcgacttcatccctagccccttcaagccttttgattttattgaccaagacatcgaattgagcctgagacttgattttgcgatctgcgtaaatagatttatatcaacgagtaggcataaagataagaggtattagtcaccagtaccttcaacatctttcagagccgaatccctctgtttcgccaatttggccttgtcattctccagagtttggatccgcttttctagttcagatatcttggcggcttgcactgtattgcttcttgattaattgatattacaaggatggcagcataagtaagttagacatagattgtatttaccttttgacgaaccgctcagttcaaagttggattcttgaagctcggcgatccgatccctcagatcatgctcagttttcctggcaagctccttagccttgtgcagctggtttctggtggtctcaagggttccaagatgaggaactaaattctcaagagtcgcggtcttcgcctcgttcctgagatggattctctgcaatgcgaatttatcggcatttgagcaaagtgggaaacaggatagttgaagctatgtataaggagacttatatttacgatgcgagtagcctggctgagtgcctttttcagcaagcatacttcctcatcttccttttgcttgtttatcacgattccctaaggttgcatatcatcgtcccaccatttgactaaaataggtggacgagaatcctcagctgactgtatccggaggacttcttcttcgtcgccgaccattgggccttaggcatttatgaataaaggtgaaacaattgaagaaagtctgtcagatcaaaatgggttcggaggatgtgtttacttgtgattatttccggtcggggacgagtaggcccttgtaatttaacaagagagccggaccctagatcgacgctggcatcctttttaggagggctgtcagcttgagtttctacttcaggaatatctttgtttggttctgtacccgactggtttccagtcgggggctcctgattagcaccaaccccagtttcggccgactggttcccagtcgggggctcgttgctgggttctacattgtcggtcgccggttgattgtcactcgggtgatcttctgcagtcgggtgatcttcttttgaagaacccgtctccatgtcagtcggttcagagtcttttccagaaagatctatgtcagatggcttcctacgagtttgagttatgctatcagtacaaatcggagcgtcgtttcgtcttccccgccgagactctcgccactttccccatttcccgctacagtgcaaaaccacaccggcggaagctagggttaacaaatccactccaatccatcctcctgagctccacaaaaaccctccacgcaaccaccgcaccgaatccccatccatttccagccatatctcggaccaaatcacaccatccagttcgtattcatgacggaagagagagaaagcttcgagagtcagtgggcgccctccgatgtaacagaggagaatttgaaagagatggtggcgcacggcgttcttctggcgaaggagatcattggatggcgtccagcattcggcgaagcattcccgacccccgacacacatgaagtcgtggtattttctcatttcttctatggcggattttctcttccaacctcgagattcttccgggggatttttgatttctatgggattagtttgcatcacttaaacccgaactccatagttcacatcgccaacttcatacacgcctgcgaagcttttttggacgtcaggccacattttgccttattccgtcgcatcttcttcctcaagccccaaccaaacaagagtaaaccatgcgtagttgggggggctggatttcaattgaggggaactctgagccaaaagtatttctccatgcccttcaaaacctcaaacaaaggctggcatgcaaattggttctatgtacaaaaccccgagcctgcactccccgagtactcctgtctccctccagtttatcaggactcttggaactcacttccaatgggagaggaagccgctcaggcgcttgccctgatggaccgtatgctgaagctgaaggagcaaggtctgcaaggagaacagatcacccggcattttatcaagagccggctagctccaattaaagagagatcctgtacagccttcaaatttgatggcaaacatgacaccaaccgtgaagatcctgaatctcttgaattcaaggttatgaaggaaagaatgtataaaatcttctcgaatgcaattgtagttagttattcgcacttgctgccagtggtgccatacaacgccttcaatccttctccaccggtatgtattcaaacatttcagcctttctcaaaagcatgcctttatctgctgttaagctaattgaaaactcgaaatgttatacccaggaattcgctttgatgaagtcggatcctccaattgctcaacgccgatcaccccgctggcgaactggtcaggcgagtggaggaccaaaaattcagtctgacactcaaacaaacacctcgaaatcaaccagtcagtcggactcccgcaagaggaaattggttctgagtgatgatgaaggcgataatgctagaaaatctggcaataaagaggtgaccgggaaacaaccaaggcaaaccaatccgaagaagaaaacatccagtcgtcccatgccgatttggtccgagatatggctggaaatggatggggattcggtgcggtggttgcgtggagggtttttgtggagctcaggaggatggattggagtggatttgttaacccttgcttccgccggtgtgcttgcttctgccggtgtggttttgcactgtagcggaaaatggggaaagtggcgagagtctcggcggggaagacgaaacgacgctccgattttggcgtttatttcgctagggtatcgggagtactaatgggcctaggcctaaacagtacttcagcccagttttgctatcagcgtgattaagttgtgatccatagggacttaggcatttgtttttgtttcgtcaacacttgctcacaacagtatagcccaatgctgttaaaatcctttttgacgcagttagataattctttggaattactacgatgcaaataaaaaggtgcataacataaaagtgttatactaattttgtaggcctttttaggctgcaaagattgtttgggttttcttgagatgactggttttaatacagtcatccactcggcatgttatatgcttattttgattatgtcatgagtcatagcctaggctatttagactcgtcttttatcagattttatgccacatttgataggtcttttgagagtttttactcggacttttatcatctgtgctgatttatgaacctttggagtgcttctcacttgggtttttctttatatttctttggcacattaaagcagtcggcgggaggtttaccagatgctgcatatgcttggccttgagatatttatcctggaatcctttaaagggtgtcgaaggcatattttttggcctaggcctaatatgtctgcagcccatattttcaggtgtggcctatcacgttcttttagggacttaggcactttttgcttaggccaaagtgcgcgtgatcaagtgcccaataccttaaaatccttttataccgcagttactcaactttttaggagttggtacaatgcatcttaaaaggtgtcaaacagtaaagctttacatagctgccctactgacttttttatatagtcaaggtgctgtttgggtttataaagcagttgattggatataatatcattgctttttgccacgtaagtgtgcatttttattaactaatattatggctttggctgattatatattgtggtcattttccaggcggttggtaaatcgtttacgagtttatttactcggatgttacaccacatatgccatatattttcaggtgtggtgaaatcatgtgtcttttagggacttaagcacatctgttaaagaagtgtgctcatggtgtatgcccaatactttggaaatttctttattcacaacatcaagctcttctttatagctgttttgctatgtgaatttccaaaaatgttgtcaactttaggttgcacgcatcatattctgcaaagcagtcggtatatcacttggatcatattatttgggggattcacactgcatatgctatatattgatatcaagtcacttggttgataacaattatcaaaaaccactcggttggttggattatttattccttgactatatgcttagtttgttcaactaaccatatagtcgagggctacacctaattaggtgcatctagtcgatgcacctgattttttctatttttcagcccttcacagtctttgattatattactcgggagatcaaaacagatgaagctaaagcactcggattgtcttttcggattatgagagaagattattccgtcgactgtaaaggtctcaggggctactgtggagattatggataccccattcctacacggcatgtatatccgactgggtatggggtgtcatgtatagatagaatatctttaaaaggactcgggttaattaccaaacttgtatgtcaaggaaatacccgggatcctagtcggttacgattgtattttatctgtaattacctattccgttagggatatggtttgtactttgtaatacggaccccttcccctatataaggaggggtccgggtgcctctaggggcacgattttctcccagatcatacgatcaataatacactcggcggatcaatccccggacaggagtagggtattacttcttgattaagaaggcctgaacctgtataaaatcccttgtctctgaacccatccacttttctagcttgatagccacccccttttagtattgccaaaatcttgtttcgacaaaaaggtaaagcttgttatagcggcttgcgttctcgggattagtgcttacatcttcatgacactctaatcctgtttatataaatcgtcgagttatcatatatgctatgtaatctaggtcgatcttgctacctaacctcagcggctagcctctatcatcgaaaacagtcgacatggttagatactgacttcgaattagattacatagtgcatctaccatcttcaaaaggttgccatcgacttgtttaaattttatgcttctttctatgtttaatgttgtatcagttaagtttgatccattaaagcattacctggaatcgtaatatctagcttgtttcatgactgctactagagatactattggggtttcagccgatcttgcctgatttagttgtctcgttacttatatgcttactcgacatactgaatctaccctttatattaagatctcttttgaatgaaatatattaaatttgttggtttattctaatgagtaacgagtggtatcggagtattagtcgatacgcattagatttaccctatcagctatgctatgaatatgtataatctttactccaaagcacttttaagcgcaagtaatttatactgtctcggcacactgcccgatctatcccaatcgcttagcttaaatatattcttgaaatatagattatatatcattgatatctacagccgatcgagtggatctaactcttttctcgttacttacttcattgccgatctgacctgcgttacatcggcttggtgctaaatgatatgtcatcggcagtccagccgatcggctatcgtttatggatttaactttggattctttgtttcttgttggttgcaggatcaaactaactagcacgccctgaacctgaaggcaaatctttggacctgcactagagtaaagcaaacctcgccagtgtgtgtttttcacatcaacaccttccaatccttgtacacatgtatgattagcaggaggttcattttatcgcatgtcgggtgcatttttatccgtaaatggcctgcatacgtatatttaccaaaactagtggaaggggcagtgatgtcgacgcataatgggcgtagctgccaacatgaatttgccgcgttgaacgacggacttgacgcatgcattgcgaacggcacgggtgcagccgcaactacaagccatagctcctttcctttcttcttcttcttcttcttcttccttctttcttctttcttccttctttcttttcttctctctccctccatggctgatgccaaaaagtggctcggtcggccaatgacagcgtgacgaccgatggctcgatgcacgaaggtgcactcgaccatgatgggatgagctcgcacgggcttgtgtctcgcgaacgacgaggccacaagacgagcgtggaggccgactgctagtgcgtgatggcttgctcttttgcctgtccctgtctggaacgatacgacacatcttgtgtggagataccccaatcggcttgcgccggcgactccaagtcgacagttgcggtgttcaccaggaacggcaaaaacaaaacgggatggagagagtatttcattttcgtaattagatcagcgaatgcaaaacggatctacgagttgtcatccttctatgtgaattagaaaaatgtgacggtgatgtcatagatctaattttacaaaatttcagtggcacccagccaatatcacgaatagtagtggtatttttctaatatagaaaatttacgatgatatggatccaatctatactttttataaagttaaagttatagtccactaagttcaacatgctaccacgccacatcattacccactaccaaaaattacatattcaacctcatgcaaatatacaacatcatttacaatttatttaattctacaaatcaacatgcaatcatatccagttatcacctctcacaaatctatctatcatttttatagtattaaacatatagttatcaatatgtttcacattaaaacgcaggtatcatctgtttgttttatgataagtactgataaactctgatgttttattattttttttcttttacttttagcttaattgtcgaaaaaaatattgagaaatacttagtaattttcgtggcaaaacgtgagaaatcatacagttaacccatccaaacagtccgtaaagcccgtaagaaaaatggcatatgagaatacacattcggggaggatatggcacagggttttaaaagaaaaaccatcaaattaactcaactcgccccaaattttcgaggggagattttttttttcctttttaacgtttttacacctcatcatcatcaggcctttcccttccctttctcctttctcgttgtgtgggttctttctaggccctaggacaagccaagaagcggcggaggggaagggaggaagagggcaccagccgcaccggccggcggaatggcggcgccgcccaaggccttgaaggcggagtacgccaagtccgggcggtcctcgtgcaagtcgtgcaggtcccccatcgggaaggaccagctccggctcggcaagatggtccaggccacgcagttcgacggattaatgcccgtccgtatcctctccctccacccgctctcctcgccgacgatctttctccgttcagttgatgaatcttgctttgatctttagggtctgggagggtagggttttggtgtggcaggcatcgtgttcttgagggttttttgtaggttggtttggattctgagaattttctggattgatgggtgatcggttttcatcctgatttgcattgcgggtgtgggttttgtggtcatctgccacaagaatcttctgctttcatgggtggttggttttcatcttgatgtgcattgctaatgtgggttttgcgggcatttgccataagaatcttctgctttggtgggtggttggttttaaatcttgatgcccgaaaaaaatatgtttctgagggtaatttcgcatgattttgtggggtatgatcgaaccaatcttcttcgaatgcggagttcttgatgcatttggtttggtgctctgtcgatttgtcgatgatccgtcaattccagcattgggtttattgctgtttctaatccattatgcaatctatatgtgtaacgcaagaatagatagaggtgcttttgtgggcaccaactttgacatatgcaatttaactggtatttctcctaagttgtttgatatattagttattatgcggacctgccagttggttgtgctgttttaggcttttagcatggcaatggtcctaagttgtttgatatattagttattatgcggacctgccagttggttgtgctgttttaggcttttagcatggcaatggggcataccaatgacaatgttagtaatctagtgtgttcgctaatctgtttttgttcttatctgatgtgtagtttgcaaattataatctaggtattcgtttgcccgctttattttctagtttgcctcttgtaattgttttgtgggtgcatgtgtattataagtgcttacctgtattaggcaagataaaacttggaggggagtccttattctatttttcattttttatattgcacatttggataatgaatctttatttcttttggtcggatcaactcagtactcatgtggttatgtggactagacactcaaattatttcactgggaaatgtaggatcgtttagggcaacttagggggtacttttggatctgcatgccatttttcacctgaccatatctttttattttctgtgatggcccttattttttacctgaccatgttctttaatatggagtgtttataacgttgtaccttttctatgtttatagtaattgttttattcaagaactataactgtttggaacttttttttggtcatggtagattctcgatggtgcagaagagaaaactcgatggttatatgacatatctttccatatcaattttacgaattgaccacttccaattaattttagtgcccttttctctttttcagatgtggaacatgccagttgcatcctcagtaagaaaaaccagataaaatcgtatgcaactttatcttttactgtttgcatgagtttcacgctatagtattatggtttattaatctttattgcatctattggaaatctgacctaactcaaagtgtcgattcttcatttcaaattagtgttgatgatgttgaaggaatagacacactcagatgggatgaccaagagaagataagaaattatgttggaagtgcaccagctactgcaagttctgcagctgctatttcagataaatgcaccattgaggttgctaaatctgcccgtacttcctgtagacggtgtggtgaaaagataaaaaagggaacggtctgtatcttttgatctattaattttttatatgctttctaattcgtcccttgaggataggaagttttatgccatgaaaattttatgtttgtactttgttgcttttcaaattatagtcatgaaaataacctcctcttgatgattaacaccttacagtcttatatgagcattcagctaacaatcatagataatcagaagtttcacattcttgaatgaaccttgatgcagcatgtaagaataattaatcataacatgtttcctattccttatagttactccctgggaaaaatactgtattgtccaaaattctgcatgttactttgttgttctatactttatttatttagaacatgaactttagcgctcactaaggatgaaatggatacccgacttggtcctagcacttgaacacttgtagctggggaggttaaatagcttccctaccactatgccattggcatgttcttttattttctgaacttgcatctgggaaatgtatggttctgatacgcagggacaccataggttcttttctgtaccctattccctgtggcctgcatcatgttgcatataatgcccaagcttttgcactggaattccaagtgaccagaaagcctaaaggccacagtttcccatttattttgtagttactctgctacgtgccactagcaagcattagaactctgaattttgtgttaagtttactttatcaaatgaagtaacctgcaaatgtattaattggaagagtatttattatgttcatatttcttattcatccacactcctagttgagtactcctaatgaattacaataattaccgtggagaattatatacaggaaaatgtttgatgatccagaagtactattagtcatgcacttagctaataatgtatgttttgaaaacatatgaattgtaactgtgatatggcaacttgtaatgtaaaaacatggtctttgtcttcactctaagttgtttctgtaatagtattattatttgtttgtctaggttcgtgtttcatctaagcttgaagggcaaggttggtatcacgccagctgttttctggagatgtccccagctgcaactgttgagaatttctcaggctgggagatcctgtcgcatgaggataaaagagctgttcttgatcttgttaagaaagatgcccccagctcaggtaatgaaacatgggcatcaaattttcttcgcgccacttcgtaatctgacttgatattttgtattgttgtttctcaagggcaaacatcttctaagggttccaagcgcaagaataatcagaatgatatacacgactgcaaagctcccaagataatcaggagtatatcagaaggcacagcagaagataaagggaaagctgttgtatcacatgattccaatgctaattcttctgatcttcaagaaaagcttaaagagcagagtgacacactttggaaattgaaggatgaacttaagaagcatgtgtcaactgctgaactaaggaacatgctcgaagcaaatggcaggatacatctgggccagagcggcatctattagaccgttggtaatattgcatgctatttgtgaaatggtttttaacttcctggcttcctgcactacattatttccatccaatgagtaattgatatttaaacaaactgcactacaaggatcccgcatataaatatatccttggccagttggccgatgctacttgatagaggagggtacgattataactgatgatgaatggtactagtgtacgaaatttgtcaggatagttgttccccaagaccccaattggtcatctatgtaattttttgtcgctagatttattttctgcttgctttctggatcccaaatcccagttgtaacatcctggttatagggtttgtgatactgatcgcttagtggaattcagaattgtcaccgtaacctaatgattgcacactatttgctttggttcttttgtaatctggttcatgtatacaattattatttccttaaaagtggctataccttttctttctaaaaaacacattttaaaaatttgatgtgtgcagagaaatttcaaagtcaggcagcacttaagatatttgttttcaggcaaaaattgttcaatagtatttaggtctgaattttttatgtataattcaaggaagacaaacattattgattgcataataagctttacaatattgttggttgcgtagacctgcttgtggcatttccttgtttcatctcacatagaagtcagtacacttcgtcgctaactttcttcctcgtctggcagtgctgatgggatgctttttggagcattgggtacttgcccagtttgttctagcttcctatactatcatggtggccagtatcattgcagtggctatgtgtcagaatggtccaagtgtacatactctacgacagaacccgtgcgcagtaaaaagaaatggaaaattcctgacgaaatggataatggttatcttacaaaggtatgactatggctccccacccccacccccacccccacccaaacccaaaagaatatcgttcttaatgcttggtttctacagttgaggtaagcaaatatgtatgtatcttgcagtggttcaagtctcaaaaggctaagaaaccagagagagttcttccgccaatgtcacctgagaaatcattgtgccaatcaacccagcaaaaccgatctttccttagtgaaggactggataaattgagagtttctatagtaggacaatctaaagatgtggttgtaagtgatcttttactttttggtacagttatcctcaggttctcttgtgagttgtgttcgttaaagcaagcaccaattatgccatgaccttgctgcatgttgtggcatgcaccagacgccctttattttttccaatcacagttactttgcttacattgttatccagattgattcttaccatattatacagattatatatattatgcatatttgttgtgtggcttgttgacatgaaattggaaagtgctcaactgtacatgcttcatatatttgtttgtttaagtcaattccttgaagatagctagtttagtttgttaatttattccttgagttcctcgattatttctttaatctccaaaaattttaatccatggaatatgcagagtgaccacatttagattgcagagcaaaggttaggagagtgtaggttttttccctatgtacttgattcagttcatgttaaattcatgtcatttgttgaataatagatcaaattttatatgatctagcatgctgcttttgcatcaagtggtaagatagatttgcaattatttgcatgggatactgttttcttttattttttcttctctgctgatcagttattgggctatacatttttctttttcttgttttttggtttgtactttgtacattcctctaaactaatcatgtaatccaactactgtaggatggatggaaacagaagctgaaagatgctggtgccaactttaatgccacagttaccaaaggtttttcctcgtgttatcttttttttttctgaactacacaggatttcctcgtgttatccagaactggaactatcttgttcagacatttgaacctttcatatttggttacgtatgacattggaacctatatcttcacccaagtgggtgagcagtttgacaccaccccatgaccaaaagccaccactcaaattcctaaaattggctggctctcacgtatgtgtaattttagactaatacatgacacttaatctaactgatgttttgaaagtataagtaaaatgcattgtctaactcatgattttttatgggagagatggattatggatcacttatgtgcaggtgataattttatgttatctatctgactgtctctatttctgtaagaacatatgggcattgagccagtatttttgtgcagctgatataatgaactgagtcatgtgacttggtcattgtttcataggttaggtaagctcttagtgtttggtgaaatcttttcgcattattttcacatggaagtcttgcactgcagacagcagctgcttagttttatgtagtgagcttgagagtgagaatgctgaagtcaagaaagcaaggtatcacattttactttgcccttatccttttacacttacagtttgacctattgttttgcgaactactgtgttacctattgttttgcgaactactgtgttaaaataccattatatatgctacttcatttcaggaggttgaagataccaattctgcgagaaggttaccttggagaatgcattagaaaaaacagagtgcttccatttgatttgtataaagtagaagctgcattggaatcttcgaaaggaggcacaatgactgttaaagttaaagggcgaagtgctgttcatgagtcctctggtttgcaagatacaggtcatattcttgaagatggaaaaagcatatacaatacaaccctgaacatgtctgacctgacacgaggtgtgaacaggcaaggattttgctcacagcatttcttgtcaaattcaggatttgcacttttaggagtgattgtcaaggcatatttcatatgagtgatatggataaaccgataaaccctccagcaattttagtcaccaaacaaagaacgtggattgcttctcaaatccaacttcccggtcttcccttgaactaacagaatgatataatgctaaatttcccatggttgttaagttataatgttgagtcaagtgcaaccatataaaatagcatgaacattttggaagtactttggtctggtttggtttggtttggttttcattacatatgcccctgaagtcatagccctcgtctcttgttcaagcccaacttagctttggttgtcaatcattccacgatgtctcgtatacatatatgaatcacccgatctagaatgtcttatttactgccattctgcaataaaaaatgttggagcttgcacaaatttctgtttcctttcctctcaatttatgttcgggagcataacacactgttgaaatgagggggaacttttcttctgtagtattaccagttgctaaatttctgttaggttattgcaaataatggtgaccctgcttgccctacttaatcttttaacagttctctctctctctctttttgtctgtgaagctattatatacttcaggtcattgaagaggataatgggtctgattgttatgtattccgaaagtggggacgagttgggaatgaaaaaattggaggcactaagttggaggagatgtcgaaaattcatgctattcaggaatttagaagattgtttcttgagaagactggaaacccctgggaagcatgggaacaaaaaacaaatttccaaaagcagcctgggaaattttatccacttgacattgtatgttgtgggataatgtttttacctgctggatttttttcccctttttagtggatcatgtggattcaatctgatgtgtttaatatattgcaggactatggtgtaaggcaaggaccaaagcggaaagacattgacaaaatgaaaagttcacttcctccccagttgctggagctcatgaatatgcttttcaatattgaaacatacaggtgcgattttactgttctattttcaggttttgcatgtgcacatgctttgtttttagtattagaaaagaatttcacattattttgtaccagggctgctatgctggaattcaaaattaacatgtctgagatgcccctgggtaaactaagcaaggaaaatatccaaaaaggtgtgatactttgctcattgtggaactcattttgttgatctgtaagtccaaacatatcatgattctcttgcctgcactgcatgcaggttttgaagcattaactgagatacagaatctattgggtaacactaataatcaagaactggcggttagagagagcttgatcgttgccgcgagcaatcgtttcttcacccttattccttctattcatcctcacattatacaagatgaggatgatttgatggtgaaagtatgtgttcattaccttgtgttatattcctgtatattgggaagatattccatgactattcttattttttaaaatcacgacagttttaagtgaaatattttgctataaaaccttccttttgcaaaagaataaaggcgttctatgatcattgctgaaattgaaatgggtccattccacgcacagatcgtacatgacttgtaatgatatcttggcagttaggcatgttccataatgctcaaatggaatcgaaggaacacaaaattgttatttattttgtcatatataaatttggcttccagtaaactatgttattgaagtaaaaaaatgtattttcgcactactttcatttatggttcaagttctcaatgactctcattttgctatctagttggaacattttagaggatgttataataaaaaactaacatacctatggcatttttccttttcttttcctttggttcttcacatgttctccttgccattagatacagtgctgttcttaaatgcaatgatatctcctgcatattcaaggaaaaatgtgttataactgtccaccgtttaaagggctgttttggttcttgtgttattttcattcttattttctttgactgatcagatgtatttcttattgccaattgtaactttattcagagacccaattgactgtaactttggtgcaatggtgcaggtgaaaatgcttgaagctctgcaagatattgaaattgcttctaaacttgttggcttcgatagtgacaatgatgagtctcttgatgacaagtacaagaaacttcgatgtgccattacgccactccctcatgattgtgaagattacaagctagttgagaagtatcttcttaacactcatgctcctacccacaaggcatgtattttcttctgtatacaaaaaccttatagttttttttttctcttttgtagatagtacaatacagacgattgtttctgttttcttctgtataggtattgacatgtcctctttttaaatcttttttgaaggagtggtcactggaattagaggaagtcttttcgcttgatcgagatggagaattcagcaagtactcaagatataagaataatctacataacaagatgttgttatggcatggtaagcaatctatccaagtaatgcaaacacatttggcttacgcaatatttgaaaaggtttttatactctcagtatttagtgccaaaatctaggtttgagatgaaacttattatccatgcgcagtctttgccatggcagtgcgtaggtgaacagagggttcacagtcaatccaacagttgtaaatgtttattttactagttcttcgtgtggtttactcgtgttgtatgttatgttgttatgtcagtatttaaaaggctactttttttgtaattgtactggagatctacttaacgtccctaagtaactctttccttcctaccatttgaatgattccatgattgcaaaacttaatttataggttcaaggttgaccaattatgttggaatacttagtcaaggactaagaatagcacctcctgaggctcccgtgacaggctatatggtttgctctttgttcacttcataaatggttcaactgtagcactggcaaaagattggttgaatttgattaagctattttcctttcaatcaacagtttgggaaaggcctctactttgcagatttagtaagcaagagtgcacaatattgttacgtggataggaagaatccagttggtttgatgcttctttccgaggttgctctaggtgacatgtatgaactgaagaaagccacggtaagatataaagcctctcactaccaaaagagaaattctggttataacattaacttgaacttctatctttgctttgaaatatgatcctgctttaaggaattgaccatggcatttctttcctgatttttttattgtgatctatatttctttgctgattcataattataagaaaaagctcaacgagttactcgagtgcaattacttgttttttttccccatgtttatcttggcttggcaccacactcactggcttactgctggctgctgcagtccatggacaaacctccaagagggaaacactcgaccaagggcttaggcaaaaccgtgccgctcgagtctgagtttgcgaaatggagggatgatgttgtggtgccatgcggaaagccagtgccagcatctatcaagacatctgagcttatgtacaatgagtatattgtctacaatacatcccaggttcagtcaaattgttatccatactcttttgcgcgcttctgttcatcagaagttcagttccttacctttcacgaaaccttatctctggcaggtgaagatgcagtacttgttgaaggttaggttccatcacaagaggtgactagaagacttgaggtaggagtagaaatgtagaattaatcagtggaagtatctccatcgttatcagtagtctgtggtggctacgcttttgatgtgttagaatgatttatccagtagtttcaggttggtaggaggttatgtgctgctcgcgtatgatccgttttggggtatgttgcatgggcatcgcgcgagtggcgcaagtaaatcccctgcgcatgccatgggcatttgatagatgtttgcctaattttctgtggcaatgtgcgcatttggcatctctgtttagcttgctattttatcatcactcgcgttatttgtgcgttgttgcgttttggctatctttctttgtattttgattcgaggtctatgttaggatactgcaatcgaaataaactgaacagcattagtgaatagtgccgtctgtaggatcaaagatagaggcgtgtgactgtctagcggaagtaatattcttctatcctataagtaacggttagtctagcacgacaattcgatgagcatagattgcaatagtttttccccaggtattagtgatttggtaatctccgcttgttttgtgcccttctttcactctggtttgtcgtcgtccttcacccttcgctcggggtgctcccacttcctcttagagagatcacttgacttgatagccacaaagacacgttatgaccagcatttagcctcaaagtaatatttaaccatatgatcaacaatatatagaacttatcattcttgaggtgtggccgtcatgagtttattccaatcatattattagaaaacagtaggcaccgcacgtgaggctcaggcgtccacgggaactgccgacggcgcagcaggggcatgcaggatggccttgggctcgtgctcttccttctcctcgtcctcctccgcctcggcctcatacgcgtcacgttcctggacccagagctccgcgaactcgcagttcttgtactgctcgaaccacggcccgccggaagtgtagtggatggcgcgcggcgccgtcccggccgtgtcggcggggtcgacgcggttgtgccccacgaggaagttccacacgaagggcacctcgccgatgtcggcgtcgtccagccacatgaagcggtgcaggtacgcgccgctctgcgtgctcacggcctcgggcgtcagcgcggcgcggttctttgggtgggcgcagttgaagagcaccatggacgaccagttcttgcgcgggtacaccgtctgcacggcgccgtccatcttggtggcctccttgggcgcgtagtcgtggtgcacgcacagcaccgcgtagcgcgggtcggccatgcgcgccagctccgcgacgtcggcgacgaagaggaagtcgcagtcgacgaagagcgcccagccgcggtagccggccaggtggggcgtcaggaagcgggtgaaggagaactcggtgctctccgtgggcccgcgctcccgccagtacagccccgcagaccggagctcctgctgcacgatcgggatcacggccaccggcacggaggagcgctgcagcagggagcgccggcacacgcggtacgcgatgtcctcgcgcgagtcgtacccgacgaacacgcggaacgtctcagcggcctgcacgtcgccggcgccagctacagggccagtcatcacgacgtcgttggtaggcgtgaccgacatagtatttgttggtgatatataagcagaaggttagtagtactgtttgctagcttccccgcaaaaaaagaaaaaaagagtagtgtttgctagctcctggtgctacgtacgcataggccgtgcgagttatcacaaactcctccgcctttttaataagagcctaagagccctttgtcctttgagtgtggggagcgaattgaaacgaggacatgcgtatatgacgacatgtacgtcaacagcgttacgcttgcattattaggcccagggagatcgatgtccagaattatgcatatgtgtttctcttcttttgttgccaaaatcaacaaaattagataaaggaatcctatagctaaccgattgctgtgtggtccggcgccggcggatgcatggcgacactgcactgtggtgtgggcagcgcgcgggcgggaccgacgacagcgcgcgcgcggttgctaatttgtacgggtaatacgtggtcctgtcgtgtgaactaccacagcagcacggcaggaacacgcgcagctgcatgggcagttgggcactctgcctccctgcgtcgattgctccacagtcgtcgtcatgtcccgatcctaattatcacgtcaaaacagctaggcaagtgttgcttgtttttttttttagataataagtgttgcttgttgctccatcgttttcctttttcaattatatatgttattattcacattttcactcagtattttattactaccttgtagaagtttatcgagaatgcatatagtcaaaaatgtcttattttggatgtccagaaatgtttataatttgagaagatgtagtaaaatttacatccaaaatggacaattataccttcctttcgtggcttcacttccatgtgtataccttatggttgtaaatatttaacatttagaaaaaatattggttaaacctccaattttacaatagcataagtttataaaatatactacatcctattcttttttacttgccgttttagacattgatacggatataatttacatattttatcattactttttctaaacatattttttacaagctataaaaacaataattatatgaaagttttttttacaaatatctactgataccattttcacgtgtcaactcctaatattttagaattaactaattaattaatatttgattttaccattaattttaagacatcatctacttgagaatctacttgagaaacggatagtaataagtttaaagaatggtggtggttttgaaatcgggatcctctggattacagtttgtaatgcatatgaccaagagcagatcatgtcatgcgcttcggtactcaatagtggattacaataaatacagttcgcatgaataatgagcctctgcattactgcagaggatccagatctatggctttgacgcacgtttatgcatgcatactaattttttaaacctaaacatttgataaactattattaatagtgagattacaccagtaccaggcttattttttggtactaacctccgcctcatggaatttttttttcttgtagcacgcatgtaattttttttcttgtcccgagatggctgcgttgcctctcgtacgtttggatggatccgcgagggagaagcgtgaccctcgtggtagcatcccgatgatggaggagcgatgccagttgcttcccttgtcaccatcggaaaacaggtgtgtggtttgagctagggatgacaacgggtcagatcgggcacggcagagtaaaatcatgcctgaacccatgcccatcgtcgcttgtccaaaccttacccactagggttagcgggcaaaactctgtgcccgtacccatgcccgacgggcacgggtatacccggcgggtacttaatggatctcatatgaatagtaactcgaaagatatacagtttaacaaagagaaataaaatcaacaatttaacaatttattagttatcaacaataatttgaattacatcataacttattacagtggcgaatccagaatgaaaatagaggcggtgctctaatgaccagtgtcaacgttgggaactagaatatatcgataagtgaaccatgtatatctcactatgtttgtagaaaaatctcacttttttagctctaagaccgtcaatcaaagatcattcatatttgctaatatgaaattaatggtgaagaaccacgttgtctcgttgatttcacacctctctctagccatcaggtctctgcccccatatataactacagctaaaataatttgaaatgtgccatatcatagcaactgtgactggagcacaaaacatccgagaaaacaaagcatgaaagcagtagtccaagtaccatctagtcattttcttcctccaaacggtagctagtcataactactgcagcattagtgacatagggatacttaggacctagtagatggagctggggcttgcgccccaacaagccccaatactaaattcgcccctgacttattattagttagtatcacaaatgaaccaagagaaaggggcataacaattaagagataagtcgaaattagctaatacatatgtatcgggtcgaacatgggttacccagaggcaaaaaaatgaaacccggttgttacccacgatgtctacgggtttcgggcggacgtgcccacgggtaaaaattcacacccacgcccatgcccattgggtcaggtatccgcggatacccggacccataggcaaaattaccatccctagtgcccacgggtaaaaattcacacccacgctcatacctattgggtcaggtatctgcggatacccggacccatgggcaaaattgtcatccctagtttgagctatactcctagttaacaaacaattataggttagcctggtgatcactcgatcagatatactagtaccgcatatgccacctaccacacacgtacggccgcacccgaccgattgatctttaactgtgttgaggactcggcgacgacatgtcgctgtgggaccacttcgattgatcgatacccggttgttggtcagatcagtttcagcgtcttatcttgatagtcatctttaatttgatagctcgtatgtaggatcaaatcaagtgaactaagctagaggtgaatagtaggaacaccgaaaattagtttttagtgtaactaaaagttacgctcaaaatccgatgacgttaattaactggtatgaccggtctaatcaccctctaaaccactgtcatcgatcgccaccgctggtctagccgctgtgaagccactggtgtgaccaccgtgccctcacaggtgtgatcaccgaaactgagaaaaacacaaatcgaaaaactcttgaaactagatcaactttattgtttctaattgtttttacaaagtgcaacaacagtactactctctcaagtttcgactaaacttgaaatttatactaaactctattttttctctcaactaaactctcaaaattgataccaatagatctcaacccatcttctatttatccccgaaagtagcaacccaaaagccataaatccacattaataagtagtcctaatccactagggaacctacccatatgcacgtacacacactacgccagatcaattcatgtgacggaccaaaatatctcgtcacaaacaatatcacctttgacgggttaaataaatctcgtcatagatgaggctaaaaaaaatgacccgtcacaggtaaatagtatttacctgtgacgggtatatataaggacacgacacatgacgtttgtgacatgtccacgtataaacccatcattgatgagtacttatatgtgacgggttttaagtttgcacccgtcaaaggtgagtaacctcacctcagatattccatcaattttgacttataaataaggaaaccccaaccctcccccactgcccactgcccatctcttttctctcttctctcttctctcttttctcttcctccaccatcgcctctcccccaattgtgcaccagctgccgcggtctccttcccatagcagcgtcgccgcctcctttgcccgccgtcgtcctctaggagctcagggtcgccgcctccttcgcccgccatcggcctccaggaggtcgggcccggtggccttaacatcgacgccgccgccaccttctgaccgccagtcaccagattcgactgccggtgccttctcccgcctcccggtcgctgacgccgtcgcctcccgaccgccgggcttcaacactgacgccgtcaccgcctcctgaccgccgatcgccagatctggcccccgagaagccggatctggccgccggcgccttccctcgcctcccggccgccgacgccgccaagtctggcctccaggacgcggatccagccgccgacaccttcgccacctccgcaacctcttcctcgactgccggacaccgcctccttcgccgccaaccgctgaccaccagatccgacctccacgaggttgtgggatgcggatccagcatccgcagcctttccttgactgccggacgccgctgcctccgccaccgaccgccggccgccggatttgtttgtgcttgatgtcgtttgtgcttgatttgctaatgtttgttgcttgtgtggatgtgtagtttgttaaaattgatatgggtacttgtgtgatgtatattgttagattgcttcatgtgtagttttttgttgagatgtatttgatttaaaatacaaagttgttgtatcgtgtgcatcttgagatgtatttgatttttcttcatttcgtacatttggggtgaggaacttctttttttctgggtggtttttgacatctgtgacaggtgggaattaaaaccagtcacagctgttttgtcacctttgatgagttggaaagagtcatccgtcacaggtgtgagtcacgtgtgacgggctatatttttctgcccgtcaaaggttttaattaccagtgacgggctttcacccgtcaaagatgaagtgtagtcattagtgaccactaatctctgaccaggactaaatccgtcaaaggtgagggttagaacccatcacagatgaccggatctggcctagtgacaacttatccctttacaattcaaactttaatcttcctacatttggactctttccaaatttgactctgcttttcattcgcacataatctctcttgtatgccgtatggaatcttcacaaccacgcgtattgttattcagtctgagcattccacatgatctcctgatcatccgaacattaacgtctcccaagtcggctttcaatccatcaccgccaatgttctttcgaggcatcaagacacacctgcacatgaatcaaataacaaaccatattcgagcacaagttatttcccaacttgactcaacattaagataaaacagtattacacacgtatagaaatcataaacatgagataatcgcgagtatccaaagaaaacataaaaccgactctaaacaaagtccaaccgatcttaccgtagccacaacaccagtctaaccggcacaccctagtcgatctgatcgcaagagccaaacaaaaatccctgttttcgtactatcactattcaatatattgcataacagaacttcaccaattatccaccaaatttcaaaaccaatataaatcacatatcaattgttcatcacagaatatataaatgaaaaacattgattttacacgcacgtctacgattcatgagctgccagcaacagatgcacatggaaatatagaaggaaaggatccggtcgatcgaagttttcactaaaacttcaaagtcgttcatgtgaatatatacaatcataaatcatgtagcaaagtcccttcataaatttatgtcatgatgatatatagccacgttgccaacgcactgtgcaactactatatatagtgttattacagccatttttatacgttttatttttgctatttatcattaattagttgaccttttttttctcttgtctgttattcaccccgactgtagtttagacatgcaacttaattttgaatacagataaattgccatttttgtttgctttattttttaataccctaaatttatctagatgtatttatagttatatagataatattctaagtgcttttgtatcactttggtgtaattggttaagttcaacaaaatctttcattatttaaaaagagtaaaatgtgcgggtggtctctaaagttatacatgggtgtcatctaggtctctaaactcttctcaatatatatttttggatccacaaacttatcatgtgtgtcatataggtccaaacgggtttcaacccactctctgtgcactgacgtgacatgacatgaagtatatagatgttctgcatagcacatagacaacaataaattgtttcaaatgggactttctttttttccccttaaagggatatcgtcatatctacttttacgagcccacaacaaatcgggacctccacattcatgcatcattagattccccacccacatatgcactttattagcaaattataaactattttttcttacgaattaattatccgatatgtgatctgattgtattattaaatttattgcaattaaattttacagagagatcccacatgaaaatattttggataaaaaatattcgtaacagaaatatttttatatgatatatgaaacattgagttataaccgatgaaacatcacaaaatacttgctgaaacatccaaagaatagcacgtgtaacaatctaaaatgacccattaaagcatcacaaaatacatcccgagacatccccaaaaatagcacgtgcaacattctgaaatgatatagtgaaacatcagctacaattaaacatcgcgaaatacctcctacaacatccaaagaacaccctgtgcaacattcaataatgacatagtgaaacatcctaaaatacttattgtaacattttaaatccattgcaacaaaaaaaaacttctaaaagcaaatcatcaaaatatagtcatgtgagatctaaaaatgtttgtgcggtgcagttgaatggtaccattgcaattgtgaatgatgactccgaccctaggtctttcgagtaggacgggcagtagggagatatcgatgactattcatcactatcttccttagatgatgaaggcccaacttcattttataccgaggaagagttgcagaatcttaagaggacgaaagatgtcttggttgaaattcctattttaggtgattgcttacaatggatttagccatttctgtccttttaaattgcagtgaaaacaaagaacaaggaatcgaatatgcttgaaccattcatatcttcaacagataaatcaagtccatcaaaaccactctaaaatggattcctccaaaccattcattactatggagtttactaatagtaccaattttctaaatacaaacttgttatgttcatcataaaccacaatggtcatgaaattaataaacaaataatcctaacacatgaaattttctaagtgaacaatggaaattatttcttaaaagacacaaaataaatggggctagctgaactgccacggcaacgagctgggcgtggcagttttcagctgccatgtcacggagcctgacgtggcaataggtgctacgtcgaagccggcttgaccttgtcaatgccaatgattgccacggggcaccgttgcccatgccaagaccggtggtgtggcaaggtagtttggccacaccggttacaaatggcatggcaaaaaggttcatttttgaaaataagttcctgggaggccgttaaggttcatttatgttatgttgaaataagtgaaaattatttattaaaatggtctaaaataaaaagattccaccacatgccacctaccacatttttcgtgggatatactagcatccgacgccatttaattaatctaagcatcatgctcacattaataaataatgatactaattaccccgggactccaaccctttagatagactagttagaactagtgcaacatattaaaataattagaccgaagccgtggcatagatcagctagtccaatcaagtgaagcacaaactattcctataacacataactaataaagtagtatatgaactataaacactaataagtgcaaaagataattcctttatgaaactcatagtcttacaaagagagtaaagtactaagaacatacccgaatctccaagaagactatggaaccgaagactattctaagcttatctccactactaaagagaaaacaagtatatgaataagaaaactgctctctaagtgtgtattttgagagtgaaggagtgatttctatttataggctgcttatgacgattgttaagtcggtaatcaagtgcaaccgcctttgagaagaaatcatgagttgccacgtggaggatggagatgagaggtggcgatggtgttggttcgagtgacccatgcatgggccccatctctctctaccacctttctccaaggattgacatgtgggcctctaaggaggtgcacggtggtttggcctcactttaagtcggtttgagctgacttatggggcatcaatccatgtgctcacacatgattcaccggagatgtgtttctttgtatgccggtttatttctccttcactttattgtacaattactgcatccgtagtaattctccgagacaagtgaaactacattatttacaactaatattcatgtaagaaatattagttctccttttattatttgaggaaattgatggttgaaatcggtacttaataaccgtcaatgtaaactattattaacagtaatagtaaaagattacaccatactagacttattttttagccacacgtagcatggtacgtactagattcgttttaaaataaagctatttttaagtatagtactttgtcgtaaaaaagaagaaattttctagcccagtctctcatctaaaccaatgataacattttctatttgatttcttcattcactctcttttcttaatcattcaatcacaatcttactctaaccattaagacctatatttctaatagttatgtttatattaaaatacctatattttagaatattttagaacaaaggtagtagtgagagggattgttgcagcacgcatggaattatttttttctcatcccgacatggctgcgttgcctctcgtttggatggatccgctagggaaagtgtgaccggcgtgtgtggtgcatcccacgatgatggagctagccatgccagttgcttccctaccttgtcaccgtcagaaaaggtgtgtggttcgagctatacgactaattaactgaagtactgtaacaattataggttaccctggtgatcactcgatcagatctactagatcacaccacacgtccgcacccggtcgattctttaactgtgtagaggtctccgacatgtcggtgggaacaactgaccacatcgatcgatccccggccagtcggtcagagatcagtttcagcatcttatcatggtgtgtaatcagtgttatggaaacggaatacggatgtcggatgaagaagatactgacaaacgattaatagaaatacggatgattaatcaaaatttgacgaaaattcaatgtttgtgaatatgtaaatattgttatgcatattatagactcatatattgggaattcactacatataatacgctagaattaattaggaaaaggtgaaaacgatgagagctactatatatatagatatagaaatctgactagtattagtattagtgcattggaaaaatattctataaagattacgaagagaaatttccgctccctgtcgtccacgcgggcgcagggagcgaaccctagtcccaaccgacaccatcctcccttcctctcccctgcctcactgccgctagaaaccgcgcggccgctaggatggcagcgatagggctgaaaccccagcggtggcccattcttcggcgtgaggagacggcacgcgcggcggatccaccgccgcgggatgtagccccctccccctgcccccgcggatggatctggtgctcctaccgccagatctgaccggagtgcactagcgacgacgtggacgatggcggagggacgacgactggaggcgctagcaatgggaggccgcgaggttattggcttgctgtggccggtaggaggcacaggagatgacgggaggagcgggtgacgactccagctgcccaacgggaggcgccgacgacaacagtggtcggctgatgggaggcgtgggcaacagcagcggttcaccggagggaggtgcgactggtgccggcggacgatggcgcgacacaacgaggagcggctgaaggcggtggtggagctcctggtatcagcgcatgcgagcggcagtggtggttgcactctcggtagttgttgggggtggttgcggtcggtgaagcgatggccgatgtaggtcgcaccgggggctatgaggccaacccggcaacgggctaaccgctggtgcgcagcggtggagaggttgccgtgatgggaggacggaggcgacggtgatgcgactaggcagctggttgtgaacacgagcagcctggtcgaggcggcgacaacggtagcgccatgaggggtatgttgaagcctgcaacgagcttcctttccaatcgtttgtccttttgcagcgctggcttgccaccgtaagatggccacgctggacgggctagtgcagggcagaggggatccttctctctcaccattttctatctccaacccaacaacacggatggagttgaagcgcgatgggtgttgagattcttcttagatggctggccaacggcgaggtgtcggcgcagtggctgtgcatcgaaggtggattagcgggtggttttgctgaagctgacatgcactctttggcgcgggagagtataacaatgggtgaaggcctagccttcgggccggcaatggcgatgactgtgggcgcgttttccccttggggtgttgtcgtgttttctgtcctctcccatgggttcttcaggtgaaaactgttaacggtcgttatcgatcagtttcgaccatcaatattaccaaaacaggagagaactagtgatgcttgcaatgcataaatatgttagaataataatattccactagtacaggtctactgaccttttgcaaagaatgatcataaagtggaggagaatcgacatcaacaccaacgataaatcaatcagacgatgtcgaggatcagacttatgtatgaatgggccaagaacacagaattgacacgatgaattgggccaaaattcacaagtctgcggagtggagcaatagaggaggccaccagccgaaattgggctggattgggccagccccgggttcggctgaacctggtggtttggccgaaccaatcctggcgccgttggatccaggttttggcgtggacgtccaggattgcatcccaatgacggttggagggtacttcggacaattccccttccacaaccgccatacctacctctatataaggagctcactctcttcacttcaacacacacctcaagcaagagctctctcattcctcttaagtttagtttagtagtatctagctggtggaatagaattagaataggaatcaggagtccggaagtcttcgaaagagttcaggtatggctctagtagctttcctttcctcttttgtaagctttgtacttttattagaatactcttctaaatacatttctggtattgaaatactttccgagtatatgagtaccaactttacattatgttcttgttatactgaatatacggctagtttatctgggagatgctttggtgcgggtataatgtttctttatgcaattactctttgtcatgacgatggtattagagtagtatctagtagtttaggcgtggtgtctagattacgggatatcattatttggggttatatattgcggatgagaggtgggccgctgatggtgacagcttagtacgggtattcctccgcgcctatatataatcctaagttaatttcctaggggggtattcctctgtatttagccccggttggatggccatgacgggctgtcgtaaggaactcggcagtcaggggtggcttctcgaagtaccaggagagcatcggatatagggtattagctagtatatcaattaactagaatgtatgtatactatgtatattagaagtataggaattgattctctttctcttttctttccacctagcttagattatttattataaggatgagtagaaatgcttgtgtgccactctacccttggattatcttaacccctgcttagaatatgattatcacatgtaatatataaattattagttgagttctctctacatgatcttcccatgggataaaataaatatgatacccttggaatactctcgggtgaaatgctacaatggtatatccgtgcgcttgcggatgaactctgtaaccataatataccagaagtatttctgcgccattgctgggaattatatttctagtaatgtcgttaagaaataccaacaaaaaccacgtcctggatctctaggacaggcggtgacgaagctattggcatcgtttcctccttggaggcgtcgtttagaagacttatttcttaggggtattgtgtgcttgtcctgtatttagcagtaagatcagacatagacgagtggtgtggatgcatattttcttttttcttactatagtcttccaagattatagacttgtgttttattcctactttattaatataaatgtcgcactatcttgtatgggttgttttaaaaaaatatatatggattatcttctgttcttctatttgagtggattgtctatacatttgtcaacaaattttcttctaaaattttgtcagatgtaaatatagtataacaatactataattacattctaactaacttacatgtaataactacagtgtaactgatattataactttcgcgtaattttgaaatcgttagatttgctttaagattggtgcaagctgagaagatatataaaagtcgcaacgcacacaagtgaggggatttggtctcgtgacctccgcttcatgaaaatagcaatgttatcgtaagatttttgaaagttgcatacaaattatactgtgttatatgcaagttacaatgtacgtaattacactaccattacactatatttacatttgtaaaaaaaattggagaatttgttgataaatgtatagcaaaactgctatttgagatatacatgaaacatcaaaatgaattttgagatcaagaaaatatggtagattggatttgaaagaggattagatggaaagaactaaccctaacaggttgcagcgacatcagaggaatttagaagggtaatcaacaacgtactggtacagctagcctttatactagaggacaacaaatatgctgggatagtcgttgtgggttggttcggccttttgatcaggccgattagacggaagcggccggggagattatcggaggtgacgggaattttacgttctggaatgattaacgaaggacgccgttttgcaaaaacgtgaccggcttatcaccatcaacgtttcaatggctgtatcaagcgttttccacaacactgtatgtaatcagtgggagtacgttttagacgtgctggtgctaccgaaattgcgactgctaccatcccggctgtacgtctttgatagtcatctttaattcaatttatagcccgtatgtctacgtcgtaattaattcatgaaaatcgatcggtttttttgaaccatgagctttcgatccaggcacatggaaatataaaaggaaaggatccggtcgatcgaagttttcgatataacttcatgtcgttcatgtgaatatataatcataaatcacgtacagcaaagtcctttcataaatttatgtcatgataactgcacataaggtgtagtttagacatgcaaaactttagtatacaaatagattgccatttttgtttgctttattattttaacaccctgattttatctaaatgtatttatagttacatggatcatatttttgtgtgctcagtgttttttttattactttagtgtaattgattgagttcaataaaagctttctaggtttctgaactgttacaatatatttttctggtctctgaacttatcatgagtgttatataggaccaaacgggctccaagccattctatacgctaacgcacacagacagtaatatctatcaaatgtgaacttctatttttttcccattagagggatgccgtcatatatatttttagctctaaaatacaatacaaatagtattgaaaatctgtaaaaatttatagatagtattaacatctaccactcgaaaaaaataaagtctaagaagggccaatctacaacatcagaacctaaaagataagcgaacttttaccattcttgagaaggtaccaccactccacccggtgctagataccaagaagtaccttttagggcattggcaccgaatgcggtgatgagctggcataaggccagatttgaggcgtctcaattcattcttgatttgcagccgcagcgaggtacacttgaggctgtggtggataaaccgatagaagcaagggtatatgcgaaagttcaattttaccctctcacccacaacacctcctctctcgggagagcagtaccacccggtacaaagcaattctagctcttagattgtacgagatggatggtctagattagtaccatctccactcaaggatgataaaaactctcaaaagataaatacattacatgtacttggtcgtatcattttcatttctcaatgtgcgcattgatttaatttaggcttccatttttagatagtagatacgtactccctccgttttttaatagatgacgccgttgacttttgaacatatatttgaccattcgttttattaaaaaattatatacaaatgtataagatataaattatgcttaaagtactttgagtgataaaacaactcacaacaaaataaattataattatggttttttttaataaaacgaatggtcaaacgtgtgaaaaaaaagtatattgtatcgatgatcaattttgaaaaaaagaagattgtaactatatatttagatctacttttagaaaatgaaagaacgaattaaccacgtagtgtggtccattaatctgcaccatctaggcatctattggtcctctccagtctccaggactcagctaggaaggaaagaacagagccagatacccagcaaacaggaggcaacaaaacaatttgctggagtacgagtcattcggccacaagcccacaacatgacgctagggccactaattcaccccgtgaccgtcctagagcaatgccatgtctcgccatctccggcgccggcggccggccagccacggtcgctgccgctcacgttcttcgacctcgtcttcttggacttcccgcccgtgcagcgcctcttcttctacgacaacgccgacctccgcgacgcccatgacttcctcctccgcgagcttcccctcttcagggagtccctggccgctgccctgcaccatttctaccccttggtcgggaagctgccgtgcgggatacgggagcgcatgtcgccgccggaggtcgcgtactcggatggctactccgtctgcctgaccgtcgccgtcagcagcgacgacttccaggacctcgccggcgaccacccgcgcgacaccgcgaggctacgcccgctgctgcctccgctgcccaagcatggtagctcgcaggacgtgctcgccgtccaggtcaccgtgttccctcgcgccggcatctgcgtcggcacgacgctgcaccacgccgtggccgacggttccagctacgtgcacttcctcaagacgtgggccgccattcaccgcctcggcgacgagcgcaggaaagcggtggtggtggaccacacgccgccgctgttcgaccgtggcgtcgtgcaggacggcgacggactccgggaggcgtttatccgcgaccaccgggatctcgtggagtccggtgacaagcggctcgacgactgggacctcagccggaggccggacaccgtgctcgcgacgttcaggttcacggacgagctgctccgcaagctggggaggcatgtcgaggcggagacctcggcgcggtgctcgccctacgcgctggcgtgcggcgccgcgtgggccggcatcgtgcgcgcgcaaggcgtgggcggcggcgacgtcgcgcggttcgggttcgtgaccgggtgcaagccccgcgtgagcccgccgataccgtcgagctacttcggcaactgcctggggctgtgcttcgtggaggccaagcggagacacctcaccgcggccagcgcatcggcggccatctggcgcgtgatcgcggggctcgccgagcaggggcgggcgctccgtgacgcccacggctgggtgcgcggcgcgcgggagtacgcggcggcgcgcgcggtgacggtggcgggttcaccgaagctgggcgtgtacgcggcggcggatctcggcgcgacgtgggggggtcggccccggaaggtggagatagcgtcggtggagcggacgggcgcgctggcgctggcggagagcggccgccgtggcgaccgggacggcggcggcatcgaggtcggggtggcgctgccgcgcgcggagatggaggcgttccgcgcgttccacgtcgagctggtccggctgctagacgccactacccactagtgctgagtggtgacgcggcctcccccttgccgccagtgtaaaaaaatcgtgccattattccctctgcttcggtgtttctggaactgggaccagtcctttgccttctgctgtttctgtttgccagttgccatgtgtccgtagtagactagtagtacggttcgtctactccctccgttattaaaaaaacaaatcatgagttttcgtatccaacgtttgactgtttatcttatataaatttttttataattagtattttcattattgttagatgataaaacatgattaatactttatacgtgactgtctttttaatttttttcttaattttttacaaataagacggacgatcaaacactggacacggaaacctagggtttgtctttttttttggacggaaggagtattactctactactccattagtcccataatataatgtaggaacttaataccggatgtgatatttcatagtataatgaatctagacaccctcctgtccagatttgttgtactataaaatatcccatccggtattagattgctatattatgagacggaaggagtactagttactcccgttctagaatatattttaaagacctgcttgggagcaatcaaaaaaatattgacttgtaattttatttcgcccgtaattgtcgggcaccaaaaataaagtgaaattaaaacccgtgcattcatggtgtttgggaaggaacatcaagaagttcgaattctgatttgacgaaatagggtatcttacgaattcaatcaatggatcaaatcagcatgaccaatcgaggaatcaaatctgaacaaacaatttagaccaaaacatcaaacagaaatcgattggaaaaaaacaacaaaattgatccgatcctgaataaaaatgagctgttcgtgcattattcatcaaacagttccgagcacaacatgaaagagaaaaacaacagagagattgatgagaaatattgggcaaaattatcaaaacgatatacactgatctcttctcactacccccaacgagaaatttagaagaagcagaagctgtactcagattgaaagctgtacttaacgagaaatcaaatcaagggcctctttgaagagtttctgtcagctgtagctttttccgaaatcagaagctcatcaaaacagtttagcttttcgtttagattctaagaaactgtggttgttgaatccagaaaataaactagagttaggaaactcagttttttcatattctcaaaatctggctatgaacggaggtatttttataagacccaagactacatctagaagtaggtcgtttcaatttggagagagctgatgccaacagcatgcactgaggttgcgatgacgccagaaactgtgaagatgtcggtcgcatgtgagggtgagacggtgccggaaatgcagatcgacagtaggggctgatctacagtagaatggtcggtgtcaggcgacactgacgactttcggcaaaatctatagcaaaactgtttatctatatgttataacaccatgatctaaatataattagcatactgtgacaccgatagatatgttatgataccaattctctgatccgccactgatcggcagtcgagaagatgttgtagatgcagatcgagactgacaccatgacgagaagaggaggccaacgacctggacggattccggccgacccacagggcaaggtcgtagcggcggtgcatggagacggagctaagttcacggtggcggcgcgtggagccggagttgagttcacggggacaacatgtggagctaggtggagcggactgcggagtacggctgaagctgagaacaagcccgactttcgtcgttttctagtgtgattgataggagataatctatttcccggtgtaatgggcctctacgaacgaatttcaatctgacatccggcccatccaagcgcgcaatttcagtccggctcaacaaattttatgggcctgtgaattacacctgttttggaccaaatacaagccttccaaggaggttctaacttcaaccttcaaaatatatttttttctcaatcgatcacaatatttttatcattcaaattccacatttagatttttcttctcaactaatcataacattcttctatttaattccttcaactttcttgatactcatatggaacctaaaactcgtatatgttttggaaggtatttgaaggcggaggaaggtgacgaggagcggatgctacgaggtaggtttgggagaaatcgaaacgcaagtggagattggatagatacttgagctagagagatcagcaaaatggtcgggaagaagaatacagactctagagtaagagcggggatggccatccaaactactcccctccgtttcacaatgtaagtcattctagcatttttcacattcatattaatgttaatgaatctagacatatatatctatctagaatcattaatatcaatacgaatgtgggaaatactagaatgacttacattatgaaatggaggaaggagttgggtttgctcaggtgcacaactaacagcattatcaatatttcgttcaaccaaatatgtttcttaggccttttttagaacgcaagaatttcatagacattttatagtatttttcacgagaacaattcagttccccggaattcacaaacaaaaggctcaccttcggaaggtggccttgaccattaaaaattttaacgttcaaaacagtaagtttacctgcagcaagctttgtagttacagtgtctcaatttcaataagtttaccaggccacgatttctcctctcagggcccacaggaaacaaacggcaagatctaaaaccctacaatctaagttgccttagcattactacatgtactggcggtagttatcatatcaacttaacaactttagggtttttgaaatttgccatgcacccaaacccgttgcatcttcttccccttttttctattcactgatatgacacaacaataccccagttccaactgcacaatgataggcaaatgcaagtcaatggtttcataagttacagacatacaaggaaactggaccaaagcaccaatgacacaaactgaaatttttacatttttggtccttttttaaaacttattttacaaatggccccttgaaaaacttattacaggaatgatcctttctggtgcaccagagtggctggcgccgtactccaacatggcggcgccagccaccctggcgccgtgaccgtgccaccgtggcacaagggcgagcgtggagagggtgacgtggcaaaggggggcgccaaccacactggcgccgaccctcataccacggcgccagcgtgcctggcgcactcctcctaggtaggggccaagccctaaccttctgcctcgggcgggaagctggcaccccaaccac

SEQ ID NO: 5043 - DNA, 9855 bp, Oryza sativa
cggaggaattgatttgggaaggatttggattcggaattgaactcgacgatagatcggggatttgagatcttgagatggcacggacactagacgacaagcgaagaaacaaatttcgcaattagggtttttaggagataatttttccgctaggcgccacgacggaacgggcgttacagaggcgtatggtgagcggtggcgccggcggccgagagcggcgtggcgcacggtgagcggcggtggaaggcgcgcggtggcgtcgggtgggagcggcgtggcgcgtggcgcgtggaggcggccgatagctgtgcgacgacgacgacgacctcgatgcggacaaccccgacgacgactgggcggcgacgacgactgggcgcccggatctggcgggcggaggcagcagagagcggcgcgacgacgacgacgaccccgacgacgagtgggtgcccggatccggtgggcgaaggcggccgagagcggcgtgacgacgaccccaacgacgatcccgacgacaacgacgattgggcagcgacggggcggtgacgcgggcctcgtccctcccggatccggcggcggcgggcctcatcccgtccagatccggcggtggcgggccttgtcccgctcggatccggcaagagcgggggtggccggcggtgggagcgggagcgggagcaggctgcggcgggaccggggcgatcggcggtgggagcgggggcaggtggcacgggagcggcaggcgagctcgggcggcggcatcgccgcctgcgggctaggttttttttttggaattttatttttttttggcgattttttctctttgcatgcggtcggcttaagcgcccgcatgcgaaaatgcgggtgccgtggccacatgcaaagttggcgattttcacagacaatttcccgcatgtggttgcgccaaccgcatgcgaaaatctctcctgcccgtgtgcaaagacctttttttagtagtgtctagtgttatgggttgggactgcccttatgctccataagaagttgctagaattaaatgggctaggctcaatttaatcctaggaaatttcatgagccataattaatgttaagagattaataccattttgaaaaccaacatgggggaccttgatttaaatagcttactaattgagagcacatgctgagcgtttgaggtggtcatgggactgccatgcctgcgcgcgccgagccaagctggccgtggcggggcgggggttgggctggctgctctcctccccttccgagcattgcattattgtgagtaaagatgatataactgatggggagccattacgactgtaacatatggagcaattaagcgtctcaagtactcctgaaaaaataactgatggacagtcattacggctctaatgtatggagcaattaagcgtctcaattactgccgaaacgtctctctgttaaccttccatcaccgggatatacagagataagaactcttttctttattcgtccttctcgtattcctctcctctcacggtacacatcccacccttttgttcctccatccatctaagaagctgcatgggtaagtaggcgatcaagattttggagagcggttctttgcgcgactcctctcggcactgcatcctctacaccgcggtcttcttcctctgcatcaacatatcgtccaacccaatcacaggcagtggaggaggagacagcattggcaacgcagaaacagagaacgtcatcaacggaggcaacaacaataatacatcatcatcatgtcgagcgttttctgggtatatgtgttcgacgatattttgtacattttttttatatatgaaagaaatgaagtgtgtcaaagtattaatttcgggaatggcgatataataacgaaattggtgattaattaccactaatagcacaacctggcgtacatggcgtatacgtatgaataatgtgagacacttgccgtcggctgctctagtatatacgtactcacgacattttgatatagggtgatcgatccaatttcatggttggctggtggaaggaaaaaggtgtgaatgttttcatgggaatggaagcatgtgccactgtagcactgtcattagaggaagttaatcatatgatttgccggccgttaatctctcacgtcatatgcatggaaaccacgtacagtacatgcttgcatggaaacctaggaaatcaaaagggcaagatagctttatatgaaagtttctttccatgagcagggcgtgagcgtatacgtatacaaggaaaattgatccatatcacgtcagattggaaacgaaacagataatagcagcaagcacctgagatttcacatggaaatactactctccgtatcaccatagagaagcttcaataatcatatcacaatacaacggaattatcataatcatgatatttgctaaatggaaatttggcttatagatggaagcggctggctggctgtgcagatactaatccatgtatgagctagcctgtgaaccgacttatcacccctataaaagattgtccatttcattttacagggagacaggacagacacagagacggaggaacacacacagacagaacacacacgcatacgaaagtgagagagagagagacacacaccatttttggccggagaatctcggcgtccagcgagaacacgttggccgcagtgcctcggcgtccggcgaggaggcgcgcggaggaggagacggtcgccggagcacgtacccagccattgccatgggtacagcttattagctttcttttatttttcctgctctttctgctcagatcgtcatgcatgcacaacacggcgacgaggcgagtttctggtgctgcccggcccgctggatatagcgtcctctccgcctgtcggacgcaccgccggccggagatcgcgtcatcggagacgtcggtcgccggtgacacaactacctgctgccgcgacgtccttgcctcgccggccgcaacctctatcccacgacgcctttacctggcgatgtgatgtcgccgagacgctggacgttgtcgccttgccggtcgcagcctcctcttcgcgacatcactgacgtccgctcgctctcgtcgacgttaccatcttcttcgaactcatcggctggttgctcgaggagaacgccgaccggagcgccactactcggtgcccgcaaggcgtctccagctccagctacgtcgcaagccatctcgtcggagttgccggggacgtcgtcgagccgcctgagtccgtagacgacgcaacgctgccaagcgatgctcgtcatcatccgctgcttgccggagaaggtttttgtcattttgcctcaccggagcacgccaaagggagttgaggcagccgccagggcactacgccgcagagccctcccatgtcgcggatgctgattgtcttgtgcatgctattgtatacggtgacaaaccaacaaaacaagacatgcatgcatgctactgtacacggtgacaagcaaaaatgagtttgcagattcatactcatttggggctgctccgtattaaacctccaagccatgaccaattcggctatcgcgttgatcattttacttttataatctaattccgatgcaattcctacctcgtcgggtcatccaagctacacaattccatacatgtcttcaacaacaatataaaccaacacatcgtccaaggccgatgaggctaaacagcagggcgggaggagtcgacatcaagacgacgtcaccaacaccggcgtgcggaccgacgaggccgcgaataccgccggcgcccactcacacacatctacaccatcatcaccatcatgcatggaggacgtgaagcgaagacggatgatgacgaccagcgtagcttaatcggaggtatctcacgggtttaactcgcgagagtaattaaccgggtgtcttccgagaccccgggaacaggagatcacaatcgccaagtcagatccaccttacctatgagccgtggaacgcatttgacaaaggattttgttttttttaattcttcaagaattataataaaatgcattttcctttgtccattttatttttgtgtacctagtacactggcacgcccgcgcatttttattttattttatttccctgggcggagggatgaaaatttaatttttctctccaaacaatatgattatcctcatttcggtgtaaaacatgtttttagatgctattgttcctattagcatattcatgtttatcactatcctagaatcactcttgtttagggcccctttgatttggaggaaaaacataagaattttggaggatttcaatcctataggaaaaattcatacagatggctttgaatcaatggattgaatcatatccaatcctttgaaattcttatggaatggacaatactatagagattttggagaaaaattagcaagagctcaaagctcttggaaaaatttctgagtctatctctctcatccatttcctgtgttttttttataatccaatcaaacggttattcctgtgttttgcaatcctctattttacacttcaaatcatgtgtttttcctattctttgttattttcattcctgtgattcaaatgggcccttattgtgttatattaatttctagattaaaatatgctgaattacgactatatttctatcaatccaaaaatttaatagatcttttttagtagttgatattgcccttttgatggtgggatattatttcccaatcccaattaccaaataaagtctcgatggttcaaaatataaggttgtacctctctgtgtatgtcattaccgtaatttttttttaatctttctgctgtataaccaggaaaaaagaatcattcggacacctcaaaattttgagccaaccaccgcagaacatgttaattttttttgtcaactgtacaaacaccaaggtatttaaggatttacaccgacaaaaaaagaccgtaaatgtaccgtgtgaactccaccctctcctgtgactctaaaataactgacacggcctcccgctagcttagctctccgccgttctccacgacgcgcccaccaccgtcggcgagccgacgttgtcctgggcgtgcgcggcggcgtcggcggcggcggcgctcatgcgcgcctcgtaggcgtgtccgaggttcctgaggcggttgagctccggcaggatgacggtggcgaggtccgggcggtccctccggcgcatttcggtgcacttgagggcgagcttggcgaagccgatggcgtcgtcgacgggccagtccttgacggtgacgtcgagcatctgggcgaaggtgccggcgtcgatggccttctcgacgtggtgggtgaggcccatgggcggccgcgcggtgagcacctgcagcagcagcacgccgagggagtagatgtcggacttgacgcccagcttccccgtctgctggtactccgggtcgatgtagcagaaggtccccgccgtcgccgtcagccggtactgcgtcacgctgtccgccaccgccggcggcacgaggcgcgccagcccgacgtcgctgatcttgctgacgtagttcggttcgaacaagaattgtggccgggctcaggtcgcggtgcaccagcggctccggcttggtttctggtggaaggaaccaagcaagcccgggttgggcaattctcccgcccaagatatccttgaacccgctgggtctcacacggggaatcgggcgggcgctgccccccgcggcggaacaggcggtcctcgaggctgccgttgtccatgtactcgtagacgaggcaaccgtagtccgggcaggcgccgaggagaggcaccatgtttgggtggcggatgcagttgagcacctccacctcctggtggaactgcttccggccctgctgcgcgtcggggcggagcaccttgatggccaccggggtgtggtcgagggaggcgcggtagacggggccgtagccgccctcgccgatcttgagctcgtcggagaagcgctcggtggcgagctcgatgtcgtcgatgttgtagcggcggtagcggaagtcgtggctggagatggcgtacagggcgcggaccttctcgtcggcctcgcggcgggcgcgcacctcggcgttgcgacgccgctgggcctccaggtcggccagtcgctgcgccgcctcggccgcctccatggccgcgcggcacttggtcttctccatctccgccatcgccagcgccgcctcctccgcgtgccgcgcctcctccagccgccgcgcctcctccagcttcagcagctgcagctccttggtccgctgcttcgcgttgatcgcctcccggcacgccgcgttgtacatgtccatcgtctgcttcagctccagcctcagccgccgcatctccacctccacctcgcgctgcggctgcacacacacccacgtcagcaatggcgtcgcagcaatggcgtcgcagtcgaagtggtccaagaacgcacggcggagagaggcgagctgctctcccgtgggctggcggagagcgacgacatgtcgaggctgtcgcagaagtccatggaggagaagcgcgagctctggccgaagtcgaggtcgcccacgaaggactcgttcgacacggaccgcctcgtggagcggtacgacccgtcgacgccgccgccgccgcagtcgggcgccgccctgctggacagcacgacgggcttggacgacgaggacgggagcgagcgctcgcggaacggcgaccgcgtggtgagctccggcagggtgcgactgtccaccgaccgcctcgacgagtccggcgacggcgtcgccggcggcagcttccccctcgagcacctcctcgtgtacaggctcctgatcgatgagtcgccctcgtagccaccgccaccgccgcaaccgccattgacgccgcacttggcgagcctcacgttcaccgacttgcccttcgccaccacgtagatgttgcagtagtccggcgcgcccttcatcaggctggacggcacgtcggcgttcttgaatttcctgaccatcaaacaatgcagcaccaccatcaccaccaagaacaacaccttaaaattggatcgaaatcggatcaaaatcaaaacgaaactaattattgatctttgattgatttacttggtgaatgcatttctgttggatgcgccgagcgcgatgctctggatcttgttcacggtgatgaactctattaaggcctttgacacgtctgcctcttccagtaccaactccgatacatgcacctgatcgatcaacaatggaaaacaaaatgcgttctcgtaattaagtatttttttttgttcatgtctttgatctgaaagaattaatttcttgtgttgatctgaaactaaatatttgattaccccattcctggtgcagaatcctctgaaggggacaaagatctccctcatctcggcctccaacgcgccatgcgtcgcctcggccatggcgaatccatctacgtcaccaaaaaaaaaaacaaaaaatgcacatcagttttacgatctcttgcagttgcagcagagagacgcatggcaatggctgatccggcgatcgacgtacggttggcggcaggggggtggacggcgatgtggaggaggatgatgttggaggcgccggtgaggaggtggtcgacgacccacttcacggcgagctggctgttccggtcacggtccacggcgacgacgatcgtcatcgccggctggtggtgcattatccccggcggcgaggtggcccggtgctcgtcggggctgagtggccctcctccttgcatcctgcccgcctgcacttttccggtgagatctcacccgccttcgtcgtcgccgccgccgacgccgaccgtaatgtgatggatggatggaggtgatatcgccggccggatcagtggatgatgcgacggtgagtaggacggtggtgcaaggaaggagaagaagagagagggagagagaggctgagagagagagagagaaagggttttccttttccctcccctcctgctcttccttctcctctgtctctcttccttgcctccaaccttcctctcaaactctgcaatggcctcctcctccctcccccctttttttgggacctaaatgccatggcaatggagcaaggatagcctcagactattcttgcaccatctcttttttttctctcctcttttccattttgttccttttctaaaatgtttgtggaacattttggccgagctatctaaaatagggtgtgtaatccggcatgtcgaaaaccggatagaggtaaaaatggaaaggggagagagatgataagacctaagaatggctataatgcaactcactacaagatccataatccatgggttttattcctcctacttgttgttccagcacacgcatcacgtattcacgtgttcccattctgcataatctattccatttgccaaattcatgcataaaattcttgcagtgttttgttgttctagcatgataagtaaccccccaacccccatatcctctggctctcactatgttatgtacaaactacaaaactgtacatttcctaatattcttgtagactgctgaaatggttttacaaggtcaggtaggtcttgatcatcgttgagccggtcggatcagagaggagatgtctgacaaggttcattcgcatttggttcggcgcaattgtgaacatgtagaatgcaaagagtatgagatccactgaagaaagcgtcgaaccaaggaatcctcgccacatcctgatagtaacaaagaacagtgatgaacactttgttgggtggcaatcttcaggtcatacataatggtatttgtaaatagactgaaaacagaggcaaatgcaatcaagagtagaattaccatttgggcaaccggaaaaaggtttcaaagaatgtctgaatgccttcgttattcagttggattatcaaagccagcccaaaaaggaagaatgatcgttgacgtttccgttcttggggccataatgttctccatgctgcaacaccgcatagcaattagtaccagaaaatgttcctgacatttccaaaattatactaaaatactgccctcatctgaagcaatgtactccaatttgtaatactggtgtgcttgtcaataaaattgaataaatatcagaagaatgcttaccaagcattgatggactggaactttgagaggttccaggcaaatattctccagggtagacacggtttctcaagatatcagatatcacagatgcatatcttggagcttcagacaatgatctaaccaccgagtatcctatgtttttgacagataaatattatattattgcctgtaaatacaagagaaattgaaagtacggattgaggatttgttagtaccggttgcaggatgcaccatacttgctgccgcaccaaatgcgagatttttctggtctgtatttggtaaggaccctccaacaggaatgtaggaccattcctgaaatcaagagttcagcatttaggttaagtttccacttcacctatgcaagagaaacaactagtgacaccaagccataacttgttacctcctcgtatacttttcgaatatgaactcccattgcatccaaccgagacatcaaccgctttttaaggaggtcaaagggcattgcttctttagaagctaggcatgtttcctgtcttgaaataattatcatcagcaacacaaaagcatgggaaaatactagtcggaggaataaattgtgataaagtttctcatatggacctcaaagaaaattcgtgtggatgacatgggcatggcatagaggaacgttggatttccttgctcaggatgtgagaatttgtctttgaagcaatctctgtagtccatgaaaaccattaagctgggatcatatggattgttttccacctgaaaattt

SEQ ID NO: 5044 - DNA, 13848 bp, Oryza sativa
aacgaagcgcgcgccacacgtgtgcggtgcgccatggcccccatgatgtgtccctttttccctgttacgtgtctccgccacatactccgttgtaacaaatcacccatatattttgaaaatcctataaggaattcgttttatttttttttcacaaaaaatgtttcacccagtgtacacacaactatgtatagatctaatattgcagtgaactcaaacatttttttgcaacaaatcactcacatattttggaaatcctctattaagggaattcgtttcattttttgttccaccaaaaatgttttacctagtgtactcagaatgtttcactatgtatagatctaatgttgcagtgaactgaaacattatttccctatttgctgaaacatttctttttatataaggtgaaacaacgtcaaatttaaacgattgaaacattttcgatctacttagcgaaacaattccaatatacttggtggaacatcatgcaacatttaaaaataattcaataataagcttaaaaaaaatttcgtcggaatatatccatgcgtagtcttgttttgaagatttaattgcaacaaatttaatgatgtaatcggatcatgatttagataagtaatttaagagaaaaattagtttaaattggttttgcacgcatgcatgatgtcagtgtccgatttttacatgtttagatcggacgcccgattctaagtctcctccgtaaagttgagttggtatatgataagattgcgccattgcgacatgccgggcggttcaggtccaatcgttataactactatttatttgctgagggtcacccttgtcatcaatgttacattataaatggggtataaataacaaaattcggggacatagaatagaacggaccccatgaatagctgacgacccacttttaggtccaaaacacatcaaatttatcggaggtcgatttatctttatctatatcagtcagtattaattacacaatctaatagagcttttcttttttttttcttttctgcgttaaatagaaaaaaaatagccatatattagatgatcgtattattatggtcatatattatattgagaattcgttttagacaaaaacatgactttgattaaaaagattaccgtggactccttaacttttatttagatgaaacatcacttaaaaaagaattaatggtccatatcaagtatgacccagtataaatgagacaataaagaaatactccctccatctacttttgatagtcatatttcatcttggcacacagacaaaaataagtaattctacttatcatccatttaaatatgctactagtcattcctcgtaaacaagcgatttattaatatttacatttctcaatgcccatgtagccaatcatgtgtggaagaatgaagagtcatgcattaaatccaagaaagtcattaagatgataagttgttcgaattgaaatatgtctatcaaaaataaaattttcagatttggaaatatgactatcaaaagtagatggagggagtactctataaatgagactataatgttcaaaccgagcaaaacttgatatttattaattccaaattttagaattattaaatcagaaatcatactaaattcggactccaacacatattctagcagaaacttattcataaaatattaaatttaaaaattgcaatggaggatatatttattaagatggattctagtagtacatattattctgtattttgtttaataaaatggaatctatatcagtattaaaacattatcgatggccctaaccatgattctcccatcttctacttatttgaattttgagaaaacggacgatatgttgctccattcgcgtggttcaatgaaaagccattcaataggatacaccaaataaaataccactcaatatattgtcttatgattagaatgtcacggagggttttaagaccaaaacgaccctagctggttgagcggagtgagagggagagggtagcgggcgcgacaggaggggttgtctgcaacgacagcgaagttgatgaggtggagggagaggaggaggaggcgatgatacgggggtgggggttggaccgcccttggctccacgaaggaacggcgagggcgcgtcttccagcgtggcccgcccgcacgctcatcgtatgttgcacaccgcctccaacaccgcctatgctagaggactcgctaggaggcgacagtggggacgacggggtggagccatggagggaggagggggaggcgacgacgtgcgagggtattgccctcatcagctccctgaaggagcggtgaggacacagcctctagcgccgcccacctgcacgctgtttgttgccgctcaccactcccctctccccttctctccgtacacaaccagttaagggcgctttggttttaaaatcatgttctcctgaattttggcctacaaaaagaaaagtgaagactaaagataattaagataggactaggggtgcacagtcactgctccaataagtttacgcaactataccttggtacgcgtactgtgatgtgtgttattttttttttgagaggtaaaagcaggagctctgcctatttcataaaaggagaagagagggaaaccgagtttgtaccagcaaagttacaaaaggatcccaaggggaccccttccgaggtgttgacagacacctgtgatgtgtgttaaaccctgtgatgtgtgttaagtgtcatcaaacatatcacctccaagcagttgagaacagcactctgcaggtttcatgtctctttcttgatataaaacaagcaaataagagatgatggaacgtcgaaaaagatactctcgaaatggataacgtgacaagcgatcaatctccgttgtttaaaaaagaagaaaaagaaatgaaagaaaacgcaacaagctattccaattaatgcatgccattggatctatgacctagtagcaaacatgagagagatggatggttggcggctcgatcagcttgcatgaaagcaaccggaggaaaaagaaatattatcccatggctcgttgttttgtcctctcaacccagacacccagttcttgatttctagcaattaaacccggtgtaaaatagattttgtgcaaattattagaacggattgtttatttgattaaaacgctaaattaatatttgataaataaacttcaggaatagcttagatatcgatcacatgaaagcttattattcgatggtgcaaacttattgtttgaaatttccaaatcctcaactcacagattcaaagtttcacattgaaagtgtgaatattaaaattacaaaagttcactaattaattaatttaagagtaaatttcatgtaaccctagatattatggtctaaattgcataaaattactgggttttgacttttatctaccacaatttcaagttctcaaatttataagtttttatccatcatatgaatgtcgcatctatgtaagcaaagcttttttgaattttgatacaggattatataaaaatgattaatggtgtgatttataaattttaggaccataatacttaaggttatgtgtcacatgccaaagttcttgtagttttgtgtaacatataggtgggtcttatcaaatttaagaaacaaactttcactccttagcacttatgtaatttttagattttaaaatgaaacaagtcccttatttttacgtcgaatttgaatcgtatccctaaagcgcaatactaaaattgaatcaccatcttataaagccggattaaataaggtcctaaaacactatggatatctgttttagctgacatggcatcctactcagaacaaagaaaataaaagtatggggcccacatggaattgggttgcgtctcccctctccttatctctctcctctcccttcttgagctcatgctcgttggcccatgtcaccggtcagcctcatcgccgctcccaaaaaagacccgtattcagacccgatatccgtgaaaaatcttgggtacctgaattctttacccaaatttatcccaaaataatgtgttcgggtgggcgggcgggaaatatccgccccgttttcaccctagtcacagtcttctcgccccatgagccatacatagccttcccacctacctcatcatcgtcgagctcctgatttgcgtcgaggtgcacaggaagagccacacaacagcagtggccgaatgtcgaggggggctctcagggacctcaagccaccaggccgcaccgagcctttgccttctgcccctcgcggtctcgccgcccagccgatagaaaggatgggggagagagaaggggatgaggaagaatatgttgtttcacatgcggatcccacgtgggtttattattattattattgcttctatcgccatatcaacaccacaacaaccaaaaatgccccctcaatactgctgtaggacccatttgacctggttttgctagattagggacgcgttgtatctgataatgtgcttcaacgacgtttttcaaactcaccctcgacagaagggacctgaagtgaacttatttcttttaaatccaatatccagcccaagcagggccagcacggcccatctccccatcggcgtggaaagtcgtgcatctgatcgtgatgaacggctacgattagaacaacgcggcgggggagaagatttcaggctcagaagcagccgccgccgccgccgccgtctcagccgccgcgccgcccccccgtcgaccgcgatcttccagtccgcaccccgccgcgatggccgacgccggcaagcccgaccccgcgtcgccgccggaggcgccgtcggcgaagaagggggtcttcatgcgccgcatcttcccgttcctcctcgccgccaacatcttcatcggaggtgagagaccccctgtgcctggatcgatctccctccctcccatgtggtagacatgcctcttagggatgatgcggttctttcgttgtgtggatccgagcgagaaggatcgcaaaagcctagtggatggatgatgttaggcatggttaggacttaggacttaggagcggttgtgcgactgtagggttagctgtagtctcaagctaaatgcgcttagtaattgttcatctaggtcacctcagtttggtttcagtgttatgttgtagatatgatgtgcatttttactaacacatggagtggattttggaccatcagatagagattattattagagcatttgtgatactagtgttataggattgtgtaagtaggatgaactgacatagctcggttattcctgggcctcgaatttactatcagaagcaacaagcggaagtgtttatgttctcctatagtgtttggttttgtattatgcaataatgtttgtgggactaggtggttagctccttgtattctggaatgatggatggtttgtggctgggaacatcaaatttcgcttataggggaccgacaaagctacttcctccgtttcatattataagactttctggcattgctcacattcatataggagtatatgttaacgaatctagatatatatgtgtgcctagattcattaacatctatatgaatgtggacaatgctagaaagtcttataacctgaaacggaggtagtagaatttattgctgcaggagggataaaagaagcaagttgtggacaccaagtggtaccaaatataaatacctctattttacatggtaaactgatgttttgtattggagtatatttcgcactggcaggactagggtcaaaatacactgaagcctggtttgggatccacgatctgtgagctatccatggggatgggctggggattgtgggttgcaatccaaattttagctacatttcttgccgtggagtttggattgtctagataaaaaaataagcgagtgggccagtgtctgctactctgctctactatttagtagggagttaatgggtgatattgagtgaattcaatttgtcaatgagaaatttgagggctttgctgttacaaagataaattcaatatatattttacgtattttccattttagtcaagtataattacaatgaatcatactgggcaatagtagcattccttatagagtttagaatgtatagtacggtatactcatgaatcttttctattaaaggatgggctatgcctcaaactagcttgattttcttgtattctgggttctactgaatggagtaaatatacagctcgcttgacgctgtgtgcttgtgtatcgaaagttacatttatctgctggatttcttctttgcaagaaggaaagggaaatactgtggtggtcatccatgagtgtaaaatggccacagaacacaaaaccattggcactaaccgtttatttgccctttgtcccacttgcaatatgtctttgcaactactcctggcctttgcatattgaaaatattgaaagcttaggtaggtttgcctctgaattctgatagtacatattgatggtactgttcatttcttgcgtgttgactaatatttggtttactgaaagctattttcatacagtaagtttgttccttttacatgcagtttacgtatttgcaaagacctacaagagagaccaggaaaagaagaacgctcagactgctgctgctgcagctgcagttgtagcattgtcatccccagctgccccagctgctgagactgtagatcctactcctccaactcctccacccaaaagagtgcttccaccaatacccgaagacgaacagcgccaggtctacaagtggatgctggaagagaagcggaagatcaagccacgcaatgctgctgagaagaacaagatcaacgaagagaaggcgcttctcaaggagttcatcagggcagagtctcttccccgtttgtgattagcatttcactggctgccctgctggccttgtttttttttttcttttgcctgctgttccatggaaggacatgttctggattttacacttgtctcttgtttgttggcagaaacggtagcattttgtatggtgtcaagtaatcatttgttacccaaaatactgagtcaagtggctccagtttcagggaactctggcattttaacatcattggcggcttggcgctactggagattttcttttaactaattcttgcctcgaagttctttgtctattttggttttttttaaggaggctgctataccacgggattctgtccaaacggtatgatactaagcaagtatcaaattctgataccaatcggtaacaaatttggtaccccataggtgctagacagtgttgcactaataactagacgaccatcaaatttttatcttttttttaagcatatataggcttcatctaggcgtcgcatggcaggtatctgcacggggcgagcttcatatagagggagatcatgctaaggccctctttgttcaggcttagacttatttgcttagacttttaagtcagcttattggcttacatgatttataagccagtgaatttaatgtcttaagttaagtggtggagtcatacatctatctcatataagccaaaaaagcttctccaacctaactattaagtggcttatggcttcaaaaaagccaaacgaaaaagctgcttatttgtttagacttagactttttggcttataagttggcttataagcctaaacaaagagggcctaaggtcggtgatagctacttctcagacaggttatcaggttacaacgcgcaacggatgtagcttgtttcgttgaaaagatttattgcgacgctttattgcttattcaaatatggtacagtttcagaatttcagttccaaaccaataaatcagaaacaatactgaaatactgaatgcacacatcacaatggccaacatccaggattcttcagatggggataatatggcaacttcaacaagcttataaatggtctataagtgtacagaaacaacccatcacaactcaattcatcttatgccgacgagttatccccatcctgcagacaaaaatagcaactcccagggtcagtcatatgaaaacactgttgaaacagactgtaagagacagtgcctacaaagaacaacaggtgaataaattgctttctctgcattatacctcactggatgtaatgaaatccaccacggcatcagaaagctctttacggtgagcagtgtagcagtgatttgctccctcgatgacatgtagcttgtggttcggtatatgcttcgcgaattcgtatgcatcttccacaggaatgatctcatcggctgaaccgtgaactgtgaaaaacctgaacaaagacaaataaagttgcctcaaaatctggtacaactggaaacctctgtccaaaacataagagatatgcattcaatatttcagctgtgggaatgcaagagaatagcatgttcagctatgttaagcacttatactgctgtttatttgaatataggggtaaaagcggttgagttagcttcctgacctgcattctttgctgatggaaaggcatgctttatgcatatcagtggtcaatcgttccatcaaactctcttttgttaccttatataaaacctttcctacattggaaatgacggacagtcaactaatgcgcgtgaaagagaagtaagcatacacagtgtatatgatttatctataaagtatctttgcaggtaaaggtcgcaataactgataggaacttccttacctgagttggttttgacatcaatgtaaccctctttgtcaattatattcataaactctttgcctagccgttcttcaatgcctttctccaaatgaaatcgaccagagagattaaccactgtgcgcacatcgtcatagatagaggcatacagaaccaccacatctcctcctggagataagaaatgttaaattcagtgactggatttttaagattaccaagtgtagaacttgcaacaaggcatggcaaaattcattgatcaagggatgcgatgtgagacagtgagagtaaattaaaaaaatccagaaaaagtgctatgctaaccatttagaaactttatagtattttctagcagtagattgttttgatgttacagtcaatgtgatagaaaaatattcagccatgaagttctccaccattttaactcgtgcatagattgtatatgaaacaagagtataatgccacgaacctttgctgtgaccaacaattgctttcacatcatatttctcctgattaagatgtgaaataacagaatgcaagtcatcagcctcctttctgtagttcccgtactggaattccccttcactttctctgaaaattgtatggtgacaggcttataaatcatgcattgatgccttcaggggaaaaaaagtgtagatatgaaagacaagtaacatcttaaaattcaaaggaacaacagataggaacctcagctcatttagctaattagctctaacttctaaccaaacctctagaaaagggaagtggctgccacggatgctgaagaggcagcccactggcgcacagcaggagcgccaatctgatggcctaccctttggtcttccacccacacaaccaaccgcgagatgtagccttcaattgctgttattctttttcttaccctttttcactagtttagctgatgtgaaaacaaagctctacttgaaatctcaatacaaagttacggaagtcttatgcatattcccgaaaagaactccagaaaaggataaaattgaatgccaccggtgaaattaattaacagaggatagaatagcatttacaacactagcttttgtgaacttaaatcagcatcgtacatattatctctagctccatgagcaacctacccatttccactgaaatcgaagcggaagattccaacccctttcttggtaagtgcattcgctagatcaacaatgatgctatcattctgaaaacaagagaccaagagtcaagcttcattacgttggtaaaaaaaaaagctaaaaattagaaaacttgttgcttctcagacaaaaatcgagaaaaaaaattagtgacccacatattttgaatagtacaaagggaatttcttctgtaacgacatatttatgcaccttggaagctgtaaagccatggcagatcactacaatcttgttggaacccatgtgctgcagcaacccaacgagtttctctccatgtttattcgttaccactaccctttcttcctgagcagctgtttagaaaccatataatagagttagagccccattgtttcgcttatgcttatgcatataagccaaattttaaaagttaaaacaacgagaggcccttaattattatatcggagtaacataatcttcttctccttttcttccccttcttttcgttggccaaaacatcattgaattatatacacacaaaaagaacgccctcttgtccgtcagctagcaatctaaacaatccacgttcaagtaaagaggatgaatccgggaggtaaaagaaaaaaagaaaaaaaatcaagggggactcacagggaaccgatgaaccctgggaagaggaggagagcggctccgccatggctgccgtatggcagcggcggcggcggtggcgtgctccggattggatcggaggattcccgggggtgccgcagcgaagagaggggggaagagggatcgccgaatctaatcggagagttggtttgggtagctaaagaactgtgttccactagtgactgacagggaggcaactgaaccctggagagggagagccaggttctacaattctgacaggcccttccgtttcggacactagcggaattcgaaatttcgtgaaatcaagtgaaaaaccggtaaattccgaacaaatttcataaaccaaaatttgaatacaaattccctaagtttaccgacaagttcttgaaaaccggttggttttggcaaaattccgatcgaaatcatcgaaatttcgatccgtaatttgtaatagaggtagtttgctgaaattttttttcttgatgtaagttttagtaaatacacgcaatacatcatttttttcgaaaatttatatcccaataggttctatgaatatcatagtatttataagattttattttatttttttcttttttatcaatttaaatttaaatttggatgaaactcctcgaaatctcagacggtttctactttcgagcctcgtcgaaatttcgtgaaatccgaccggatttcgtcggaattgtaaaccctggggagagccgttggcttgggctgttggaaggttccctggcccgttgaaccttggggcgtacggagcatagttttgtagtatagtactatatgagcttctacaaaaatggtagaaaattgatgtcaaacgtatctgaaagctaagtttgtctttgtgccgtgtgtgctactccctttgtattataagtcatttaacttctttttttagtgattttttttatgttcgactaaatttatagaaaaaaaatagtactctctccaggctgataatacttatcgttttagacaagggtaatgtcaaactttagaatttttaattataaatcttttttgaaatatttgtcttttaaatatggtgactacgtatatagattagtcttaaaaagtactttaataaaatcatatatttgttaacacttttatatatattataatgaaaaataatggttaaattgtttttttaaagacagtgcccttatccaaaatgacaagtattatcaactcggagggagtaacatttacaacataaaattagttttattaaatttaacattgaatatatgtttgtacgatatttaacattgaaaaacatggcaaaaagattcgaaaaaaaatataaaatggataacataaatataaaaaaattattagttttatattattagtttctgttgtttctttgaattttagatgttacttgtctttcagatctaccctttttcccctgaaggcatcaatgcatgatttataagcctttcactatataattttcagagaaagtgaaggggaattccagtacgggaactatagaaaggaggctgatgacttgcattctgttatttcacatcttaatcaggagaaatatgatgtgaaagcaattgttggtcacagcaaaggttcgtggcattatacccttgtttcaaatacaatctatgcaggagttaaaatggtggagaactttgtggctgaatatttttctatcacattgactgtaacatcaaaacaatctactgctagaaaatactataaagtttctaaatggttagcatagcacttttctggatttttttttaatttactctcactgtctcacatcgcatcccttgatcattgaattttgccatgccttgttgcaagttctacacttggtaatcttagaaatccagtcactgaatttaacattccttatctccaggaggagatgtggaggttattgcgacctttacctgcaaagatactttagagtgcaggtgggcccaattattgcagccgttggattcggtttggatgaccgagatgcacggtatgtcatcgtgtgacatacataccctatgtcactgaagctgaatccgggagggtttcagtttgggggctagtgtatcacgttttgcagaaaaccccatatggttgtcttgtttacaacgctacccttagaaacggaattttctcttcttcgcgttgtattttactggacgccgaggggttatacataataaatacaatgggggtgtcaggctgccgagtacgtatgcgatattccgtgcaaacacgatgatctttttgcaaaacaatccgctagggtggaaaataacaataggcccatctcacccgcgcaagccgaggatctgaataataccacctcggggagttgtgcgggagcgggtgtgaggaggctacaaataggagcggtatgagatgggtaggaattaaaaagggtcggttggctatgtgtgccacatccatcaatccatgggtgttgtatggctatcaagacatatggccggcataatttgtggaaatagatagggttggctcgctaaggccgaccctccattccctaattgcaaattgtttcagtattccaaccataatgtgaccattcataatcataaacttcttcatattttaaaataatcatatataaatggatagccacataaaatcaaaatgaggtcaatattccctatagcaaaggaatgtgaaacacattttatagaaaatatatttttatttgttttatggaatattataatatattttcttccatcgaaagcaaagcacatgcattcaactagctatatatatatatataataccttggattttacgttatgggtgccccaaaagcggtgttgtgaaatttacactacattttcttctttttaagtagaaaattaggtagggttttttatagatttttttattttcaattcatcgttaaacgatgagcaacttgtgataatgctaacacctagtcattacaccagaagatacacatatgtatccatatgtggaatttttttatttttacattttttattaaaatattttaaaaataatttttagttttgaaaatttacaaatctagacgcctcacgccctctgggagggcgttaagggacctaaatagccttggcagttcgtcgtgagctcgtggctctctccagttgatcgagttgctgttgtataaaattgacgcgtatcagaaaattactctgccaactggaccaatcaactgccagcggttccgccagcttgagaaggattgatcagccgcgcgcgcgcgttgacgttgtgagttttaggcccataaggcccatgcataacctggcggtggcgcgtatacgtgaggcggacggcgcccacgtcctgtattttttttccggaaaagctaacatatgtgtttttt

SEQ ID NO: 5045 - DNA, 20079 bp, Oryza sativa
ctgacattttgatcacaggaccctttacatgtgtaaacaattattgttgcccaatcaagtgagtctggttcattttcaacatggaagtaatggagcagttgtggcattatctgcatacaaaaggaaatagcgatgaaaccatggaaggatgtaaccaacaacacaaactgtatgagagtatgccaatcagtgaaatctatttaaaacagtccattcggctacaaggttgcctttcctaagacttaatatggtcagtaattagctgaaacacgaccacgctagaatgtccacatggtatagaaacgatgttgtaacttgctgatataattgcattatggtagtgttcacaattatgtgattaattcatttactagtggcatgtacgatgtgcttaaatcacagtatatgttaagagctccttagcgttatcttatgtaaattgatttcaaacatacatgcatacagctaaatacctgataacatttgtaattgaaacacgcatcagtaaataacagaaatttgccagtttgcaatggagaggcctctgcaaatcagcaacttaacaataccaatgagaatatgcgataaatggtgggacaatgatatcataggtttgcaaattcaatattctcttggtggctaaaagtaaactgtaatcttaactctatgaattacatagaagataacactgttctaaccaaaagttgtgaataccatttactctggttactatagagaccagaccacacaagactaggttcgcaaggtttgctgtgacccatcaaatatgacctaaccctgcagctggatacaggttgggtggctaggagcaacaagctaacagaagtatttcagagtatgcagttttcatgacaggatggatgcaaatgctcttcctaaaatgtaggtccataaaaacatgcatctacaagtcttttctgtttttttagagagagaagtcttttatattttttcctgttggtcaactagtaaaatcaatagcctaagatatgaaacctgtccaacctgaaattcatagcaaagtggaccattacagtatatacaagatggcttagctgcattggttagagacccagaatatactacccaaagtggttttgcagttgattccctgcagtatctgcataacgaagtaatcaaaattatgcttaagataagttgtctgcgaagtacagacatgcaagagaggtggggaactgaatatgattatttcaagtttaccatatgctactgatggcacatttcactgcataaagacacaaactacaactggagttacaaatgtgctgaagtgcaaacatgctaggttccaggcttccagctaattggttattaaacacagaagtttcccacagtacaataaaacatcgctagttgattttgttttccaagttgatataccttcccgtcaactgacctcccaaaccacattaaacggtcccagtggaactgacaacttaagcctttaaaatttcaagaaacataatgctgaactcagaaacccatatagtattgaagcccatgcaaccacaaaattaaacaaagcatctattcaactttaaaaggtaaatgaagttccaataagagttgtggcaaggcactaccgcactaggactttgctgtagtttcttaattcagaattgaaaacactgacaaagtaaagacactattccaaaaagtgataacaattaacaacccaaagtaaggcatccaaaatcacctcaaaacttgatcctgttctcttgagatgcgttctagaaaagatgcccagcatctattgtcatcatcaacctgcaacacaaaaaaaaaaagtaataaataacactctagaagtgcattagcaaacatatggcaaagcataacaggaaaacaaaaacctcaaactgatccatcaatgatgccgtcatgtcatcctcttcactttggccttgttccatcaacaattctgatctattctcacaactagcaaaacaagaaaccttttcggtttcatcaaccaccatgtattcaggccatatattgccagcaaatactgcaaatagttagaacaacaaattagatggagaaatgtttattttatgaaacatggaggaacaattaagagataaatgggcaattaccttttcctgcatctggcataatagcagaagcattatgtgagccagatatttgatggcactcattcttgtgctttgcacgccaatgcaattcctgaggaaggatattaccgagtgattaatccaaaacagtgatatctgaaaactctagcagcgcaaacaaactgattaaactgaaaatacaatataattgcctggttagttgatacctgatgcttctttgaacagtaactggatttcctacaacgactacaaactttttcccctttccatgtgccacaccaacaacaaaaccaagtttgggatcctaatagaaacatttgaagacaaaaagcataagtttgtgttcatgatttatacacagcatgcataatggattatttaagcaatatatcatatcaaagcaaagtgtttcctggacgtaaagctgtccataaaattatcaaaagcatagtgttttcaagaggaaatgtgagaataaaaagtgcattttctacacaactttaaaagattgtttcaacaagcttgtgaaagtttcacaaaatagacggtgataattcctggaattcagcttatgattaacgcacaaaattcatctgaccttcctttatcgaacaaccatttatgcaataacaaatactacctccatacatatatgtatgacgttggctagtataaatttgaactagtttcctctaaaaatttgaactagccaacgtcatataaaaaaaactggagggagtaatatagaacagtgacaaggggtattcttgtgagcatgtcccaaaattgccatacagaggacaccacactgcaagcaccaaacaagcagaaagtatatcaaacaagactaccttctgcacattgtgatccgatggatccaatacaaccctcaggctctttcaatgaataatatgaattaatttggggaagttggcaccggaaaactctaacactgcaacagctcaccagaagaggttaacagaatatacccaaaaagaattgggtgagaacactgtgtagaagaacaacaaaaatattatgccagcttcaccttcttctaggattacctgccctatccttcccctgctcatgctgatctagtagtaagcatgccatggatgggcacatgaacacaaataatgtgcggtgataggctgtctccttgcactgaattggtgcataaacctgcatataaatgattgttaacaaattgatggcttatatgcataaacctgcatataaacctgcagtttgtcatataaatgaaagacaacctggagaacaaaacgtagtggttcgccacagaagtcacagcacctggacttgccagatggcaaataacaggatcaagccaggcctgaagaaagcaatagatttttcacttaagaaagttcaaaatggcgttctaagaacacatataacgcagactgtaccgttgtacgtaccggaacaccgccagctttattggggaagtgttgagggagaagaagatgccagtcctctggtccctctggctcctctatgaaccctaaggttacttgaggatccatgtcctcatcatcctcgtcatctacgtagtcattcttgaatacagcgacaaggtttgtttccttattggggttgatctgaaggctctgaagcttgtcagtgtcaggttccatatttcacagcaattgcctgcaaggaaatggatgcaggaggggatgagtgtcaccaatccagctgaatagaaaaggcaaaacatttcgctccaacaggtgcaaaagggtgcgaacacagagcatgagggtttagttcagcaaccaaaaaaaagaagggaaattaggatatgagcatttcatgttggagtgaggtataattcttcctaactatctttactatttcctccttttcacaatgtaagtcattctatctatctagattcattaacatcaatatgaatgtgggaaatgctaaaatgacttacattgtgaaacggagggagtaattattaaagtgaagtcggaagttcagatttcagcattttacatacagcatgcatccgtatcaatcaatcaaacaatatatctaatgctggccgtgatgggcagtattgattagaccacgtgtcacactgtcacctctcacttttccgcgttcaactttgaccgtccatcttatttaaacattttttgaaaaaattttaaaaatataagtcacaagtaaaaacatccttcggaaatagattagataatatttggtagatgacaaatattaaaaagaaataatatttcattgaaaaaagggaagcttatatgattttggactgatgagatggcgctgacatcagcgatgacatcatcgccggcgacgacttcgaagggcggtgctccggtgagaggcgacagcatcgggagagagagagagagagaggaggcgacggcgaactcaccaatggcggcggagacgagaaacggcgacgggaaacggccggcgcgaggtactgtccacggtggaacgactttccggcgacgagcggcgacaacggaggggtggccgggcttcgtcttgatgctgcaatgccgaaggaggaaacagtgacgaccagtgaagacgacaacggcggcgcgacggcgcacagcggctggagatcaaaacacattggcaacccactggttcacggcgaggacggcttccggcgatcttcggcgaatgaaacgtggaggccggtcttcctctctttgctgcggtcctgttggtggcgacagcgctgacagaagatggcggagccgacggctacagctggctggagcggcggccggaggtggagagagaaggcggctacggggagaggcggctagggcatgggagctcgagctacgggttggaaacgagagaggagggcttgggaagagggagagatcggctcgggaacggatggattcggtgaaggaaaattaggccgaaatccgcgggattgagcttagatttgatgggctttattgggaaacgtagaggagatcaagggaaatccgttcccggaggccggatttggtgggaaggtggcggcggcacagtgcacgggcacgggagctcgggtcctggctggaggttgaagatgaactagaggtggccaaacgggcggcacggcccggcccggcacgggcatggttccggcacggcccgtttcggcacggcccgttaggcacggctgatgaaacgggccgtgccgtgccgacccacgtgccgagccgccggcccaagcacggcccgtggatggccgggccgtgcccgtgccggcacggcacgcccgcggcccacgggccgttcgggccacgggccgtgcacagtgttttttttttttaaaaaaaaggaaaggaaatgtataaggaaaaaaaaattaaaaatggaaataaaatgtttaaaaaaaagtaatgatttactaatgttaaaaaatgaaaaaatggtatttaaaaaatggaaataaaagttttttaaaaaagtaatgatttggtaatgttaaaaaaaaagaaaaaatggtatttttttgttgtgttgaaaaatttaaaaatatagattgtgattcattattttgaaataatttaaaggtaaatccacacttgcgaaaatattgcaaaagaatttgttaaaaatagtaatgacctttattaatgtttatatcattacaggatacaatgatacatgctgcctcgttaaaaactttgtcatgtaaaaactcataggggaaaatgagaaaaccatgacaaagaaaagagtacagctcaaaggtcagaacttacttctaacaaaattctactggggttggtctggatccaggtagagttgctcgaagtgggcggccaattcttggttgtccgcagtgtattgggcatgttgtcgagcaagctcccagtctttaacgcttagtagcatttcgacgtggtcgctgcgcagagtcgtcctccggtcttcgatgattcggccgcatagactgaaggccgattcggaggacaccgtcgacacgggcaccgtcaacacatcccgtgctagttttgaaagcacaggatatgttatcttgtggtcattccaccacccgaggacgttgaaatcttgtgcttcgtggtggatggcgtcgctgtccaaataaccggacaactcttcggccacaacatgcgaagaggcgtctccacttgtagccgacgaactgccaccaccttggattgaacttgaagacgatccaccccaaatcctaccccactgtatcttcttcttacctgtagtggggataggagggggtctccgctggcgaacttcctgaaactttacttcatatcttccaaaaacctcatataatttacgtctaacctcagtataaaaagaactataatctacacctatagtatctccaacaagtgataaaatagcagacaatccccttaatttacacctaggatctaaaataaaagcaagagcatacaacataggtatatttttccaatatttcaaatatttttgtttcatgtgaaagacaggttcagttagaacgtcatcattttcgtattctttaaataaagtagcaatttcaagaaggttgtgcaaaattatattagcagttggataataaacatgtgacaaagttagagtacaatcataaaaagtttctagaaattggtaaaatttttgtacaattgcccaaacatgctcgttcagtactgaagacccgtcactgtttcttgggccaccacgtgactgaacaaaatcagaaagtaaactactataaggtaaaacaacttttaacattaaatacgttgcattccaccgatgctctgcatcggtggcaaacttacgagcttccacaccggccgcattgcaaaacctcttccatgcagcaatccgcgggttagaagcagttaaccacgcgattgcttgacgaacagcatcgatgtggtcacctaccctcttcatgccagtcttaacaatcaaattaattatatgacatgcacaacgctgatggagtagaaaagattgagcatacacacaaaataaaggttgcaatatttcaatagctctagaattagcagatgcattatctagggtgacagcaaatattttatcagcaagattaaattcattaattacttccctaattctttcagctatgttttctcctgtatgtgagacatctattaacctaagccctaaaactctcttttgtaattgccaatcatcatcaacaaaatgaacaactacgctaagataatcctctctagctctactactccatatatctgaagtaacacaaacagagaaagtacatgtactaaacagttccttaagtgcagttgcttccttgtgataaacattctctaaatctctagttgatgtttgcctactcacagctttaaacctagggttatgagattgctgaatgtaatgttcaaaagcaggggactccccaaagttcaggggtaaatcttgcctggcgattaaccggacaagagattcccgagcaaccatgggatcgtactcccaactgcgtaccgtaccgtctgggtttaccataagttgctgctgccggagttgtattccttgcttcttggcacacgactccgcatggcgcttgaggtgacctgtaccaccagaagaacgagcagataaaatttgcctacatattctacaacgggctttcgatacctcccttccgtcggggcatgtttcctttatctcgtcgaagctttgccacacaccggaggttctcgatctcttcgagccggtgtgtgtcgaaacacttccgctcgcggttccggaaaatccttccgaagctgtctccgcctgaaccggtacctcctcaacgacagccgtatgaaccggtacctcctccacagatggtggagttggagccgatccggaggtaccgtcaaaccccgacatgtagttggggtcgaaatcacccaaggtgaacgacggcgactggtatggaaagttcggatccattctgaaaatttaaaccgacataaacaaattttcgaatatttattgaattcacaaacacaatacaaataatacacaaatttgaatattacttacatctttccaaccgcgagctcttcaaacctctgcgatcaaactgttgaactacgaaactaattttgatttttgacaaaatttgagcaaattttgtcaaaataaaaaaaaatgcacacttgagaacaaagagagcacttaaaacacttgagagcacaagatgaggagtgtgggatgaggagaaatggctggggttcatgccctatttatagggcgaaatttgagattttttggaattttttcgaattttttatgaattttttagcctcccacgggttattttcaaatttgaacggtcaaatagccgttagtgccacgtgtcgccttcccgttggaccgccgcccgccctgtcacgcgccgccggcgctttcggcctgacgggccgcccgggccgtgccgtgccgcgggccgtgccgtgccggcctgctacaggagccatgccgtgccgtgccggcccgcgggctcggccagcggcccaagcacggcacggctacacgggccgtgccggcacggcccgttactgtagcaggccgtgccgggccgtgcctgctacaggaacggccgtgccgcgggccgcccgtttggcccggcccatttggccacctctaagatgaacaggcgcgggtgaagcaaactagacctttttttctgggccaaaaagggcccaagctgaggagaggatttttattacttttccaattaaccaatgaaatgaactacttccaatgctcacataatttcatgaaaaaaatcctgaaaatacttggacacttaaagtatttaacaaattaaaatcagatcatttaatgattaatttattatttaaatattattgaaatgttcttttattattaaaattagtaattgagctctgaaaaatctgaaaaaaattccacagagtataattaatcatggagagtttaataaaaattaaatccaaccatactttatatttagaaaattttatttcccacatttaacttcacttgtaaattaataaatatttaatataaattctaagaataatttattaaataatttataaatcctgaaacgaaaatcatgatgtgacaatggtttctgccagtgctcctagctcccgcaatacccccgtgcccctggccattgcacatcactcggtggctcggtgccattgacgacatcggcaagatggagacaaatcggtttaagagtagtaaaaaaaaatactccctccgtccaataatatagtaacctagtaccggacgagacacttcatagtacaacgaatctggacagtaagcctgtccagattcgttgtactatgaagtgtcatatccggtcctaagttgctatattatgggatggagggagtactcgctaacatataggtcccatggatgtttctttagctctttctatataacagccacatatatgctatgttagtacaggtggaccaaatcagcgtgccaagccatcgaaaactgcccttaaaaccacagagggagtcattttgtgttgttttaatagttagaggggtcgatataccctagttttagggtcgagggagatgaataagattgggccactagctgagggactcagattggactttctttcccctattttcacagttggttttgtgctgggcccaaaataaggagggcctctcagtcgcccacaacctcagaccaaaaggcttgtgcactcgtctctcatctcgtcctcctcgtgctcctccgccaaaaccccaatccaatcgggctccgactccgactccgaccaccgcgccggcatggaggcggtcatcgcggagtgccgccccaagcctctcttcaccaccgggcccttcctctccgccgtcggcggcggcggcggcggcgtcgaccgcatctccgggctccccgacgacctcctctttgtcatcctctccaagctccccgtcagggatgccgtggcgacgtccgccctctccccccgctggaagagcctctggtccagcgtcccgctccgcctcgacgacgccggcctcctccaccgccgcgacggcacgcgcctcggccgggaaggcgtcgccgccaccgtctccgacgtcctcgccgcccacccaggccccgtgcccgcggcctccgttgggtgctgcctctcctccgacgaccagggctaccagctgggaggctggctccgagccctcgccgccaagggcgttcggcaactgtgcctgatgggcgcgccatggtcgacgcgcgctgctctaccctccgctgtgttctcctgctcatccctgcggcgcctcttccttggttccgtgcaatgcaactgggacctcataccagaccatgcctgcttccctgagctacgagagatccagatatgcaacgccctaatgaagagccaggatctgtcccttgttttggctgtctgcccagcgcttgagacagtggagattcttgcgagccgtaacaaaatccccaccgtgcgaatgagtagccatactatccgcaatactttgctatggaagtcggtggccaaggaagtgaacgttttggacaccccttgcctcagcagggttgttttgtggcaggatcttctgctgccccactcaagatataattctaaggtcacaatcagccgtgccaccaaaatgcgcatttccggttacctggacaccggcatcaacactttggtgatcaacgaaaccacagttaaggtatttgtccctttgttggatatatatctctaatcatatcgaatctgtgaaactgtgttaacgcgttttaatcgttgaatttgaaggtaaacacaaatataagcttcaagacacttatccccagcgtgaaggttttgggtctctctgttcatttcggagtacgaaaggaggctttgatgtccatcagcttccttaggtgttttccagaggttgagacactacatataactgtgagatttctttccttctttcattcccgacatatatatacataaatgtgagattgcgagatagctgtctttcttctttcattcctgacatatgcatcattttacacactcactgcagccattctttcattcccgacatatgcatcattttacacactcactgcagccatatgttcctttgatagctggaggtgatcaatttttcttcttgtgcagagcaaaacggacaaggcttcagaagccgaacaattcagtttctggggaaaggttgatcctgttgagtgtgtgacctctcatctcaagaagttagtgttccatgggatgccatggtgtcctggaaaccttgagtttctcaaattcatcgtggaaggggcatacttgctagagaaggtgttgattgttcttcctaaaggaacttacactagcatgcatagcgttatcaccaaactcaagttagcacctttgacctctgcaagttgggctagtcacatctgtaaaatggaggttgtccaatccagtcaaggaactttgagctaccaaagggcatctgatcattccgtcgatgatcctttagattattccctgtaggctgttctatctgtttgttgtgattataacatattgtcgatatggttatcctttaggtccttcatgtctgtatgccattttcatgtgttttggcttgttatctagagaaaaatgtatggtttgttggatatgcttagtactatacttgatggggtgcaagtaatagaatgcagagcatccgatgtgtcagtagttcctctccattacttcttgtggcaagacagcaagatactctactctcgattttgttgcctctgcttctgtttcttgtggattaattcatcatgcgtcatattgggcggcatcggtctctcatgtctgagaattgtagtaagagcaggtacaatagcaggctataagccagctgcaaatatattttaaggagataaatgaggagagagaagagcagcgggctacagatttgtagccagctgtattacagactccaagacgcagtgtgtgtatgacaggtgtgaccaggtattaatagtgtagtatgtaactattgtatgaatgagacattagattggctatagatgaattggagctagtagttggctatactattaaacttgcgagcaacagatgtggaggaagtcccaacaaaatttagagacagcataaaacagctgtaattccattcgagccaatatatcttttttccttcttcttccagatgttaactggttactatagaatttgttcaattagatggaaaagacaatctgatttagcgaacaataatgttgtggtcgtaattaagcacatcagttttgggctaccagaactggtgtcacttggtaaggcctttcgaatataagttatttttctctttttttttaatcaactattaagttgttctggcaaaaatctttgtaaattctaaacaaggcttggttacccaacattttgatatgtgcttggtccatctccaatgcagcttgtacatgttcgtgtgcgctaacataattgttagaaacatatgtacggtgtgattgtggtgttatctaccaagatttaaatagacttaaatgttggtgtccataaatgttaaggttagtgattttcggttagtcccgtctttttccaatgtgtgttaagacggcgaacctttaaatacttatttaatagagttcaaatttcatcgcagtaatagtaatactatcgtttatcacaaattatccatactatcttttgatttgattataatttcaatttagatgggacctatacccccacacatttcaaggagacgataaagtacttttatcaaatgctcgtgatgaagattaaggacctgtttagattggtgtcattttaaatcattctatttttttaatgaataaacatgtggatgtagtttgttatcaaacattagttagtttgttatcaaacattagtaatacatagagaattttggcaataacacatttagccaattctaaaaaaaaacttactttaggctgtgtttagatccaaagtttggatccaaacttcagtcattttccatcacatcaacctgtcatacacacacaactttttagtcacatcatctccaattttaaccaaaatccaaactttgcgctgaactaaacacagccttagcattgctaaattttgaaaatattcattttggcattaatatgaaaatattcacatacttaatttcgttgtaaagatggatgagggttagagctagaggttgattagtaagtactagtaatactcgtagtagttttgcgctaaacccagtccctgcccatttcgccctccccggccgtccccgtcgatatcacccgagccctaactcccgactccttcctcgccgcgccgccatggcgccccctcggcccgcttcaccacagagcttgccgcccgtggctgccacccgatcccgcggtcgcccgtacgagggctggactctcaaggagctgattggggaggtgcgccgtctacgacgagccgcctcctcggcgccgccccggccggcgggcgtcctcgacctcgaccagggggacgcgcgcgcctcggacacggtcgccccctcgccgccctcaccgtgtgaatcccaggagcaaccccaccatcttggcaaggttttgagtactcatcctctcatccacgtccttttccaagctcaaaccccccaccctttttaatttgttcgttcgtgcccgcagaggctggaggatgtgcttatttccctacgggatgtcgccttccagttcatcaagatcggtcgacaagacgaggcaagcactacaaaattttaacgcgttgtctctctctctctctctctctctctctctctctttaaaaaaaatctatatatgccattccaaacgatagcattttgggggaagaaaagaacagtggacagctaatcatgtttacagtaggaacaaacgacgagacattacaggttttcagatagaaacaaagatcctgaagtgcgtaggattcgtatcgtgactaacaaggacataatactataatagccactaggcacagaaaatgcttcaacatggtatgcagtgtgcaccctcgctgacaccagtatgttgtttggtagatgctttgcaaaattgtatgcatctcttgtcaggaatgatgccattggcaggacaatgatctgtgaaaccaccagaataaagcacatatatcttggcttagcgacacatatatagccatgcccattgtatgcatcatgaacgacttacacatggactagcttgctggacggtagctctcagccagacaaccacactttacagatgcgcacatgcttttaacaaacaatttttcagagttcaagctagttcaaaccattaaacttggatgagtctaatatatcttttggagtttgatacatgacatattcttttttttattggtgtgactatacacacaacagacattgcgaatctaaaagcacacctatgggtattgatttgagtgcctagacacagaggtgcttgaaacgctgccctaagaatgttactgagaatggcaccaacactaacattagttaggccattaagattatcccatgaacaagaccttccttgctcattgtaaaacttcaggttatttgaatgcttatgcagttatgtggttatgtctgattgcaattcttttctaggtgcgtaaaatcgtgaatgtagcacacgatattgtggttaacttctgcaatgccattagagcgcccgaagcgttcaaattagtggctgctgctgaggtatctttttttaaaatggtcgctcttttttgagcatttgtttctatttatttgcttattttctttgtcctgtctgttataatctgttgacagaatgtgaaaccacatctgttgaagatagatcatgatgacaaccttctgtttctacaatttaaggctgcactggaggtacacgctgttgatgcaatatacaagtaaagaagtaaatgtcaccttttttccctgtagaatctaatctgtataatatgcagagggaacagcaggttcacaatgttaaccatgagattgctatatctcttgacaagtacaccaattgcccactgtccgggacggagattgcagagttaactcagccattgagaaggtacatcgtcagcaaaatatacttcagttattagctcctctatcacaaaatagtgctgttttagacagaaaaaagtccagaatccagatatcggattggttgctaaaaattccaatgtgcaatattgagcatataatttctggtgtgaaatatttgtaacacctaataaaaatattatattttcaatgcaatatttgatcggacaaaatttataaaattggaccatgaataaataacatttatttgtgattagatatttggagggagcactccctagcctaataactgcagcctacttcactgattattttttttctttgattcattatgacttgtggccacatattcgagcggcagcacatcatgaactacatgggttcctctctcaaggggtgcccggtcattggttagtataagtgttcatttgtgaggataatttttcaaatgtgccatcacaagtatacaactggatttgcacaatgttacttgaaatgccattgacttcatcagggaatactattctgaaatggttaataggaaccttgcatgtaaaaacttctccatccatttgttagcacttagcataagtctacattattaggaagtatgatttcacaatgtaagtcaacaaaagaattcaagaacatcatcgatttatcattgcaatatttctatattctatctctgatttaataatgtaaaagaggtttgatatttctattatactataatgggggtatatggcccaatgctattagctttgtattggacttttaggtctttcaatgttggggggatgggagctactgtaatatttatcgtgaacaaggagggagggggtagtataatgccgccattatttatatgaaaaaaaagaagaagagagaacttggtatgtataccattccattgctttgctttatttggtatacaacaaaaacaacagctatgtgatggtgggaagtgtctagcactgtagtgggtctttttatctggtttgttcaacaatgtgctgcatggttgtggcaagtccaacaagtggcatgttgtgtgggtgagatccatgggtgatggtgtgagagtggtggcaaggttgttgcaagctatgtgctacctgattccatggtggtgacctggtggggcatatgaccgacatgtcccttatggataaggtaaacagcggtagtctgactagtatgactggcagttcctgtggttaatggctgagtatccatagggtataagacgtgtgtaattcttttcaagaagtgactagcaaagccattttggttaattttgtgagtgcaaccagtggtgctgagagggagggataaataacgctgatagtccttgacatatttttttattaaaaaaatattctagtaaggccattttgagaaatcttgtgcaaatcagttgcatagttgcatttagccgatttctgatgttattttgtagttaagaaatttaaatgatggcatttgaaaatctctctttttttaaaaaataatgttttgtgttgaggttgtatgaggttctaagtcttctttaggttgtcctggtgctgtgtcaaacgacctggtatttgaggatgcagagcttaggcacgacataaagtactgccactgacagagagtaagccaaatggtttcaatccagttacaccaggtgaatagctcggtaactggatcttatatgaaaagagactattgttttctttgtatgcaggaatgtgcaagaggtttggtttggttacaggtcgaacaggcttcaattctgcaacgcgaggcaaacgtctgctgtgttttgtttctctgggcacctgtcatttacctttggcttaaacaaggcattcagcggttgatcgctgtgccatgcccttgtacatagaaacaaatattattctgtacatggaatggaagagttccaacacctgcaaatgaatgagcactgtcagcgttgggcaagtggttccgatttcggctggtgtggattttaatccgggattgaagatgcgtgcatcggcagatatcatatgccggtcatgctgttgttgccgtaacaattttttgtttctaattgttgctacttgctactccctcggttccataaggttccataataagttcatttttttatctccccgtctaccccaaaataagttcaaagttcatttttagtaattgatacatctgagtttgtgaaattaagtaggagatagatgtattgtgataaataaagtgagaaataattgcattgggatttaatagagtagaaattttttaatccgttttatgttatattggtatacgtggaatggatgaaaaataaacttattttgagacggacgatggaggtaataattccagcgatcgagctggatgaagctgtcacaactgtatcaccaaggttcgttacgttcacacaagacaatagggagaacgccagccaccgggcgcccgatgcggcgcgcatgcatccgacgctgctgccgtcggggtccaccacgccgcctgctgagccgcccacgtctctcccacacgcgccctcgtgctactatgtttcccaccacatattccgttgcaacaaatcacccacatattttgaaaaccctctactaatctatttctttttttccactaaaaatgtttcacatagtgtactcaatgtttcactatgtatagatctaatattgcagtgaattgaaacattcttttataacaaatcacccacatattatggaaaccatctattaaggatattcgtttcatttttttccacaaaaaatatttcacctagtgtacttataatgttttattttgtagtgaattgaaacattcttttgcaacaaatcacctacatattatggaaaccctctattaagggaattcgttttattttttgttccaccaaaatattttacctagtctacttataatgttttattttgtatggatcaaatgttgcagtgatttgaaacattccttcgctatttgttaaaacattatttttaataagatgaaacaacgcccgatttaaacaattgaaacatttttgatctacttagtgaaacaattccgatatacttggtggaacaatatgcaacatttaaaaataattcaataataagctattttttcatcggaatatatccatgtgtggtcttgtttttcaaaatttaattgcaacgaatttaatggtacattcggttcatgatttggataaataatttaagagaaaaatagtttaaaatagttttgtatgcatgcatgcctgatgacgtcatgctaacgtgggcgcccgatttttctcccaaaaatcgggcatccgattcctagtcgcctctagacaatagtctagtcgtaacactttcctgtttgcctgagcctgacatgttcaggcctagtcatataaatccaattgtacgataagaacatgagttatcctacttctgtcttatgatgtgtcttaaaagacgtttttttaaataagatatatttaagtgctataaatttagatagaaaatatgtttatattcgttatactataatatattccatccaaccaaaaccccatatattttaggatggagggattatgaaattatgaatcatttttccaatttagctattgttttttgaactgctaataaaaaaattgtatatagaaatttgttttaaaaatcaaataaatcttttttagttgtaataatagattatattcaattaattaattatttattatttttctcgttttacgtgtggctgaaaaagccaaactatttacctgtatccaatgaagtctttctttctagtggtggtggcctggtgggttaaactgagttagtttcagcttatgggctcagatttttttcctcgtactctatatatatatatatatatacttcacagtgtataaaacttttatatagaagtttctttaaaaaatcagcaaatattttttactatggtctttaatagttaatatatatcgaatttgtgctaataaaatgtctccttctacatacggtgataatccttatctacaacatgaatcgaacggccgaacgggaccttagtctgaccagaagaatcagtaagagggtaatatatatgcaagttgtggttaggccgatatatggtcggattatcacaagggatccgatcgaatcgcacgtgactccgacccccctccggccggccggcagcataaataacgtacggatcggaggcgacgagttgatcgaccgtacgtacgtacgttacgtgcagaggagagggatggacctcctgtgcgacaacatggtggaggagatcctcgtccgcctaccggaggagcagcacctccgccgcgccagcgccgcctgccgccgctacggcgacatcatccgccgccccggcttcgccacccgccaccgggagctgcactcgccgctcctctccggcggcgtcgtcctccacggcgtgcggcgccgctgcccccgcgtggacggcaccgcagcccacgtccccggatcctacgccttcttcctccccgccggcgccggcgacgcctccgcgtcttcctccttggagttggacctcgccggcctcttgcctagccccaccgacagggagctggcctacctgctcacaccggcgccgccgatccggacgccgcccgcaggagcgtcttcatcgtgcactcgtcgtcgtcggccggcctgctgctgtgctgccgaggctatgtcaacccggtgcattactacgtctgcgacccggtg

SEQ ID NO: 5046 - DNA, 32735 bp, Oryza sativa
cgcggcatcggaggtcgggcgaggatggcgacggcaactgagcagaggctagcgacggcggcggcggctctcgacgaccgaggcgcagaggcggaggtcgtgcggtcggctgaattcggcgggggcggaaaggctcggcgaagctggtagcggtgaggagtacaccagccgccacgccgaccggtcgttgctgcgggccaccgtttggcaaggcgttttggttggccaactctagccagccagtgagcaagtttgaccaacgggatggcttggccatccggttggtcagtctgttggacctcctttttgtgcttgaatgacgaaaatttggcttggagaggttgatagagaggctgcattcagaagcctctgttcctatcccaggctgtgcgcacggaaaacgaagcggtccattaacgtgtgattaattaaatattttcttttttttttaaaaaaaaggacaaatataattttttaagcaacattcgtataaaaactttttttaaaaatgtacaatttagcagttttaaaagcgtgcgtgtggaaaaggagaggagagagttgggagaacctagatacgggacttgtttggatcctccgagctattaaatagccctccggaatcttgctatttagaagtattaaacgtagattaccgacaaaaccgattccataacccctaggctattttgcgagacgaatctaatgatgtatattaatccatgattagcggctgattactgtagcatcactgtggcaaatcatggattaacatacctcgttagattcgtctcgcaaaatagcctagaggctatggaataggttttatcagtaatctacctaaataataaaattccggagggcttaaaaacaggccacgaacgtagagcatctagtaactgagcggtttgctatcgacacagtacctaataactgagctagttccattttttttttcaagtaccgttgacatatggcccaccagtcatagtaaatttgagataaaaggagtcctcgactatcttctccttcctttcgcctaaaggaaaatctcgcgtctcgtctcccctccttgcgccatctcgcggctgacagggtaggggcgccgatctccatctggcgagcagagcagagcaggcgaggggaggggatcctggtgagcatccacatcctctttccgattcatctctctctctctccccccaccgggagtacttttgtctggaattttgcttgcgttgcgttaaccccagcttctcttgtagatctggaagaagctcttctcttaatttcagagccttaaccttagtagaactaacagtttgtttgttctcccaaaagtttgccggttcaactcaacccccatttcccaagttggatccgcccctgctagtagtaagatctggaagcaaaaaaaaaaaggggggggggggttggatctagttcgcaggagatctctgattatgttgcactgattgaataacctcttctttttttccacttctggcaggtgcataattcttgaatccattttaagtgcagcaattctgagtaccaaaaaatccattcaaaatggtatgcctaatggtttattattctttgtaatattaagaagggacattctgacatttgctcttttgctggtataagcaactagttgattcgtttaggagagcttattattgttttttgtgtaccgcaggtggttcttgctgcttccatcatttcaaagtccgggaaaggttagctggcttgaaatattctgttgttaatatattgtattgcattattctcagtgaaaaaaagaagtctttttaaatttatattcttatgttgtaatcaaaacaaattcttttgtgcatagaaaaagaaactgttgtatttgtataagtttttacctgtcacctgtgctcataagattgttagctcatatgcaaatttgtggaacccaaatactaatctagccgttgtcgtgttgcctcagtagattcttaactcctatgaccctaaaatcctatgtagtgagcacctcttggttaccaatttgctgatgcttccttccagaaagctaatgtgattagactgaatgctgtttcttctctgcgcttttcaactgcagcacttgtttcaagacagtttgttgacatgtctcgcataaggattgaaggattacttgcagctttccccaaactggttggaactgggaagcagcacacttatgttgagactgaaaatgttcgctatgtttatcagccaatagaaggcctgtacttgctacttatcactaacaagcagagcaatattcttgaagatctggacaccttgaggctgctctctaagcttgtatccttttttcccatatgttcattgttccagttttttgacctaactaacctatacaatcctatcctatgaaacatatgaaacatggttttttaacctacacatatattgctctgtagtgaataaatgtatatcagataatgttaccaacgtttgttttgtgggataaaatgaagattataatgtctcggtatagttgagcttgtcactatataccaccaaggggacaaaatatcagataatgctataatatgaaacatataaaatttttttcttttaacctacccatatattgcaatgtacagactaaatatcagataatgctattaatgtttgttttgtaggacaaaatgaagattataatgtctttgtttagttgagcttatcattatatgttaccaaggagacaaaagaaaagtaattattgtttatcatagttgcttgggaaatttggaaacactataatgactgtgtattcaattgagcgaatccaaacgttatgtaggcgttgcgggcagtgtcaacagaagctacgctttggtgcctggctggagctcttgtgctccaagttttcctttgtaggtcgttatcttaagggcactaggctgtcgtagggtggttttttggtcatgtgtcgccttgtgtgatgctatttgtggatgtgttttggatgaagggcttgttagcgcttggttgtatgggtggtttgtttttccttcttaatgaaatgaagtgcagctctcctttgttttctaaaaaaaacaaagaaaataaagtcactacattaacacaattcaattttgataaaaaacaacatgcaagctatacaatcatgaacctatcatatttttttaatggaatctgttatgttttggggctttatggatatccaccgttagagatgctactacactgcattggttttctttgttggcaataatcaagtactgtgatctccttaacagttccacaggtgcctgaatattctccctctcttgatgaggagggtgtttgtaaaacagcatttgagcttatatttgccttcgatgaggccatctgtcttggaaataaggaaaacgtaacagtccaacaagtcaaacaatattgtgagatggagagccatgaagagaaggcgcacaagctgatgatgcaaagcaaaatcaatgaaacaagggatgtgatgaagaagaaagccagtgagcttgataagatgaaggtctgcactgcacctttcttcagattaaaaatacatattatatcttcagagaaaataaatgacagttaatgtagttgactttgaccattaggaaaatcgatattacattattattgctagtttgaccttatgactctgtgctgttttactgccagcttgtcatttctttggttacaattgatatcagttcgcgcaaactttagtgtttaaaatacaattgcattgccgttatttcttaatgtctaagaggtgaattttgtggtcggtgttcatgcagatggaaagaggaaaacttgacaaaggaggatactcggcaatatcaggtcccagggtagttgaaaaagcatttggtgacatgagcattactggtagtggatttggaagtggttctggattaggtggactgagcatggatatggactcatttgctagcaagcctaaaggtggtaatttaaaaactctttgcatttctcttggcagatattaactctttgcattaggggaaaatttactacgtaaagctctgggttttcttcttgcagtacttgatattcagatcttcattcccatgccagtagtctcctgattatgtctatgtttgtctatataattcctactttccattttaactgctcgacaaagttcaatcaactataatatattgcttatgtttgctagcaatgtttgtacaggccgtccatctgcagctgctactgctcctggtaaaggtcttggaatgaaattagggaaaacacagaagacgaatcagttcctggaatctttgaaagctgaaggagaagtcattctggaggatgtacaacccagttcagttcagtcaagggtgtcgcctcttccaccaagtgatcctgtcacagtgacaattgaagaaaaactcaatgttacagttaaaagagatggaggtgttaataattttgatgtgcaaggaacccttgctcttcaggtccttaatgatactgatgggtttatccagttgcaggtaacattctttctgaacctctagcatcctgcttgatttttttctacagaaattttcacaagcagatcaaagaacatagcacgacagtttttgtttgaacctatacgatatttctactaagtaaatgtaatgcatgtgttatattgggtgaccttcctgctaagataatccatgtactgttttttttgtagtccatgtcatatgatatccaattttgctatcacatttgtgcttgtgactttgtttatgcttatcatgccatgtttttgttgctgaggaatattatttctttttattacgttcagttacatctatgattcttgcaccatattttgcattgcggacaagaaacattgtttggtccatgatactgtttgtcggagctgattatttgatacttgtgtcttatagattgaaaaccaggatgtacctggacttagcttcaaaacacaccccaatatcaacaaagatttgtttaacagtcaacaagttgtgggggcaaaagatccaaacaggccattcccaagtggtcaaaatgaaactcctctggttaagtggagaattcatgggatggatgagtcatcgttacctctatcaggtgcacaatcactttactttcttctatatcacattgaagatcatgccttttcttttcttggttgcctcctacttttattaacttgtgtttttttcgctcagtcaactgctggccatcggtatctggaaatgaaacttatgtcaacattgaatatgaggctgctgagatgtttgacctgcacaatgttgtcatatctataccattgcctgcacttcgggaggctccgagtgttagacagattgatggagagtggaggtaatgtttcaaattcatctctatctgtactgaacttggctgttatattatactaaaataattgtccaactaattgttagatgacaattatctccttagtattgatgctaatattagaaaaataacaagtgatagctatgctttctagctattgttcctggcactgtcatattggcattcaaactgttaagggcccctttgatttgtaggaaaagtgtaggaaatttgaaggatttcaatcctatggaaaaaattcctatggaagcctttgaaattaaggattgaatcctatactatcctttaaaattcctatggaatggctaatcctatagagattttggagaaaagttagcaagaggtccaacctcttggaaaaattcctttgagtctatctctctcatccgattcttgtgtttttcctgtggtccaatcaaacggtcattcctgtgtttttcctgtattttccaatcctctgttttacacctgcattcctgtcagaatcctacgtttttcctattcctccgtttttccattcctgcgattcaaagggggatgtgttttggatttatcgggatttagtccaattcccttggatgaactggtcctaaatgacactttgtgtagatagagctaaacttttatttccttgatgctaataaggtagaacgcacagcgaaagctgattgttataatgcctatttcactttcattttgcatacaggtatgattcgagaaactccgtgttggaatggtccattcttcttatcgatcagtcaaaccgcaggtcagtgaaatacgagttcatataaccatgttttattttgttttttttttcctgtggctctaactcttattttttcccctgtttgcagtggctccatggaatttgttgtccccccagctgatccatcaacatttttccccatatcaattggattttccgcatctagtacattcagcgatttgaaggttggttttcccttattagatgagactcgtggttctatgtttgttgttccttctcattttattgtatggtaatgttattttctgcataccttgcaggttactggaattcgtcctctaaaggatggtaacccaccaaagtattcgcagagggctcgtttggtaacagccaattatcaagtggtttaacgcccaaataagggagattacctcacttcagcacacatgtttgcgggcatttcctttcggcaatgagctgtttagaagtcatggagaagaaggattgttttgcatttataaagaatgtaattttgtctgtttcatatgtagtaacatgtttcaccaaattgctgttaatttgtactgccacctgatgagaaataaaagcatgtcttttccttagacgccggttggctgttctttattttgtacgtcttgtttctctttctgagaatgttagatcattttttgtcgatgccatatttatacagttctcttttttcatgaaatgactacagtgcattcagccaatcgctgacatgactattggcgttctcattttcagttttcagcaaattgaacgccttgtcaacctgtattccacataaatcttgaatttaccttctgattaccaaggttgatagggggacaaatccatcaagtgaaaatttagggcttagtttggtttatagccaaactcaaccatgctaaataattggcaatgctagaaaaaaattggcacctattttgtttggaacaaaaaaaatttggaattcatctatagctatacaaatttgaacttatggtaactttgcccaatattttaaacatggccaaatcttcccattgccaaaagaatttggcaagggttatggcttaaccaaactcaccttagtttgcgtgtagcctggaagtgtggaatttactaaataagaaaatgagaagaaaaacctgctaaatccgacctgccggattcgaaccagcgacctaaggattaactgcaacgactacagtcctccgctctaccaactgagctaaggtcggtttcatgttgtttttcacttgagatttataattgattggtctaatttaagaatgacataccgccagtgatcacgtctacaaattcttttaagaatattttgacaagaacacaattaaatggattctattgagctacatgcactttggagagagctggttgagcacacttgttcatcaggttatttcttaagtgcttctctgccatggtatcaggaagaaaagcgaccttttctgctgccaaattctttttctcttggtgttttacgttcaaagatgacctccatattaataaatctctatagaaaatatgacatagcaagatgcatattcatgatgtggttatttagtttcgaagtggagaagcacaattcacggagacactcggcgattttcgaaggtagtgcgaggtcgactgggggcaatggcgaatcaagggggaggtgcatggcgtgggcgtttcaatccaaggccgatgcgaaacttcggcgaggggagaaagccacaagctccgacgttttcaacgggaggtgagtcgctgcaggggattgggggaggagctttgggggatcaagccaaaaccatggctgcacgaggagcaacaaagcagcagtatcgccctattcagcataaggaaccagccaaggaaacagagaagggtgatacctctgtgctgcagccagaacaacctctgcaatccaatccccgtgctggtaacaatcctatcccacaaagatttttttgtcagagatgcaaaaatgtgggtcatctggctagggattgcaacgtttctgttttctgcattaactgtgccaagccatctcatagaactgaggattgtttgtatgacaagcaaccaaggccagttgctaagcttgttgggtatggtgcccctggtttaggttgcattcttattcaaaacactaggccggactctcctaaagagcatgcaaatcctttggcaatggtgtctattgtctttgggagggaatttactgaatctcagcttgaacaaggcttcactcagcaatttaagtggaattggcaatggaaagcaaaagctatgcccaatgggacttttcagatgaggttcccaaacaagataaaatttgaagagctatccaactttgactacttcaatgttaaggggactgatgttcaagtcaatgtgaaagaatggacacaagagtctgatgcagtggggaagatgcatactgcttgggtgaaggtgtctggcattcctgatgctatgagaggttaccaggccctatatgaagtgggatctaacttgggaacagttatggaagttgacatggccacctttagggctagcaatgtgataagatttaaagttgggatgatggagcttgagtcgctgcccttgaagttaatccttactacacctaaaggtctgctgtatcaagcccactttgagctggaagaagttgttgagcaaggatggttcaatgagagtatctttgaggaagttcaggtagggtctgaaagtttcctgaaaagtggtcagaaatctggtcaaagggatggcaagcagattatggagatgggtgataagatcagtcctggtattttgctaagaggcaatggctcaaaggatgatcctacagatatgttgtgtcctactacaatgattgaggaaagtcaaatcaagtgtgctcagatactgagagacagagcgctggcttttcagcttcaggaagcagaggctaagtcgaccacagattgtggcatagaagtaggtatgaccagtggtgagacaatcctgacggaggaaacacaagttcttctgacacaagacaaaaaatgggagcaggctggaaatagagggatggcagtgaacacaatcgactctgaggcaactgaggtgggtgatgaagggatagacagggaagatgaaagagtgcacttgggtgacagtgaggattatatggattcacaagaatctgaaggaagttttgccaaaagactggggatcaacttagtggaggacaatacaggtagtcaagaagaggagatgagaaggagtaaaagactgaaggaaaaggaagacttgaagccacaagatatggccatgcaaagaaaggaagctcagaatgcttttgtcaacaaaggtcagaatacagtaccctctattattaatgaatcaaatgtctctcttatcaacatggcgaatattctgggtgttagtttaggatgtgctattgaagatgtggaaagtaacttgaatttgattaaaaatctggaatctgctagaattaacctctttatgaaagagggtgaagcagataaaaatgctgaattaaagaaaaaagaaatggaaggcatgtctactgatcaagagtggtcagatgattcttctgacaattctactcttgatgagattgaacagatgctgaaacaagtctagtcttcaatgaaaaaaagcaatcagaggaggggaaaccttgagatttcaaggtcactcccaagagttcaaagaaaagaggtaaagtaaaaaagaaaaagaaatgaaaggcttattttggaatatcaggggaatgggtaacattgaaaaaacaggtcatttacaagacctaattagggatcacaaactggactttgtggctattctagaaacagttaaacatgatttttcaactgaattgttaaacaaactaagctcagggagaaatatgcattggtgttggatggctgctcgtggtagatctgggggaatattggtgggaatggataaggacaaagtcaatgtattaaatgagaaaactgggaagtatttcataagacttaaattgttgaatgctgacaacaaaaatgtctgggattttatggcagtatatggggcagcgcaagctgaacagaaagctgaattcctgactgaattggctaaggaattttactcccaaggttcccctttagtggtgggtggtgatttcaatattttgagaaaggaaagtgaaaaaaacaagataggtggatatacaaaatgaagcttcatttttaactccatcattgatcaggcaaatcttagagaagttcagatgagtgggagacagttcacttggtgtaattttcagaactctcccactctaaagaaactagatagagttttcattaacaatgaatgggaagacatttacccccttaccactgttaggactttggttagggccatgtctgaccataatcccatgttaatggaaacaggacagaatatggctcctcagagtatattcaggtttgagcaaagttggtttctgagggaggatcttacttcagtagtggaagagatttggaactctgactataggggggacagcatggaaagatggcagaagaagctgaagtttttaagaaaaaaactgaaaggctggaacaaaaactgggaaggagaatacagaaggaggaaaaaagaaatcatggataagattgaagagattgatatcctagctgaaactgttggggtggatattaacattatgaataatagaagagcccttgatgctcaactcagatatgtggttagagaggagaaaattaaatggttccaaaggtgcaaagaaaaggaggttttggaaggtgactgtaataccaaatactatcacactaaggcaaatggaaggaaaaggaagagcttgatccactcacttgtgcaagaggatggtgtgatttctggccaacaaaacttgctttcctatattaccagcttttataaagaattgtttggtcattctaaagaaaacaatgtctctttaaacatggagggtgtgagcaaagttaagaaggaagatatagtggaattaaccaagcctttcagtctagaggaggtgaagaaagtcgtttttgaattgagaaaaaacagagccccagggccagatggcttccctggggaattttacatgaaattctgggacattatcaaaaatgatctcttggaactgattaatgactttcataaaggtttactgagtgtcgagagattgaattatggcattgttactcttgtccctaaaacaaaagatgctgcacaaatacaaaagttcaggcctatctgcttactcaatgtgactttcaagatcatcaccaaggtgttgatgaatagactggacagggtcatgatgtatattatttccaagaaccaaacagcctttctcaagaataggtttatcatggaagggattgtcattctacacgaacttctgaactctttacattcgaaaaaacagagtggcatcctttttaaggttgattttgaaaaggcatatgacaaggttgattgggtgtttgtatatagaatgttgaaatcaaaaggctttccagatttatggtgtgattgggttatgaaagtggtgagagggggcaaggtcgctattaaggtgaatgatgagattggtccctatttcaacactcacaaaggcctgagacagggggatcctctttcacctttgctgtttaatttagaagcagaagcactcaccttgttggtgcaaagggctgagagcagttctcttttggagggtttgtcagtaagtgagaacaataaggtgacaattctgcagtatgctgatgacacgatatttatgatcaaagataatatggaacatgctagaaacctgaaattcatcctgtgcctctttgaacaattatcagggttaaagatcaattttaataaaagcgaagtgtattgtattggagaggctgtggaaagagaaaatgtttatagtaaaatttttacctgtaaggtgggttcttttcccatgaaatacctggggttgcctattcacaaaaagaggttactaaacaaaaactggaagtctgccgaaaataagatggaacataagatggggggttggcaaggcaaactccagtccattgggggtaggctgatccttaccaatgctagtcttagcaatgtacctttgtacatgttgtctttttataaaatccctcagggagtcaaagagagaatggatttctttagaaggagaattttttggcaggaagaccaaggtataagaaaatatcacttggtacaatggcctataatctgttctcctagggatcaaggtgggttgggtgttctggatttagaaactatgaatactgctctgctgggaaaatggatatggaatttggaaaacaaagaagtttggtggcaagatatacttagggataagtatctgagaaaaaaacccctctctgaggttaagaataaaatgggggactctcacttttggcaaggtttattggagattaaaaacaccttttacaaattctgtactaagaaactgggagatggcaaacgaactttattttgggaggacaattggattggaggtaggcctttaaatgagcaattctcagacctgtacaatatcactaacacaaagcacatcacagtggataaagctctgcaggggggttgggataaagtcacttttagaagaactttacatggaaataggcttgaggactggaacagaataaagcatctatgtgctaatatccatctgcagaatggccacagtgataagctttggtggaattttaataaaaacggctcttacacagtcaagtcgatgtacagagctctcaaattgcagcagttttcatgccctttgaaaaaattttggtacatcaaaactcccctgaagattagggtgttcctctggttatttctcaaaaacaaaatcctgactaaagataatctttacaaacgtggttggcgaaagggagacaaaatatgtcagttttgctgtagggaagagtccatacagcatttgttttttgaatgccccttagcaaaattgatctggaatgtggtcatttgtgccctcaatctaaaaccattttcaaataaaacccaacttttggggccttggttatttggctttgataagaacacaaaaaatttgatgatggtggggattactgctgttatctgggccatatggaaaaccagaaacagagcgtgttttgattatgttcttcctaaagatcccacagaggttatcttcttggtttgtaatttgattgaatcttggactgttttgcagaaatcggaggcaaatcgaatggagctgggggtctgggtggtaaggcaagttgcaagtgatgtttacaactcaagatatggttggcgtccccacgttagaagattggaatgaatgaaggatgctgacgtgtggaatgctgttgcttgtgaccgttttgaagcttctgtgctgcttaacagatccctttctagctttgttttctcctctggtctttgttatatcagccaggaactagcagtctccctcaaccagttgtttttgctggtctttctgtgggaaccctcttactgggctttctgttttttgtttagttttctataagacaatttgccgttccgttaatggaaaggggggccttgtgccctagttctaaaaaaaatgatgtggttatttagcatgaaatgatgcaagtgccatggaaggccaaaaatccaaaaaaaaagtgcaaagcgtctctcatgatattctatgagaatttagagacttgttagtaaaaaggaacaaacttaacaatatgagagcactaatgttggtgacaattactcaggcatgtatacatggggggttcagcagaggcagatactcagacatgaatacatggtaagatcaaggcagataacaactagaactaggtccctgttggagcaaagggagagaccctggacgatggcatctttcaggcctggttgtgatgtggaggccatatttcgctcggtaacagagtacatcataggaaatggtgaagacaccgatttctggacagcaaactggactgggaagggatgctttacatggcggtggccgatcctgcactcttatgcaggccgtgtcaagctttcggtcgccaaagctctcaccaacaatcgttgggtccgcacactgcagggggcgctgtccaacgaggcgatgggcgagttcttctagctttgggacgaaattcatgatgtgttgctgctcccctcgacggatgaaatcaggtggaaactgacgaacgatgggcaattttctgtggcgtcggcctacgacatgttcttcatggctacggaaaactgcgcattcggcgagctgctgtggcactccagagctccctcgcgagtccgcttcttcatgtggcttgcgctaaaggaccgttgcctcactgcggacaacctcgccaagcgaaactggccacatgatgatctgtgctcactttgtcagcgagatgatgagaactgccaccacctgttcgttgcgtgtgattacacggcggtgtggcgttctatcaagcgatggtgcaatgaaagctttccaattccggcagatggggatgctgccctcgctgattggtggctggcaactagatgccgttttcagaagagctacagagcagattttgactgtgctttcatgctaatatgttggctgatttggaaggagcgtaatgcacgtatatttcagcacgtgtacaagctaccggatcagctcgcggaggacatcaaggatgaaattgccgtttggagggtggcgggggttttctcccaatttcgcgagtaatccccatgggtgtttgcggggtttagcctcgcctttgcttttcgttcttggctggctagggaccttccttggccgccacgacattgtaatgtcgctgtaaacttttactctgttttcctcccaatcttaatgaaattggtcggccaacctttggccgacccggcaaaaaaaaaaaagaactaggtccctgttggctaggtttggtaacaatgttgagggcattaacaatggacatttcggaagctggatttggagtctgaaagacacttgatgaagtgtgtactatgtatgcagatttgaggagggttgggtgttgaaagttgaaaccttgaatccaatcatcagagattcagaattttgtgacacagcaccatgcaaatggctgcacatgtcagatgaaaacagtaagtatttgcatatatacatactcaaccaagcataagaattgacactgatgattgatgtaacaagtacagtaggtgggtttaggtagcactagcacacaaaatcatatggctaacaatgaaaaataaaataaaatgcgcagcatcccctttaataccagattaatgaaaacaagatacttaatttcagatggataactttatcctaagcagtaaaatacaaggagttctggttaataattagtaaaaggcatagcttcagtcataaacacgagttaatttattcatgggaaaaagagggtaaagacagttctgatgtccacgcaaattacagaaagtgctttaggtattactcacaagggaaagaccttaaggaattcaaagtaaacaaaaagaagaagaagaaagaaacagagagagaaaaaaaacttcagaactttagctatgtgggtcatttgctcattgctgccttcgatgcaccagaaagcagaagaagagggcaatatgcttgacaagttatcgagtaaatcacgaggaccctttgacccagtccttcctactgaggcttcccaaacaataaatttccaccctgtcacatcgaatgattagacacatgcatagagtattaaatatagaaaacaaataattacatagattgcgtgtaaattgcgagattaagcctaattgcgccatgatttgacaatttggtgatacagtaaacatttgctaatgacgaattaattaggcttcataaattcgtctcgcagtttatagatgaaatctataatttgttttgctattagactacgtttaatactttaaatgtgtgtttgtatatccgatgtgacatgcaaaaacatttcacccctgaactaaacagggcctaaagccaatacgctgccgcaccagtgcgcgattacacataccagcccatgatccaccatcgccgctccagcgcccgcactccctcctgccgctgcaatccttgctctccacggatggccgaagaggaagagaaagagagataagggagagacagggaggagaaaggatgggagagagagtggatgacatgtgggccccacatgtactgggtccaataatattttttttgtgtgaatgacaatgggtcccgcacatattttttaattccaacgtgacataggtgccacttcaacgccatgtgggacgaagacccggttaacaccggtcagcgaaaccgccctccaaaatcgctgagagagtcaaattacatcagtttcaattgttcggggagtcaccctacccagctttctatttaagggttacaaattagatttggcctatttttttttagggagtcaaaagtggactttttcctagtggaaaagatagaacgcaagccagagccctgagcacggacgggccgcgttcactcgtgccgtacggggccgcttttgcttgctcccggtccgcaagcggcatcgccacaagcgcatgaggcgatgtggatagaagcagaagcaaacgagatatttaactatttgccactcttataagtgataattaatgatttgtcattggacccacatgtcatatattacgagcggcaaatacttaattaccacattttaaaagtagcaaatagttaaatgtctcgaagtgagcacgtcacctggaaatcggcccgagagctgtgggagcgtgaactcgccctcatctttaattttctccgattgctgcaaaagtgtggcagtccattaattggttttcctgctagcgctggctatagattagttgccagatctatgctctctcttcatttcttctcccttccacgtgagattgtattgttgtgaataaacttatagctcagtcttactgtacctgcagctcttaattagagagcatcagcagcggtcatactcaatgacgagcttgagaccttggataataggcgacatgtgacgagtaggcaacccacaacacacgagatggagagaaacaacaacatgctagatggcacattgagcttcaacatgggtgaccggcgacaggcgaactcaagggcactggcacggtcaagcttgatggtgcaacaatagaacctgatgattcaggctgatggtattggatttaaagtttgtatgctaattataatggttgaaaaatttataattcatctaaaatgagaataaaataatttatccaaatgttaccgacgtaattgtgcatatccaaatacatagatctgtagattaggaatacccaactacatgagaacttgaatctagagctatgcctaatagggtcctagattgcacggtaacgaggtagctcgcccgggggagggtggcgttatgagagcatgagctcaagttcgagggtgttgacatcgagctatagtgcacaacagctccgaagagctttggtgaatagggttcggtagaggaagaagaaagaagtattcacattataattttagaaaaaaataataaaaatctaacgaatgattgggtggatcccagcagtggccccctccctcattgggtcttgacggcggtgggggccctctccgtcacatggtctcgatgacaacgggcggaaaactacatcggcgatgactgcagcgacagccccctcctccggcggactgcatcgatgatgatggcggtggtgaccccctcatgcggatccagtggctccctctctcacggtgcggcgggcgacaagcaggatgatggagagcacgacaacggtggtggtggcggcgatgacgacattagctcgtgtggtcggcattgggactgcatgcgaagatgagattttcgcatgcggttgggttacccgcacggaaaaatgttgatttgcacagacacgggggtgcatgtgggccgtttagatgcatgcgaaaacccattttgtccgtttgcaaaaaaaaggatttctgtacttgtgtgatcaattaagctatagaaagcttttaaaaagattaatatgattaggtgcgagccacgagcaatgcaatggagacgatgcgggaacttgagatttggtcggcccaagctcatggccgtaaaccggggtagcacactagtgcaaaacaaaattttccaaacgggccaaatatggtttttgcatgcggacctctggcccgtctgcccagaagggtatgcgaaaatccggttttttcatgcgggtgcttatgtcgtccgcacactaccactcgccgctgccacggccatgctcctcccccgaccgcacacccctcgccaccttcgccgtgctcccaccagccaccgcgcacctgccggcctctgcagccgttgcccctcgtcaccttcgcggcgcacccgctagctgctgttgcccatcgtcgccttcgtcgtgctcccactggccaccgccactggcagagagagagagagagataggagaggagtatgcatgaaatatcctgggcaaaagaaaaagaataagtatgcttcacctatatttcaaagggcatgctaggtaataagctagaaagctaaaagtatcaagtctacagtgcctccacgttcttcaagaaggaaaacctcacaagtgaacggaatactaatgcatatgtcaatgcattacgaggaggagaggagaggagataaagaatgaggtaaggagagagagggggaatgagttgaaaaaaattgaagtgctaaaagagagaatggggaggtaactcagacttctagatggatcttttagtggttcgcatgtgaaaatatattttttcgtgcggccgtttaacatgcctgtctagaaaaacagccctatttatgcccatgtagtagtggcatacaatcaccaggtcactatatatgcatgcatggatctgactctgcaaatcaaatcgggtaattttatcacgtggaaagcttggaaaggaataattgtacgcacttggagcgcgaccgagaacaaagccacgttttccggccgggtgcaaggtcaccctcggcgcctttcctccgcggcggggcggcggccgtccgcgcgcccaacaatatctcgcgcgcgccgcgcggcatggccggcagcaagcaccttttaaatgtttagctaccccacccagagctacctgcagtcggccggccatatgcatacacataaagattaaaaattaaatgtttcacgtaaaatgaagtgataataacgtgtgattaattgagttttaattattacaaacttaaaaaatatattaatctcatattttagaaaaactttcatatagaaagtttttacatgaaacgcatcgttttatagtttaaaaaacgtgctacgagtattcaaaagtttatccaactattgttggagaaaaaaataggcctgtgtgtgtgctttggactcgctttcgctgctggatggtggctttcgcaagcatgcatgcgtaggtacagtagtgtattgagctagctactacagcttttaattttggggtatctatctattatctagctagcttattagatactccatccgttgcataaaagaccaacctagtaccggatgtgacatatcatagtactacgaatctacacatatatatattcagatttatattactaggatatgccatatttggtactagattcgttttttataggacggagggagtagggtgctggctagatatgatagtgctctccaaactccaaaagaagatgtggcaactggcaagctagggagagagagagaggcaggcacaggcttctggaagatcgacgatcaaagcatcggatgcctgcttgcgccggccaagcgcaaccttcgatctcttcggtccttctcagcttctcgatatgcatggtagctcgtatgtaggagtagatctgtctcgttccattaattcttttcctctctctccttttaatctgtgttcgttgaaagactatcttttgcagcgcctttctcttgcagctattgctgtcggcaaattcgttcgtacgtgtaaccaaaggaaatgaaatcgagagagacgactgagatttcatatttgctagctaggcaaagtccaactcacgtctgcacgtgtgatttaattaatttgatgatagttgcagtataggtgcattgtccaactttttttctacttaggtttataagcttttaggtcgatatggttagtgtatacaaccgcgttaccaagctatagctgatgcacaattaaaaagaaatacagatcatttatatgacatatacttcctcttaaaaaaaatcaaacttatagatagaagactatgtttgaggcctaataataaagctttaatgtgagactatgttggagtataagtgaattgcttacccgacttctcttatgcgtcttaaaattttgtttaaactaattggactaattgatatatacaactcaataataactcatcagtttactttctgtttgaaccaactagttcactgaactcaacaataataaagggtttcttggagtaaaacaaaaacgagttaactaggcacttactactgaagtatcctcttttgcatgcagtcaaactgtactggtggctgaccgtctgcggacatgcgcattttcgtatacggatgagttagctaggcgctcgctacaatagaaaccctaggtgtctacaaacatgcgcattttcataagcggatgccctagccgcttacgaagatccattatcacaggcagaccacttaagctggttgcctatgaaaacacacaattgcaggtgaccaagttaagaggcctgcctgcaatagtgattttttcacgtggccgttaattaattggtcatttggaaagattgtgcgttctatataatttaatatttctcgtaattttttaatcaaaatctgaaatgtttttaaaattgtccattttgtagtggctcttttgtactacacataggacctaaccgagagatcgttcttagtacatagtaataagaatcttgcattgacaaataaataggtgcagcatgtaaaatctttgtcacatcccttggatttatcgtataaaagatcctttgctgacttctctaactcctttaaattgtctaaccctcttgttgtacccattagcacttctgattcagtgtgacgcaacatatcctccaagtcaaaataaaccttaaaatcattaatatcaggggagccatcttcgtccatcatatcttgggcaatgtcattaactgtaaaattttctaccacatccattgaaaaacaatcctcttcaccttagggattaccatcacctttaggaacagtgatttctccgtgataggtccaaactttgtaattttttcacaaatccgcacttcactaagtgccccttggttgaattgggatctgtccatattttctgattcttacaatcaatgcacgaacaacaaatttccctccaattctcccttaaagaatgtacctcaacctagtcaagaaatttaaaaacttctgacatgtagaatggataagttcttagcgtatcgtacatccacgctctatccagctgctgtaaatgatcacaatacaaataaattaaactacaagttttttcctccaaacatgaaaatacatgtatcttctcgtaaataaagaaataaaacaattaactagtgcttacaataacaattttgctcatcaaactaatctattttagctaaaatttgcaaaattagctcataaattccaattttataactgcaaattctccgcattgcaccgacgattttttttaaaaaaagcggaaaatggaggaggtaagcaagtatctaaccttgtatatcaatttcaaggaaagatttcaagttcaatatatctccctctatttgttgctttgttttggagagtgaaacttcaggttggaaacacagaagctcgggcaaggagtagtatataggtcgatcatcacatgtgtgcttcttaatggcttgcctatggtaccgcattacacacgcgaacctcttaactgcctgcctgcgataatgtgttaccacaggtgtgctatgaaccatccccgcggaaacaatttttcatgcagacgcaagtacggtcagcctggagcatggagggggccttgtccatgaaaatcaattacgtggtagtgactttatgttaatcctagatacaactatataactgttactgcatattccctaccaatcgttcatttagcatgcctttggttgctaaggttaagcagaattttattttgataacatttgacacaaactacggtttgaactagcaagcatgtatgatattacttgaagtgcggaacatgcctatattctcactaaaatgggttttatttggagggaaaaaaggcatgatagaccaaattaacaccatcgatgattgtcggggttgatcgtctgtactttgtaagtgttctgtattattagagtgctgcatcatcaagattatggtttgaattactttgaagcaggaaaacaaacgcccgcccagcagtttaattggaaaaaaaaacctgaaccgacatatatatgtcatggtttggattgcatcaagaattgttcacgctattgcactggagttaactgggaagaccaggtaattttcatacgaaccggcagaccagagaactacttgactaacaaaaaccatccatcactcaagaatatcgcctggcccgcaaataaatgagaaaaatggtggcgggatgcaaacgtaggtgggtgatttccccgtacatcacctcacaactattgtggactagcaaatatatcacttgtgatagacttggaatatacatgtaaatcgctagaccgtagagttggaccgatggacaggtgaaccgagggttgtgccatgtcaactaccagtccaagcttctgtgctatggtttgaaggggagttgtaacatttattgatccctgcaactactatctcaagtaaaaaatctataaaatagttatttgtccaaaaaggggccttattgtaggaaaacaaccctcaaagacataaactcacgagacatttgtcacagctgcaaattttcttgatgatggcatttataagcgatcacaaatatacatgtacaattgacaaccacataccatctttaacacgaaagattgttggctagtctttttcggctgcctcagctagaatataaccagcccttaagaaattaaatagcaattttgtttctagagaaaacaacagagaggactagctaattaatagaccttagtgtgtgaagaatctcatgccacacaagcgttcaagggtccacatgtacgtccagtcaagtcgccatctacgtacattacttgtgtgctgatttgtcattagtcagtcaagtacaagtctttcccttagttctaaatctataggacggtgcctcccgaggtccaattgtttcttgtcctttccactaatttaatttcctgtttaactaattaaattttcagaaacgttgtcgagcatcagtggtactatatatacgtggcaatatgtatatccaggttcatttttagtttggcaatatatatcagtcgtgtccatggtaggcactatgtacaaacctaattagggactggtggccataatttggtaggcacaattagacaagccacctcctcttgatgttggtaggccaccctttcttactcactgaaaaagttcatggttgttgacaaatgaattttggtgtctttgaaaagggagaagtttgatctgaggtgcaacatatgtgagattatacactgtaatatcataaaaaatttaaactaactaggaatagtcaactagcactaaaatgaagatgcattgtaggggtgttatattacataatatagagctataaatttttatgcaattagctgcctattatatacaatactcgatcttaaatcattctcaaaacttcataggtaaattgtttgtacaaatagatagacattttatatgtaattctttatttctcatagcttctctagtggcatttcttttttctagtggcattaaattacaccgcacacgttgtcatggaaaaccattgcggaaaaaggaaacaattatatggggtacactaatcattgcaacattctcgtaacttgtatatgtgccgtgttactcatatctagctatttagcatagtttaacatcctaaaagtgcatgtagagacaaaattgtttctaaataatgccttacatgtattttgggcacattatagtagtgaaacatatctacatataaatttaggaaatatatctgaaatgtgactgaatcgtctttagtgtaaaagtattattgacaatgtttgaagtgcttctgaaaattttcctgtgtgtctacaaaagtcttttattgtagcatagtcaaatatatattgggaaaattttaaacgacgggaaatttgtaggagtgcatacctttgcatattgtgactagaatttacttttcaaataatatatcgttgagcttaaatacacaaatacacaatagctttccctttaaggctaattttgtaagcttacctgttagtttttatttgatggtatgttggtgccattcatggcatgaataataaaatcttttcatggcatgaataataaaatcttaggaaaaggggttttcctagctattattcccaagcaaccgataaaacatatttttcccaataataatttgtcagacatttagcaatttttgtgtctattcctatggatatttcatagatggtttttcgccatacaagtcactatgatactcatacaaacattttgctagagattcagactaatggtggcagtgaaaatagttgtggaggcatgaccgcactgaaatcatcctataaagttgcagaaagacctatatagtatttgcaacctcttttattgcaggacaccaatggctgaaaatttggtcactccttagaaaaatatgtgcacatgtactataggcacctccaaaccattgttattgaattgtgtagccaaatagttctattttttcccccaaagactcctcaactcaactaacaagagcatgatgaaataaaactcaaatcatatccactacatggcacatgcaatccattttactctaaaagaactaatcgattgaagatgttattgtcaattaatttttatgttagcatatcgaagaaaatccagggatcaagctgagctcatatctatttcaacaaaggaatcaaaccaaggttcgttcaggttcaccgatgagcgcgtgccaacccacagattcaccttcatcccgtctcattaattaactaattaaataaactaaatgttacttctcaacaaactctcatggatcagcttgatcacactcacctcgatctagtcatgattgatggatccatattgatttcgcggccgggccatacagtccatgtgaaatcatggaaatatcgttattggtaatctgtgatgatccagacaaacacatttgccaccaccacaaattgcctggaaagagcaaggccacatgtatgtacatgatattgtccatctttttcttcctttgagccaagagaataacacatacatagctgtttttgaagtctttttcaaaggaagaaaatggtttgcatgtatatattgatgtgccatattgcatatccccaagcacaatgcaacattgcacgattgcgatgagcactacctcccagccgtggctcctccaaaaaaaataataattgtttctaattggggaaagagagaatttttttttgacaagacatggttctactgatcaaagggtgataggtgtggttttaaacattaattgtggttatctcctcaagtctaggtagggaattaattaaggatgcgctcacataaatattaattcatgtagatacatggaaaagtgcgacatatatatttacgactgatcataataatgaaaatgatcttgaatatagtcatgggttcgtacacatacttgtttgttctgtgtgttaggaattaatatgttgaacaatcacacaaatctcccacatacgtcttacacatatgtagtcactttaatttgtatctcccaaaacatggtccctaagtagctaattaatttacttgtgtactcttagtcgtagatgatattgtttttcaaccaaatgatatcgatcgatggcacacaaactaagattacatttgagaggtttggcacaccgacaatgacacgggagaatataacatatgtggtgcatgcctttttgtttcctggctcgacgcatctcgatcggccgggcacgtcgatatcgacccactctctaggtctcgaaatcattgatatgatgaacggcttctccggtacacataggtctgcatcgacgtagagcactctcatggtcgttactccttcagaaaacatgatttgtttttctctttagtgggtagggcagattgtgttatatatgttcggagttgagggggtaattcgtactttagcgatagtttgatggaggtaaatcagacaaaccttttattaaatattaattaagtttagtgtttatatatagtttatatcttctccaatcaattcagatgttctcgaaattgcatgcgtgggtctcaagaggaagtcaactcctcatgcgtatatatatatatatgtcgtccagtattataataatgttgttattattacatgaatataatattcactggtggagaaactcttggtagtcccggtttgtaacccctttagtcccggtttccaaaccgggagtaccaatccgggactaaagatcgctatctttagtcccgggttaaataaccggctacgtggctgagccatctttagtcccggttagtgttaccaaccgggactaaagatcgagctgaccttttttttttttgcatggccctgttgctgcatggtttatatatatatatataaaccatgcatatatatatttttatacatatatatatatatatatatatatatatatatatatatatatatatatatatatatatatatatatatatatatatatatatatatatatatatatattatatgtatatatggttcagtacatatgtacatacataatatatatgtatttatatatatatatatatatatatgttatgcaaatgcatatgtgtgtgtgtatatatatatatatatatatatatatatatatgaccaaaatatatttacattatagaaaatgtagtcatgtattaattacaatctattatatgtcctagctagctatgatttcgacgtagtagtagtactcgctgctagctcagaagctaaggaccggtgaattgtgtttctgtcgtagtagaattcaccttgggatcaaggatttcttcgttgatgaatcccatgagttgttcttgaaccgctgcgataaattccttgtgtgtggtcaggttatccctcatgcgaataaactatatgaatgtatgaaattgattagtaattaaacaagaaatcgttatgtaatgaaattttgaatttatttgtacatacatcgagctctcttgtggtgatgatttggtctgcaaggcagtggcaatactcgcacacgtagtagccgcacaagttagttccctgcttttgctttgcgcactacaaataaatgacaaattaacggcatgagatctaattaatatacacttgtatgtattaatttgaattggagaaatataaatgtagagcatgtgtactcacaggaaatttgaacctccgcctaagtctttctctccagttgccgcagaccaaatgacggaaccgataccaagccctacatagagtttaaagatatgattcgtagtagaaataattaacataacaagaatttcttaattaacagaggaacttatgccagtacctgtatataagttcgaaaaccttgttaaacgtagactcttttttatccattgagtcatatacgttgacggtgcaggccgacaggtcgaagagtaaaagcacccagtggaatctgcaatgtgcgtgggatgcattacatatgaaacacttagcaagttcgtacgggaatgaaatttggtatgtaggaagacagtaaaattaaactaattctgtgttgtacggcaacagtatgaacgtcttgtaatgctgcgccttcaggagatggacgagattgtcctctgtttcttgtggatattggtcgagcattgcgacgtttactctccgagggtcgatgaatccagtatcgaaaaccctccgccgtcgggccctttgaatctccattctacaacgataaaagggagtattttattttatatagtttacttatatacaaggacctaattaattaaaggagacgtagtaattaagaaatataactgaacgatatacttacaaaatccagcaactcataatagagacgtcgagggcgtccagctggtatacttcgtagattctcttgaaattgatccagagaatatcatctccttgcaagaagtccgggtccctgatcctcgctccgatcatctctctaccggtggcgctcatctccatgtacagctgatggaacttgtacatttgtgtgggtagggactgcaccagctcgggcttgacaagcggtttaccgagttcgtacatgtatttcaattatgccttttctattggttcaactcctagcaattgatccgtagttagaccggtgtcaataataaatttttctatcatcatgtcttccctggtcaccaatggctcgatctcctggtttggttgctctccaagctgagggactggtttggactttccagaagatgctttcttcagcgttcgctcatagtccgatagcttgatggcctccttgacaggtgcagacatacccctgaagaagttcctgacactggggtctataggaatcttcttttctagacttcgaggcttgaattgtctcttgacttctgatgcaacgtaagcgtcaagctcctcttgcgtgcaatcgtaccccgggtccttgttcttggcggcatcaattttcgccttcttcgttgcccttgtgtgggcaggcggtggagctgggggggcccttgactttgaaggtgccggaagaggagcttgcggaggagtaggtgtaggagcccgaggaggagtcggtgcaggatcctgaggaggagtcggtgctggagcctgaggtggagacggtgctggcggagcatgaggaggagacggtgcaggatcctgaggaggagatggcggagccggaggagatggtgcacgagacgctgcttgtcgcccagggaggatgatgtaccgcctacgccatagaataatggcatggcttgtgtctcgtagatgcgtctcaccatcttctccagggtaatccagctcgaggttctcgtacgcgccttcgaccaacttaacttcgaccttcgagtatcttgctggaatcgacctgcagtggtaagtacctgaagggtccgttgggatggccatgcccgacgccaccttcatgttgtgagagattatttattagtaatcaacatatataagcagcaactagcggaatggctaaatctagaatatataaactacgagcttacctttattgataagttcttgtaaggaatatgcagctcacatggtgttcgttgagtgatgtcatcaacgagacaggtcgattcgtcctgtatttgcatggcatccatgctctgtgatcctacctgccccgttgaggcgcagctgctacggtttcctgacgggctcaccattgcaggaggaatggtcggctggggatcatgggaccgatgtgcggccatgcgttcatcaaccttccttgccacctcctcttgcatgctgagttcgtagctcgatacccggaaatctagatctgcaatcttcgcctcggtatctctcttgctcctcatccgactcctgtacgtgtggatgtcctccttgaaaccaatcttccaaggaatcacccctttccctcgtgttcgtcctggatgctctggagtctgcagggcgagtgtcagctcgtccctatctctgtccggtcggaacgtgccatgagaggaggcttccactgcatctgttagtcatcgcgcagcctctcgtatctgatcgccgaagaccagtgagccatcagctgggttgagcgttccaccgtgagcatagtaccagaacttcgatcgttccggccaattggcagctgccggttcgatacccctctcaatcaagctagccttcatctcctcccacttcggcatcacgacgctatagcctcctgaccccaagtggtgatggtacttcttcttggcggcattttctttgtttctttccatcatcgcctgcccttgttcacctgtcttatatgcaacgaaatcgtcccagtgatcccttagctttgggaatgtgtcgaagtttggtgtctgccccttcaggatatacttctggtacagatctcccttgaagctctgaatctgttctgccattttcttcagaatccaccttttcactttgtcctctgtacccgcaggaagggtgaatgtctcgagcattgtggtccacagcatctctttctccgaatctgggacaaagctctcatgatctccgcgtgcccttgttcttcgccagtacaccgtactgacaggcacgttatcccgcacaacccaaccgctgtgacgtacatagttcttggcggcttcggccggggcactaggacgtccatcttcttccacttccgttatgatgtgctgaccctcaagcttcttcgctgcacctcgttgcccgcgtgccctcttttgtccaacggagggttgactaccactagcctcctcctcctggttcccctccacatccctttccacgtgcccctgctggttcccctccacatctctctccacgttctcttcctcgtttaagtattggtttggatcctcgttcccttcttcttcattccagtactagctgcttccctccgtgattgtatcgtacaatatctgttcctcatcgcggtcagccatctgttgatacaagaaatatctgctaagtcacgagacatttatgttttaacaatctaagtcatgtatgctaagtgtaaatgtcgtacattagaaccctacacaaccttacgtgctaagtctaattacaaatcgtgatataagctaagtctaggtgacgtatattatacaaccctagctagtaaataattatatagtaagtctaattacaaataaaataatcttatattaaaactcaaataatattacatgctaagactaaaatagtcatgtatgctaagtgtttcgtgcgtatatgctaagtctaattaagactacaatagtcaattgctaggagtcgcaccaattccgtagtcaataattacatactaagtctaatttgcaataaaataatcttatattaaaactcaaataatattagaacactacacaatcttatatactaagtctaattacaagtctaatattcttaattgcattacaaatataacaatcatttatattattacgtcacttgcctgcacgaattccttctagggctagctcttccactccggcttgagggacgactccgacaacacgtcttttctacaagatacaaaaaatatgtattaggataaatgccgtgtaacatatatatattgcatttcacgttcacgttcgttcacgttcgttcgatcgttcacgttccctagctcgttcacgttcgttcgctcgttctcgttcacgttctcgcggcaacgtacgttgacgtgttcgttctcgctctcgtttgttcgatcgttctcgttctcgttcacgttctcacggcaacgtacattgacgtgttcgttctcgttcacgtgttcgttaacggcggtgtggcggcatcacgccggcgcttggcgtggcggcgtggcggcggcggcgtggtgacggcggcggcggcgtggcgttgcatgcggcggcggcgttgcgcggcggcgaaggcagcggcgtggcgtggcggcggcggcgttgcgcgcgcggcggcgaatgcggcgggggggcgtgcctatggcggcgtggcgcggcgtctgcgtggcacggcgtctcatggcgggcggccgacggagagagagatcgagatcggagatcgttgaaaggagaggcggcggcggctctcaccccatagatgcggcggcagcggaggaggcggaggcggcggcgaggacgatgagctcgagacgacggcgagatacggcggcgtcggcgcggggatttgccctaggtagtggcggcgaaggagagaggccgagagagatcgatcggccgaaaacgtttaagtgttggtgaagaagacgagggcacaccgggaatatatatacccctggatctttactcc

SEQ ID NO: 5047 - DNA, 19345 bp, Oryza sativa
ccgcttctcccgttcatcagcaaattcagagcaagaagagttaaagaggagattaaatccactcaaagctcgtgcatgtctgcttattgactatgggcacttaattaaacgcacatgagctagctacacgacgagacatgatctgtttagttggtcgtgctgaaattaaacatcacctgaacctagcctgacagtgcttggattccgtccatgatttatgcagaagtttttcccttgaccgttgctgcagccaaagattcgtgctacgttcattcttggctcgagtagagttcattactactagtacgacattaccaacagcacacggacttaatttgtcccaggatggcgccggtggttttgagtacgtgagatcagttcttttcttcctttgtttttttttctagtttttgggtgtcaatgcatccactataactgtgtttgagaggagacaatagaagattgagaagatacgtaaaataagactagtctttaacacatgatcaattgagtattaattatttttaacttaaaaatatattaatataattttttaaacaacttttctgtagaatatttttgtgaaaaatgtaccgtttagcagtttaagaagcgtgtgcgcagatttctttttcacaataaatctttttctatctttgaacgcagccaacatctccaaagcgcttttccaaagttgtagggtagagacaagaggaagctacggctatatgtgcgtcttttgtggccgtattcatgtgacctttttttcctcctccccggcccaagtaggaacggaatacatggccttcttttcctcgtcgatggccaccgccaacgtgaggggcacgtgacacacggccgttgttgcctagatgcccatgatttgatatgattttgtgtgtgcctgccatactgcaatgctatagcatatgatgcgtggcactgaaagctacgaaaagcacgagcggtatacgagcaagtttaatagtatagcctattatcagctccaattcatttatagccaatccaataaacaattcatataatagttgcttactatactattaatatatgctcccacctgttatacacatatcgtgtcttggagtccgcgctgcagctggctacatatctgtaacccgcttctcttctctctcatattttatcttattaaaatatgtttatagctggctaatagtacctgctctacgtgttcttcgataggagaaaaaaaaaagagaggaaaagatgtaaaaaggctatgaatatgattacgatggcagcccgaattgtggctccagattttaaaacggaagattttcttgactttaaaatcgatttggaaaaaggaaaagagaagatgcgtgtgaccatctccatttgggcccctttaaagtttaccccaaacagggcagagatttgatcgtttttatattgggccgagaattagctttgcaaaggaagagcctaatttgctcggatgcctcgatgctagagaaagttttagacccatcaaaagtatagtggggctccaacatcacatgtcacactggctggcccagggtggatctgtgcttagaacatctgggccttcggacctatgcattggtttattaacccttataaattttcattttttttacttaaaagcaatgtgacaaaattgaagaggaataagttcattttagatcccttgggtacgagttcgattgttgtacttgaaccgcaataatagatagaatggatccctcaactatcaaagccggtgcaatattagttccatggcaatatagcgggtggttttgtatattgtggcaatttgacccgagtcaacagtgttgaatcagcatgggccccacatgtaagggcctcttcactcttcaccactctctcttcacttggacagggagggcgtccatgtcggtaaggagggcgataaaggggggggggcgggggcaaaccagaaccgacgtcgatgtgcgaactgtgaggttgagccgcttggcctcacatgcaagcaacacatccctcttctctcttctccctcttcgcctcgaagccgacgcggtggttatttgcctcgacgctgccgatgcggcagtgatgtgtgtacgcgctcgcttgagcgcggcggcgagcgcgttggagagcggcgcccgtggtaatgctggtgctccgtgcatgtcaggaggcgatcgagggccacgatgaagcagaggttgagcatgcggcactagagcgggtgcggctactcaagccctgccactcaggcgtccctgaggagcgacggctagttggatagcagcacggtcaccgcgtgcagcggcacaacgtgcggcgtgctcgatggcggtggtggaggaggctagtgagcagcttgatggaagggcgaggaagaggaatgccaccgccacctcaaagctccttgccaactcagacaactctcctgcgaagcgcgattccaacaccttgccctcctcctcccctttgcctccacctttgtatcgcacggccatggcggtgatgacaacaacagcaaggacacacattgctcctcccctctcccagctcagggttcacggtgcgccgaggcacctcatgcacggactagaagcaagcagataggcacgctgcctgcgggcttatcggtggcggcaagtgcagcgcgcgaagaggccaggccggtgaccaggggcagagctatagtatgtaggagggggggtgcccaagggccgatcaataaaagtttttagctatacgtcacctatttttatcatgtgtgcactcccgtaatacaaacataggcattggcattggcttaaactggatctaaagtagagtaaattaagtaagtggcaccgctctctatttcgttctatctccgcccttgccggtgacgctccgattcagccttcgttgtgcttcccttctccttcgtgagctccgcctagcctcctcctcttcagctactccctcgttgacgttggagcctccttctcgccggtcgcccacagcagccaccgccggccaccaccagagtcatgcgcagccaagggagagggaggggttgttctcgagggagacggtgacgacactcgagcttgaaatccgctgctagccgcatctggaaaggaagtgccaccggccacatctggggaaggtgaatgggaggagatagagaagagtgaggattcatcttggagccaattatgcttagcaagctactcctcgcaacatatctttagacattacatggaagacttatttccgcgtacacacaattgattttctgattggattgcgttaacatccatgatgcactccttaacatacgcttttaaaaaagatcagtgatactactggagaaatatctttgatgggtcacgtaaaaatcacattagtcccggtttgagtaaaaaccgggagtaaaaatatttttagtcccggtttaaaaacccgcagatactttattgatctttagtcccggtactaaatataatttttagtcctggttcaaaaatatgtcagacccttattatgggactaaagattcatttttagtcccggttatttataccaaccaggaaaaaaaataaaaaaaatcgcgaaaatcccttcaccgacgcgcgcgctgcctcgtgctccccgcgcctcgtccttatcacggcctcctcctctcctcctccactctcttgttctctcctccccttcccctctcctctccctcccccctcctggcctcctccgatgacggcgatggagacagcgggtggcggcccgacagaagctgccgacgaggctgcgggcggcggcctcccctgcggcggttgggaggggaggcagcgcacggtcaggcggccttccctccgccagatccggcgggaggggaggccgggcggcggtggcgacttgcgatttttttttaatttttggaatgagttgtaaattttattatacattgttttagatttgggggatgattttgtggatgattctatgaatgactttgtggattggcatgtgaattgtggatgatttgttgcgcatgatttgtagatttgttgtgcatgatttgtggatgctttgtggggatttgagggtgacgataaatgcaagcaaaaaaaaaacaaagaaagaaaagaaaaaaaaaagcctaaccggactaaagttagtcctggttggtaccaaccgggactaaagatccatctttactctcggttattttaattgggtatctttagtcccggaatagttgtcccggttcgtaattaacctagggctaaatggggctatgaaccgggacttaaaaaaactgttctccagtagtcgactatctaaaatacttaagggatggagtcatgtatcactgaccccagcaccatactttttgtgcttcctctacctgtgacattattttaatcaagttatacgtgcaactcgccgcaagtctgcagaaagttccaaaaattacagatttgtataacatgtcctcttgtcatcggagctttttatttttcatctgagggttttatgttacatatgtaaacttaactgtaccagttaataaattcatttcatccccttagcataaaaaactgtatattgtgacctgaatgaactatataacttataaaatttggtcaattctatactaatcaatactgtggatgccatatatgataaaaatctctcaatatatatatatatatgataaaaagatcggggtgccacgaaaatgattcagtccgtgcgccggatcaaacgaaaaaaaaaaaatcggacactggcttcgctctttcctaaccagtatattatcagtgagtcagcttctctctcactatttttctccttttctcattcacggtgcatgtggcaaatgcatgtcatgtcatgtcttgctggctcatttgcaacttttctctcttcttcaaatgttttttttcttccaaagtaattatccgttctatgacccgtttacaccatcgtactatttacaatttctttgtaacaagatatcacatgattacattctgataaaaaaaattgaacgttgtttcaccccttaaagaaaattgtttttgttcactatataaaatatttcacataaatacaacattagaaaatatcaactgcaacacctaaccacctatatgaaacattgagtctcaaagagtgaaacaagaaaagtcatatgagagatataatatattttaaaaacttgatattgttgaaatatttttatatcacatatgaatatcaaattgtaactattgaaatattataaaatacttgctgaaacattccaagaaaaccatgtacaacattacattccaagaaaaccatgtacaacatttataaattaactagtaaaacatcatgtgtactagctgaaacattaaatagaacatgtgcaacatttgaaataaatctatttaaaaagctaaatattcttttcatcaaaatataaccatgtgtggtcttttttaaaaagatttaattgcaacgaattaaatggtgtaattgcatcataaattggagaaacaatttaagagaaatttaaaaattacttaaaaagacttatacataccatactaatattgtactagacgcatgcatatgcatgtagacttagctatgtggctaactagttgcttcacgtttctgtgtctgctgcgcctgtcacaccctgaaaattcaaaatatataaattgttgtttaattggaatttttagaaataattttaaaagtcttgaaaagaaaatctaattttaattaataaattccaatataaaatggggccagataaaatttcattaaatactttgcttaattctataattcctagatttttctgggatttatttgagctaaggaagtatttttaataaatggaattgcatttaaggaataattttaattgaaaaaggttttaaaaagtctcttttggctttgggccgaaagtcggcccaaaacctctcttctctctcctcggcccaagccggcccagtccgccgcgcgcgcgccctcgctgtcgctgacaggtgggtcccgcctgtcggagtcgtcgtcctcctcgggccgaaaccctagtttcgcgccgccgagctgccgtcgccgccgctttccaaatccggccgttcctttccttctccggccgatttgttagaggggaaacaatctccgggatctcctctaccttttctcctttggaatctttggctcaatcggtttggaatgagtttgattcgagttcgaatcggatcggctttcctctctccaagccgcgagtttccttcgccgttgccgtcgccgtgggcctccgtcgtcgcctccgagcccctttaaaaggatccccgtgctcttctcttctcgccgccaccctcgccttcgcctctcgtcgccggagtagccctagcgccgtgtgccctagctttgccttcgccgccgccgctccagccgtgcgccgccgtcgttccagccatcgccgtcgctcgggaaggccgccgtcgttgtcgccaagtcgtcgccgtcctcgtccgctctttcgctgccgtcggagaccgccggagcatcgtcgccgtcgtcaagccgaagaccgccgccgtttcaacctcgtcgccgtcgccgtccgttggtcgtccgccgtcgctttggtcgtcggtgagttcgccgtgccgtccgctacccgttggtgtcctccgttcgtgccgtagcgccgccgttcgccggtgagcgtgcgccgcccgagccgttcgctccgccgagctgccgccgccgtcggtgacgtcattgccgacgccatcggggccgtttgccgtgaaccgccgtggacccgatcgatctcggccgtccgtttggattggatcgaatctcggccgtccgttcgcgtgaaccgccgcccgtgcgcccggtccacccaaaccctagccgctgacgcaataaatccccttttccttttcaaaaataattcattattgcgtcataattcaatttaaaccgatttaagtgttttaatccgatttaatctttaaaaattcataactaattcatcttagctccgatttagttggttcaagtctctaaatttttctaaaattgagatctacacattaaaaatatccacatgtactgttcatgcttgtttatgtgctgttttggtgattttgctcttttctgcttagattccgtcgtttccggagagtccgttttcgcagaagaagagtttgaagagttccaaggccagcaaggcaagtcacacagatcccaaacaaccctttgagcatgttgatcctatttaaagctattgtttcttttcaactattgcatttattttcgaatgtcattgggtggaattaacctattgattgttatagcccttttgtacttgattaccttattccttgataccttgggttattacaatttgactagttgagctttatttatattggttcaactagatattagatataattgcttagccctgcttagaaacattagtacatttatgggataactaatgactcactattatttcatgatggcttattgatagttcacgatggtcaatcgtgattagttaattaattaatgtgccaactaaaacctgataatggtgggttgtgggcacatggttttgatggtcgtgctcatgacaattaaggaccggttcacgagtttcggttgtgaaacatttatcgtgccaaccacaagccagcatgggcaacggctttatcttttgtatagcatggttcattgcggggcaccagactgagaagtggcggagataagcccacgggggtcgctggggagtccatgccttgtttataagggggtgattatgatccaggaaggtgcgctgcagtgaattgtgttatgcgaggggtattgtcacaactcctttccgagataccgtggtggtattgaggcacatggtgacatgatgtggggttgtgtcttgtgggtacagtggtacacctctgatcagagtaaaactattcgaatagccgtgcccgcggttatgggcgggtcgaacaatgtctttcgtgattagtctcacacctctcattataataaaagatgcttaaactgataataatttgattagctcctggtttggaatggtacattcctggtttggagatagaactgtgcagccggggtggttgttcagaatggttgggcctatacaacagggtatgttgtatagcgttggattaatattgtttaattacttaactattttattaaattctcaaatgtttgttaaatgctgcttttgcaaatgcaaccctattatgccatcctttgttatcctgtgcacttgcatatttgctgcgtggcttgctgagtatgtcatatactcaccttgcaatcattcatcagaggaagaattctacaatgaggctgatggtgtggaggattaggtgtagccttggtcaagctgcctgtggagtggagccgtctgcgccgtttattttatttttccgctgcttagatctttattggttgagaggaactatctacctctgtaatgacattttattcgcttattaattagagtaatatttgtactctattatcaatttgttattgtgtgcctcggctgattcctggacaagggttcacacacatgtaagcgtttggaattttggatagaaattccgggcgtgacaagttggtatcagagcctctttgaccctaggttatgccaaatggttatccatagaagccctctaaaaatattggaaaagtagaactgttcttctccctttctcttttaattaaaccaaactaatggcacatgcacttcataatctcttttaatggttctcattcaaaatttattccagtgttattagtactgtacatctattactgtactaatggctcattataccagcaaaagttttacaatactgttttatttaatcttgctgcaataaaataaatttagcatgttgattttataattttcttttatttcttttgaaacctattgttcaaaagtactaaaattgtaaccttgtttccaactatttcaacttattttgcaagcttggtttaccttatttacttccctttttactttgattttctaactttattcaaattaatccaaaaacttgtgctattaattggataaaggacttaactccctcctttcacttgtctttagatgccgcgttacaagcctgagtacctgtttggtgttgagggttttgtccaggagttgcgtacaatgtcctttgtcattggatttgggactgcccctttttatgcccagattcctcatgatcgtcatgaagagaagtgccgagtcaaagtcactttgaacagtaatagtgaagatatcccctcagtgatgtttgaagctggaggaagaaactacatccatgcatgtcaggaggtggcaaggatcgccataggagagctccgtgatcgctacagtgatcaattggccgacactgagtatcgttcccatcctcgtcaaccccagggaagtgaccgtggtagttaccttgagactgaaggaattgagaatgatgctaccacgaagcatttggttgagatgttgtgggctatggatgaaagtcgtgcggagattgtgttagcagctcaagatcgtgaagaccggaatcgtggtaagatttgcaagttagaagacaaggtggatcgtttggaaaaggaattagccgcattgaagggagaagcaccgccgcagaaggccaggattcgtctcaccgcaaggaagagagctctatttgtccctcgctatcaactggcgccaaaggttcgtgtggtggagaaagaagttgccccagctcaagcggatcctccggtcatcatcataagtagtgatgaagaagaagaatccaagcgcaaccattccaagattgagtgggtagcaacccaagatgatgaagacgagccgaacgagccttcaatcgacctccgatgcttggaagaactagagtgacttgttaagtcgttgtcttagatcgttgtgttagtttgcttgcttaaagtttgcttgtgtgtggctcgcatgtgatttacatcagtggtgggatgtaagtgcatgcgtttgtttgcttttgagtgttaggaagttggtgagtttagtggtgtgagagtctttagtttgtaataataaaactcagtcaagatcaataaaagttaaagtaattctctgttctaagtagtttcccccgttttctcttcttgtgccctgtccatgccagatggtgaatactcgcagcaacgggattggtcccaacaaccccaataacaacaacaatggagagaatcccactctagctcaagttcttgctcaacagacacaacttatgaacatgatgatgcaacaacttcagaatcagcaaaaccaaggaaataatcatgcacctccccagaacaagttagcagaatttcttcgtgtgaggccgcctgttttctctagtaccactaatcctgttgaagctagtgattggctgcatgccatagagaagaagttggatttacttcagtgcactgatcaggagaaggtatcatttgcatcacatcagttgcatggccctgcctctgaatggtgggatcatttccgccttaacaggactactgctgaacctatcacttggcttgaattcaccgctgctttccggaagacgcatataccatcaggagtagtgtctctcaagaagaaggagttcaggtcgcttactcagggatctcgctctgttacggagtatctgcacgagttcaatcgtcttgctcgttatgctccggaagatgtgcgcaatgatgaagagcgccaggagaagtttttgggaggacttaatgatgagctttcttacccactcatggttggagattatcctgatttccagaaattagtggataaggctatacgtcaggaggacaagtacaattgcatggagcagaggaaacgtcggattgctcacttcaaggcacaacagggaaataatcagaagccgcgtcttactttaggaccccagtccatgccacatggaggttcttcgtctgttgttcgtccgcagcgtcagttcttcaacaacaatgctggcaacaacatccgtaatcaagctccacgtcctgttgcagctccagcacagcaacaacctgccaagagggagcaaggcaacaagcccgtggtgtgtttcaactgtggagacccaggacattatgctgacaagtgtccgaagccccgtcgcgtgaaggttgtccctgcccagaataactctgctgtaccagcatcaaaggcccgtgtcaatcatgttgcggctgcagaagctcaagatgctccagatgtgattttgggtatgttccctgttaactcagttcctgcaacagtgcttttcgattctggtgctacacattcattcctatctatgagttttgcgggaaatcatgggatggaagtagaagaccttagacgtcctttgatggttagtaccctaagtgatcaagcactttctttgcaacgtagcccctctgtcagaatagaaattcaaggagtaccatttctggccaatcttatcttgttagaatccaaagaccttgatgtcatcctagggatggactggttaaccagacataaaggtgtgatagactgtgccaacaaaaaagtaactctcaccagcaatgttggtcgagttgtaactgttcatgcattgtcatctgagtctttaaggtcaagactgaaccagataactttggaagagattcctatagtccgggagtatcctgatgtgttcccagatgatttacctggtatgccgcctaaaagggatatagagttcagaatagatttggtacctggaacaactccgatccataagagaccttatcgaatggcagccaatgagttggcagaagttaagaggaaagtagatgatttgctacagaaaggatacatcagaccgagttcatcaccatggggagctccggttatttttgtggaaaagaaagaccatactcagagaatgtgtgtggactatcgtgcactaaacgatgtgactatcaagaataagtatccactacccaggattgatgatttgtttgatcaacttaaaggtgccactgttttttccaagatagatcttcgatcagggtatcatcagttgagaatcaaagaggaagatatacctaagacagcttttaccactaggtatgggttgttcgaatgtactgttatgtcttttggacttaccaatgcccctgctttcttcatgaacttgatgaataaggtgtttatggaatacctagacaagttcgtggtggtctttatagatgatattcttatctactctcgaaccaaagaagagcatgaggaacatcttcgccttgcattggagaagctacgagaacatcaactgtatgctaagtttagcaagtgtgaattttggttgtctgaagtgaagttccttggtcacgtcatctcagccggaggagttgccgtcgatcctagtaacgtggaatccgtaaccaattggaagcaaccaaagacagtttcagagattcgcagtttcctaggcctcgcaggatattaccggaggtttatagagaatttttccaagattgctaagcccatgacacaactgcttcagaaagatgtaaagtacaagtggtcgaaagaatgtgagcggagttttcaagagttaaaaagtcgcttaatatcagctcctattttgattttgcctgatccaaagaagggttttcaagtgtattgcgatgcgtccaaacttgggttaggttgtgttctgatgcaagatgggaaggtggttgcctatgcatctcgtcagttacgtccgcatgagaagaactaccctactcatgatattgagttagctgcagtcgttcatgcattgaagatttggcgtcattatcttttcggtactcgtacagaagtgtataccgatcacaagagtttaaagtatatctttactcagccagatctgaacatgagacaacggagatggttggaattaattaaggattatgacatgggaattcattatcatccgggaaagactaatgtagtagcagacgctcttagcagaaaaggctattgcaatgctacagaaggacgacagttgccattggatttatgcaaggaatttgaaagattaaatttgggaattgtcggtagaggtttcgttgcagccttagaagcgaagcccactctaattgatcaagttagagaagcccaaattaatgatcctgatattcaagagatcaagaagaatatgagaagaggaaaagctattggtttcttggaagatgagcaaggaactgtatggttgggtgagagaatctgtgtccccgacaacaaagatttaaaagatgcaattctgaaagaagctcacgatactttatactccattcaccctggtagtactaagatataccaggatctcaaggaaagattttggtgggcaagtatgaagcgtgaaatcgcagagtacgtagcagtatgtgatgtttgtcagcgagtcaaggcggaacatcagaaacccgccggtttgctgcaacctttgaagattcctggatggaaatgggaagaaatcggtatggattttatcactggtttgcctagaacgtcatcaggccatgactctatttgggtaatagtcgacagacttaccaaagtggctcattttattccggtaaagacaacctattccggaagtcgcttggcggaattgtatatggcaaggattgtgtgtttgcatggcgtccctaagaagatagtgtctgatcgaggcagtcagtttacttcaaatttttggaagaaacttcaggaagagatgggttctaagctgaactttagcactgcttatcatccgcagacagacggacaaaccgaaagggtgaatcaaattttggaagacatgttgagagcttgtgctttagatttcggtggaagttgggataagaatctaccttatgcagaattttcgtacaacaacagttatcaagctagtcttcagatggctccttacgaagcactgtatggtcggaagtgtcgcactccgcttttgtgggatcaaacgggagaacgtcaggttttcgggacggatatcctaagagaagcagaagaaaaggtaaagatcattcaagaaagattgcgtgtggctcagtctcgacataagagttatgccgacaatcgccgcagagatttgagttttgaagaaggagactatgtgtatcttcgtgtcacgcctcttcgaggagttcatcgttttcacaccaagggaaaattggcaccgcgttttgtgggaccttataagattgtcagtagaagaggagaggtcgcttatcagttggagttacctcaatctttggcaggagtccataatgtgttccatgtgtcgcaattgaagaagtgtttaagagtacctaccgaagaagctaatcttgaccagataagtgagagaagaaccaggaatcgagttatccgtttttgcaaagtccagtggagtaatcactcggaagaagagtcaacttgggaacgagaagatgaattgaagtcagctcatccgcatctgttcgccagttcttccgaatctcgaggacgagattctgtttaaggggggtaggtttgtcacaccctgaaaattcaaaatatataaattgttgtttaattggaatttttagaaataattttaaaagtcttgaaaagaaaatctaattttaattaataaattccaatataaaatggggccagataaaatttcattaaatactttgcttaattctataattcctagatttttctgggatttatttgagctaaggaagtatttttaataaatggaattgcatttaaggaataattttaattgaaaaaggttttaaaaagtctcttttggctttgggccgaaagtcggcccaaaacctctcttctctctcctcggcccaagccggcccagtccgccgcgcgcgcgccctcgctgtcgctgacaggtgggtcctgcctgtcagagtcgtcgtcctcctcgggccgaaaccctagtttcgcgccgccgagctgccgtcgccgccgctttccaaatccggccgttcctttccttctccggccgatttgttagaggggaaacaatctccgggatctcctctaccttttctcctttggaatctttggctcaatcggtttggaatgagtttgattcgagttcgaatcggatcggctttcctctctccaagccgcgagtttccttcgccgttgccgtcgccgtgggcctccgtcgtcgcctccgagcccctttaaaaggatccccgtgctcttctcttctcgccgccaccctcgccttcgcctctcgtcgccggagtagccctagcgccgtgtgccctagctttgccttcgccgccgccgctccagccgtgcgccgccgtcgttccagccatcgccgtcgctcgggaaggccgccgtcgttgtcgccaagtcgtcgccgtcctcgtccgctctttcgctgccgtcggagaccgccggagcatcgtcgccgtcgtcaagccgaagaccgccgccgtttcaacctcgtcgccgtcgccgtccgttggtcgtccgccgtcgctttggtcgtcggtgagttcgccgtgccgtccgctacccgttggtgtcctccgttcgtgccgtagcgccgccgttcgccggtgagcgtgcgccgcccgagccgttcgctccgccgagccgccgccgccgtcggtgacgtcattgccgacgccatcggggccgtttgccgtgaaccgccgtggacccgatcgatctcggccgtccgtttggattggatcgaatctcggccgtccgttcgcgtgaaccgccgcccgtgcgcccggtccacccaaaccctagccgctgacgcaataaatccccttttccttttcaaaaataattcattattgcgtcataattcaatttaaaccgatttaagtgttttaatccgatttaatctttaaaaattcataactaattcatcttagctccgatttagttggttcaagtctctaaatttttctaaaattgagatctacacattaaaaatatccacatgtactgttcatgcttgtttatgtgctgttttggtgattttgctcttttctgcttagattccgtcgtttccggagagtccgttttcgcagaagaagagtttgaagagttccaaggccagcaaggcaagtcacacagatcccaaacaaccctttgagcatgttgatcctatttaaagctattgtttcttttcaactattgcatttattttcgaatgtcattgggtggaattaacctattgattgttatagcccttttgtacttgattaccttattccttgataccttgggttattacaatttgactagttgagctttatttatattggttcaactagatattagatataattgcttagccctgcttagaaatattagtacatttatgggataactaatgactcactattatttcatgatggcttattgatagttcacgatggtcaatcgtgattagttaattaattaatgtgccaactaaaacctgataatggtgggttgtgggcacatggttttgatggtcgtgctcatgacaattaaggaccggttcacgagtttcggttgtgaaacatttatcgtgccaaccacaagccagcatgggcaacggctttatcttttgtatagcatggttcattgcggggcaccagactgagaagtggcggagataagcccacgggggtcgctggggagtccatgccttgtttataagggggtgattatgatccaggaaggtgcgctgcagtgaattgtgttatgcgaggggtattgtcacaactcctttccgagataccgtggtggtattgaggcacatggtgacatgatgtggggttgtgtcttgtgggtacagtggtacacctctgatcagagtaaaactattcgaatagccgtgcccgcggttatgggcgggtcgaacaatgtctttcgtgattagtctcacacctctcattataataaaagatgcttaaactgataataatttgattagctcctggtttggaatggtacattcctggtttggagatagaactgtgcagccggggtggttgttcagaatggttgggcctatacaacagggtatgttgtatagcgttggattaatattgtttaattacttaactattttattaaattctcaaatgtttgttaaatgctgcttttgcaaatgcaaccctattatgccatcctttgttatcctgtgcacttgcatatttgctgcgtggcttgctgagtatgtcatatactcaccttgcaatcattcatcagaggaagaattctacaatgaggctgatggtgtggaggattaggtgtagccttggtcaagctgcctgtggagtggagccgtctgcgccgtttattttatttttccgctgcttagatctttattggttgagaggaactatctacctctgtaatgacattttattcgcttattaattagagtaatatttgtactctattatcaatttgttattgtgtgcctcggctgattcctggacgagggttcacacacatgtaagcgtttggaattttggatagaaattccgggcgtgacagcgcctgcacgtatagatggccatatggctcgaggcccgatggcctggcgcaaggcccggtgatttggcccgactcgggtcgtgtccgtgccagcccggcccaacagccgtgccctgcttgggctcctacctcgacacgctgggccggcacggccctgcacgaagtttagggatgcaaaacaaacttattttcaaccatatgtaaggcacaatacaaagaatagggagaaaaaatagacgtattatatggcatggcccaaagagtagggacgtaaaatagacttatttagctttatatatgtcatagcccaaaaaggagggaggggaaatagacttatttcaaagaaggcacgatgggccgcccgtgccttcgggctggaatggcacaaccaactactggtgggtcgtgcctgggcctgaggtgcagcccgtgggctggcacggcttgacctaaagtaccgatcgtgccgtgccggcccgatcgcctcggtccgtgcctagcccgtgcctgggctaggccaggtcgtgccgggcgagccttatagccatctatacctgcgtgtgtgacaggctaagatgggcatctacgcatgtgacagcggctaaggtggtatttgattttttagcttaaaatcgggtgcccgatccataatttttttatgatcaaagttacaagaaaccacaggtattagacacatgagacttacctcaggtattaatatatatggttttaaaatttcacaaacccccacccttgtgtatttgagcgtgaatttactcaaaatttctaaatcgtagagtttatatgaaatttgtagtcattaagttcttgacttggtttgatagtttaaatcttcaccactttaaaaaattgtttaagatatgctgaaattaatcaggatttcaataaaggtggggttttgtgaaacgtttagaccataaaaacgtatggttttgtgtcacacgtcataatacactagtacagatccttctatctgtgacgggctctaatatgcttagaaatagtgggccgtcacaaggaagtcatctcaatcgggccgaaaagtgcccgattgagatatggtcgcacagacatgttagatgtgtataaaatttaagtccgtcacggatgacacctatcagtgacgggccacaactttaggcccgattgagataacattccatatcttaaatgggcctcaagttgtggcccgtcacaaatgaccatcatctgtgacgtgcaccaacttgaggcctgtttgagataacaactaggcccgtcacagatgactcatcagtgacgggctatatacttaatctctatcgggcattaactaaagcccgtcaccgatgactatttttccatttttcatatgaaatgtttatatttgtaagttgactatagcaaaataattttacgggtagtaaatgatttcaaatggaaaaaatgtcaacaacaaagttgtataacttatcaatatttagaacttttagtttggtcatttttcaatataacattttttttgaacagtttgaatttgaatttaaaaatatgacaacttcaaacaacattttcaaatactaaatgatttcaattgaaaaagtcatcaacaacaaagttgaataactcatcaagatctaaaacttttatttttgttatttcttcatctgacgaaatgttagtaatattattcataaattttacatatatgtgttatagttt

SEQ ID NO: 5048 - DNA, 26138 bp, Oryza sativa
  unsure (1)..(26138): unsure at all n locations
gggggaaggtttttgacctcaaatctttgattgggttccatataaaagtgtagagctcgttctcctccttcatttgcttccatttttttcagttttcatcggtggaatacgaagaaacttgcacttttataaatggaatagtgtaggcacctttttgtttttttattttttaagcaaatacatattgcaatcttttacatgtttataaaagtaattagcacctaaattgaaacgttgggtttgcctcttaagtttattttcatttggatgaaaaaggacgaatatttttattttttagaaatggttagacaatattctattaatgcttaaaattgatgtgcggctgtttaaatagtccgttcaactttaaattactacgtgattagttccctccaatttaaatacattcgtgtttgaatcaggcatggatgtattaatggcaagctttattgtagatcatggatcggacatggatgtacaacacgaaaagagctcatccaacgttcttgaaggaagcagccaaatttgttgagctcacaaaggcacatgctgcgagggagaatttgaggagcattttttgcccatgtaaagtttgtaagaacgagatcttgctgcaagatccgaatgaagtattgtcgcacattgtagaacgaggatttaagaagggatacgagatatggacttttcatggggaagccggtggtcgtaacgaagagttagatgatttatgttttgatgatgcagaaaattttataatcgaagacatgtcttagggaaacatcccggaatacggtggctcaggtatagagaatgaaggtattgattttgaactggaagatatgttgcggcacgttgaaccagaggtcctaactggtacaagacgcgggttggacaattgggaagctttggaaaattcagcgaaggagcttctgtacgacgaagccaaaggatacgacaaggactattcagtcctgcgctcggtgctcgaacttctcatattgaaggccagacatggatggttggacacgagcttcaatgatttgatggatcttttgagagtaatgcttcctaagccgaacctgctaccgacgaacacatatcaagcgaagaaattgatatgtccattgtctctaggtgttcagaagatccatgcatgtgaaaatcattgcatactgtaccgcaaggaattcgcggatttagactcttgcccaacatgtgggacgagtaaatacaagacgggcaacggagcctccgatggagaggtggtcgacaaagatgatgcactggtggatgagaacaaaaagatttctaggatggtgatgtggtacctgccagttaaagatcgcctgaagcggctatattccaaccgagacgacgccgagttgatgagatggcaccaagagggtaggaaaattgacggtaagatccgacaccccgccgatgctcgacagtggaaaaactttgatgcactacacccggaatttgcaaaggacccgagaaatgtcaggtttgcattgagcacggatggaaagaacctgtttggtgacctaagcagcacacacagcacctggccagttcttctaacgatgtacaacttgcctacatggatttgccagaagtgaaagtacattcttttgtctgtccttatataaggtccaagacagcctgggattaacatagatgtgtttctggaaccattgatggaggacatgcaagaactatgggaggaagggttacgaatgtgggacgagtaccgtagggaacatttcactctgcatgccatcatattcgttacgatcaacgacttacaggcaaacttttcgctctcgggccagtttaaggggaagttcggatacctcatatgtatcgacaagacgtcgtacaagtacctcacctcgtcaaccaagggtgtttacatgcgtcatcgtcggttcttacctcagaggcataggtggcgtgcgaaggccagattattcgacaatacagtagagaactttctagctcctgaaacacgtacaggtcgttctgtcttcgatttgacaaagaagaagcccgtcaagaggaagaaacgtacggatcaggacacaactgatgcacctttagaggaaagtaaccagtccttcaagaagcactcaattttttttcaggtatcttgattactggaaagacctggaggttcggcatgccatcgacgtaatgcaccttgagaagaatgtgtttgatagcaccattggcactttactggacatcccgagtaagacgaaagatgggttcaagtcccggaccgactttgtcaatttggacataaggcatgagcttcacccaaaagagctgccaaatgggaagatcgaaattcctccggcatgctactcactaacacctgacgagaaaaaatctttatgtagatgcttgcatagtgtgaaagtcccgactggtttctcagcgaacgtcagaaaacttgtatctttgaaagatttgaccatctctgggtacaatgctcatgattgtcacaagatgttaacagtcttcctacccattgccataagagtggtcaagccagttcacactcagttagtgataacaaagttgtgctaccttttcaatcgagtatcacagaaggtttttgatcctgaagagttaggcccccttcaaacttttgcaatcgagacagcatgccagcttgagatgtttttccccccagcttacttcaacatgatggagcatcttattgtccacatcgtacctcagattatcgagattggtccactatacctacaccagatgtgggcgtatgagaggtacatgtccgtgctgaaagggtatgtccgtaaccgagctcatccggaaggatcaatgatagaggggtacacaactgaggaggtggtcgaatgctgcatagattacatgaaggacgccaaacccatcggtgtgaccccccctttacacgagggccggttagctgggacggggatcgtaggcaagaaaaggttctacgatgaggacttcaaagatgtagcggaagcacatagcagtgttttgcaacagctcgccatcttagagccgtacattcaggaacacatgaacgagataagagcctgcaaccctagaagaacggacatttggatttgtaaagaacagaaatggaaatttcctgaatggttgtaggagaaagatctgccgttgggtgattcgctggaggaaaaaactttgcgcaggctagcaaatggcccaactagccttgtgacctcatggcaagggtacgacatcggcggatatagattttacacgatgttcaaggacaggaaaagcgcagctcataacagcggagttcgggtggaggcgtttgacgcatcaggtgagaagaagtcttactacaggatcatacaagacatttgggagctggactatggccttaacatacagatcccggtgctacgatgccaatgggtcagagacacaacatgcgtattcatcgatgactacggcctgacggttgtggatcgtagcaagctaggacacaaggatgatccgtgggttcttgctgagcgggttgctcaggttttctatgtcaatgacccttccgatgataagatggccattgctgtaccaggaaagcaaaacattgttagcattgatagcattgaagacgtgtcagattacaaccaatacgacgacgtccttttgtttacagattttcctaaccggatcaccggatcaaggaagttgagacaagccttgacgaagatttgtttttgtccgcgcggaaggatggtgtttccaaaattgtcaaacattagtgagatgtcgatcctgtgtactacctattttgtaaacgattactggatgaaacttatattgcgaatgagatagggtatccatgtttatccgtactatatgtcgttttgaatttattttatggtccaatattttatttatattaatcatatcgatgaataattagatgcgaataaaattcatgtctgttttaattctttgttaatctatatttgtgttttgaataattcgtggtttaattaacccaaaccaatattaatttattgtttaccgtgatattaataattataattattaattaactataacttagatgggaatataacaaataattaactatattgcattgtgctatagcaaatatatacattcccatcgaaattatgatttttttaataaaaaaattggagttattaactaataggctcctctcctcctcttctcctccccccacgccggcgcctacttttcttcttcctccaccgacgccgctgaccttcttcaccggcgcccaaaaccccacgcccccgccgcctttcctcatcgtctccggtcgccgccggccagatccaggccgccgccgcctttactgctcttgtcctccccctcaccggcggcttctcttctcctacccatcccttcgccggccctcctctactcctacccctgggatctgcgccggcgaccacctngcctctacgccggcagccccagatccgggccgagcgcctgctctccacctagacctcgccggcgccgactcttctacacctcgccccttgtagccgtctcttttaacctcgccgtcgccgacggcgtcttctcgtacgacacaccgaccgggctccgccgccgagggctcctgcccggtcttcaccgacgccggcactgtctactacaccgacggccagatccgggtcgacgccggcctcttctcacgccttcaagaccaacgccggcgttaggagcaacgtcaagccgcgggcctcgccgacctccccccctcggcgtcaagagcaccgccaagccgccggcctccccgaccaaggacgccgccgtcatcctccccaagccggcgccgtcgtcctccccaagcagccgccggccacgtcgccgccaagccgcggccggccacctccccgcaaagccgccggctgcctcctacttcctccccaagcctcctcgatccaggtacccctctcttcgccgcccctccttttttggatgatgcaatggtaatggatggaatgatgcagtggaatggatgaatgatgcagtggatgatgcatgcagtagatgcaatgttgaatgaaatttttgaatgaatgaatgatatttggttgaatggatgaatgatatgttgatttgtgatgttgagatgatgatgatatttgtgatagatagatggttgtttgtgatagatagctgatatgtgagatgatgatgatatttgtgatagatagatggttgtttgtgatagatagatttgagatgatgatgacatttgtgatagatagatggctgtttgtgatggatagatgatatttgagatgatgatgatttgtgatagatatataggacttgtgctctttgtgataaatagatgtatgtctacatgggatagatggatgttttatgtcactgtgggctgtttttttttctacacatgatgaaatatatgcccctgctgaaatattttgctaattttgcaaatgatgctgttatgcccctgctgatgttgtgcatatacatgatgaaatatattttgcttctatatgtttatatatatgtgatgtacatatatgctgtttacacttgtttgtactgtatattttgggctgttttatgcctcattgtggttgatacatgtgggtgattgttgtgggtgatatatgtgggctgatttatatgtgggtgatatgtgggctgttttatacttgtggctgatatatgtgggctgttttttgttggtgataaatggccaatgatgaatgcttaagaacagatcatattgtgaatttttttggggggcacttcacttgtttatttatcctcaagaacagaacaactacacttgtgaagttttttttggggcacttcacttgtttatttatgctcaagaacataacaactacacttgtgaaatattttggggggcacttcagttgttttttttgcttgagaacagaacactacacctgtgaatttttttttttttgggggggggggccgcacttcgcttgtttaataatgcttgataacagaacaactacacttgtgaaatattttgggggcacttcagttttttttttttttgcttgagaacagaacaactaaacttgtgaattttttgagggggcacttcacttgttttttttgggggggcacttcacttgttttttttgcacataagaacagaccatctacacttggggttcatgatgaataattgctgagcaaaactgaggccatatgctttcatagtgtgcatagtgatgaatatccttaccaatcttgaaatcgttacccatcttacgttccttaccgatcttgctttccttaccaatctcctaaaattagatataggaggtgtagttcgtacgttatcatgctgctataatacgaagtgttctggttgccaagttctactagtcggtttagttgctggacgcaaccgactagtacaaattggaaaaacagaacatttcgtcaacatatgacatgcgttggtcatccataaaatgtgctagcacgtatgttgaaagatagacctctgacttgtacatgcgtcggcctcgtggatggaccaggagctcgacgttccttaaggccgttctttccgacccatacaaggttccgtcgcctgcattgttccaagagtgtcttggacgaaagcaggaagtggaaccttgttaaggtcggaacgaactgccttaaggaagtcgatgctttaggtccgtccacgaggacgacgcagctaggagttagaggtttatatttgaacacacgagctagccatgtgatcaaaacatgtttttattttgctgttaatatgatagtttagtttagtggttatgatagtttagtggatttgaacgaatattaaattgtaagaacgcgaatcgaagatgtcgggcaagacagctccggcgggcacagaaccgacggtcaataaacctaatgggtaggacagctccgtcgggcacagaaccgatgtcactaacaatccccaacacgaagaagatgtcgggaaggtaccgacgtcgagcaaggaatcgtgatgcacaccgagcgactcgtttgagctagaactagcgcaattgcagtatgaaagacctgaggatgacccggattatattcctatcgagcaggcggtaataactgaatcctgtcgaaatatatatttggaattaaactttccccgatgtagcggtctaatgacttaaccgtgcagatggcaacccgtcgtcggtcaaaactaagtgccgtcagggttgaacctgattcagacacaacgacctcgggaccaccgcgaacggacacgacgatgagtgggggagcttgtccaaagaaaaagcgtggcgagaagggcaggaacctcatgccgaaggagacgtactacattgctgctctcgatgttgacggcaaacccgtcgagccgcaacatgtaagggtgaagtttagcaccgcatgcggcgcgctggcaaggcttcatgggcctctcaacgtggacgaatggaagcatgttagcattcacatcaagaacttaatgtgggaaggtctgcaggagcaccgtatttatccgcctgagtcggaggcacttggccggaaatttgcactgcaaacaattgcccatcggtggcgacaatggaagtcggacatgaacaccaattatgttcagaagaataagactccatttgaagaatggggcaccatttcagcagtgagtgggacaagttcgtggccaagatgacgacgcttcaagctctagaaaggaggaagaagatgtcggacctggcgaagaagaacatatatccacacaggttagggtcaagtggatgcgccggtcacgagaagaaatggcgaactacggaggaaaagtttgcggccgaaggcaaacctttgattgtgcagcccctagataagcgaactagaaattgggtgtgggcaagaacttcgagatgctgttggactgtccagacatccagaacgtgaccacgtctctccaacagatcgtccagaaggagaagaccggtgagtttgtccctcgacggcagcatgatgagctgaccgaagctttgagaactacagaacactccggtaggttagaggacagtcgtgcatgacgaattggaaggtagggtttccacaggaagcccaaagttacaagaagcgcgatgcctacaaggccaagatgcgccaggaaatcacaaatcaagtcacacaacaagtcacccaacagttctacagtcttgccgcacaacatcctcaagccttccctgacctggttcctcatggtttgcagtcgacacagatcctaagctcagtcgggtcggtagaaaatacaacctacccagtagatagtataactggtccgacaccgtgcagctttgtcgttccgatagggagagcgggaaaaacgaaggaggttgcgtctggattggcgataccggggagacagttccataacagcctaattccggcggactacgtaagtgttcaggtcgcacttgttcatggcgaccagatgtcgttggagcttgacatcccaacaccagaggggattgaacttctcagggatgcggttaaccagttcatactctggcatcgtcgtgacatcatcctcactggacagttcatgtcgatgacaccagctccatcggtgccaaatacgtctgcacctcctgcaccgccgtcccctccgatctgcactaccccacccggatctccactcccacagatatcaccacttagaggtccttctccacctccacaacaagtagcacctaactccccaactaccctacctcggtagccgtctcctgctcctcagtcctatcttgctccaccccttgacgaacatgtgccacctccacagccagatacatcaaaggagcagccaaaaacctgtgaagcccgcaagctcatacccgttatggtatccacatacaacaaggagaaaatggcagagtgtgagacgcggatggttttgcaatctttcaagggtcgagggggtccgctaaagccagttggacctgatcagtattcggacgcacagaagagcgttgtaggtcttgctgacaaaatgcaatcttggacctccaatgaagtgcctaaggagtatgaatatggcaagccgtttttgccgttcaacttgatgtgtgaactcccatggccaatgaggttgatgcatgagtggtacttgagggcaagtgagttaggtctcgggatgattactgtgcatgtcccggaaggcgctttcaaggatggacctaacgcaaacttcgcctttagtttcaaggacctccacgcactctttaagatggataaaatggatatcaatctcgtcggtgcgtggtgcctataagcattccatgtacttcgttattccaatgtgtgccaatataattgttagttattctaacttccaaatttcctcatgtcacaatgggtagacgctcaaagaacggggaccttaatcggttacgtaaatccaacgatggtttgcgagacggcccacactgtgcggatatcggaggatagtgcggtactaaagaataagacacctcaggagaaaaaagattacatcgagcgtatgcgtaagagaaagatggctgaggtgggaaattacttggccacctcatttctcgcacactccgacaaacgagtcatcatggtcccctaccactttgggtaagcaactttgacatatttccgttcacatattaataacagcgcaagaaaatgtcttatgtaatttcataatccgtgttcacagcgaacactacatactattcctcgtctatccaacggaccaaaccgttgtagttcttgatccggcggactatgacaaggacgcgtacatggagttcctatgcttgctgaacttgtaagttcgaaacaatttccgtaaagattccaactttccgtaaagatcattaaagtagatttatcataattaattaatttatttttgtagagcacacggccgttataagaaacgtggcgggtacgttaagaatccaagtagagagaaactgtacataaggggacactggccggtatgtcagcatttattcagtacgtacatcacgattgtcacttcttacttctgacgtgtccacttgtgtatgcagtgttataagcaacctagctttacgaacctatgcgattattacgtgtgcgagatgctcagggtcaatgggagatacaattgagtttacagatgtaagtcattaaactctccttagatattgcaaatagttcattaaacctgactgtaacacaaatcatttgtcttttaatttcgtagctcccgagtatcccttatagtgcaagccggttcgatcagaaaacacttatcaacttgtgcgtggacttgtgccggttcattcgccgcgacatctgcaatcatttaggagagttccatgatcctcatagcgaacttgctacggaccccaaattcaagaatctaagagagtgggagaggcaacatgctatggactaaatggatgtatttgtcgtgggggatgcttgtaataaacactatactttttatgtaatatgatttaatttgatgtttcggctaattttcggctaattttctatctattgtctcgtgaggtcaaattatacaaaccgcacgggataataggttatcccagatggctagcacgtgctagccgtggggggtaacatattatcccgtgcgggccacttaatttgaccgcacgggaaaatagattatcccatgcggttggccttattgcacaggggataatcgattatcccgtgcggtcggcccgcccgcacgcgaaaataaagattttcccagacgatgagctgcaggcgggccgggcgaccacaggggataatctatccaaccgcccggaataatgggtattgtcgtagtgtccggtgtaccatctagtatatgtaatcttttgtctaacaagactctagctggatgatttctaaaagtaaagagaaaattcgatccatagcacaggaaagaaagcggtaccaaaaaatagcacaaaaaaaattccactttcgatccatagcataggccactaatttttcttcgccccgtagcactttcatcgtatttggaagtaacggcgttagatcggagtggagaaaattttcgtcggactcatttgccctttgttcccccacgttcccaccacgtctcatcttctgctccttcgtggatggcggtgcggtggccatcagcgtgccgggcaaccgcctcgtctccctgccaccgccgagcgagctgcgacgtgcactcttcaacaacgtggacgcgtggctcgccgttgccgccgagtcgaagaccttggcattgtggtgctcgtcgaggaggatgttctccggcttgatgttgcagtggacgatgcagtcgcgacacttctcgtggaggtaggtgatgccacgggcggtgccgacagtgacggcaaaccgcgtcggctacgacatcttgcagcccggcgcgtcggtgaagaggaaggcatcgagggagccgttcttcatgaactcgtaggtgagcaggcggtggcgtccctcggagcagaagctgatgaggcggacgaggttgaggtggtgcgtgctgctgatggtggccacctccatcctgaactgcttctccccctctcgatcccctccagctgcttcaccgccaccaccgtccggttcgccatcacgccgtggtacacggcgccgtacttcgggctgtgccggcacaacacacaccacaacgctcactcgcacagcaccagcccggacaccacgccgagcatcacccacctgcggacgccagacaccctgctctacagcgagccgccgccgccgaggggcaggttgggtatccccgggaagcagaccttgatgaacgacgtgctgggcagcgccacggaccggtacccgctgacgaagttggacaccttgaggaagcagaggctcgagccgccgtagagcgccatggaggcgacgcatgagctgccggagaggcagttgaggcggcaagcggtgatgccgacgaagaactgctctgtcgtgatctccagcagtaggtgaggaactgcgtgttgtcaagctggagcatggtggagttgcctgggcagttctggagctcgatcttgcgccggcatcaccctcatcgctgcgtcgacacctcgacaccctcgtcgccgcgtcgttgtttggcgacggcgcctctatgtcttcctcctctccgttgcaaatggtgggcggcgctagcgtagttcagctcaacggggtggctggggacggggatggcggcagcgtggctggggacggggatggcggcagcatggctggggacggggaaggtggcgcggcggctggggacggggacggcggtggcgtggcttggggacggggatcgtcgccgcatcactgtttggcgacggctccggcgccgtcgttgtgggcacgacccgatagaacgagatgacggagattatggcgaggaagacgaagggcaaatgggtctaacaaaatttttctacacttcaatctaacgctggtaactccaaacctgacggaagtgctatggggcgaagaaaaaccggtgcctgtgcttctgatcgaaagcgaaaaattcttgtgctattttttggtaccgcttttttcctgtgctatggatcgaattttctcaaaagtaaatgtcgaccttgtgcataaggcttttacctagcctgcctttctagactatatatgaggattcaccttttttctcattgaacatttattgattgtaatcccatctatttgtcggacataacgtttgtaatttgaggtttcatgaaacaatcatgtgtctcaaatgtaattgtaatcattattaattattattgtgatttaggccccaattggaactgttgaatatagttcgatcgcccggcctggctgaatggcagattatttcattcatgcttctaaacataccttttttaaaaaacaaacattcaactgactcccgtagaccacattagtaaactatttgttattttttaaaaaaaaatcaatttaccgcaccaatcaaatagaccatccatttcgttttatcccggtttcatcactttgcaaccatccttaagttgtattcgttacctatggttgaaaacaaatccatacagcgcaaaaaacagaatgacctattagagcataattaattaagaattagctaaaaatactataaaaattggataatatgttctttttaaataaacttttctataggaacttttttataaggtgcactttaaaaaatatgcgcgttaaaaatgatgaagtgaagttgggaatgtgtcttaagctagggttagagtaaggctaataatacagccgatttgttggctataaagttctttgcagacttttcttaacccacacatataatagattaatagttagctatttacaattaatacagagtctacttgtctctcatataattttttggttcttatgcccaagtcgactgtaagtttacagcccgctttttctctctcctcgtatttcctccacctcagtatttagccgacttacagcctcctattatacttgctcttagggtatagagtatcatttcgagcaagctttcgctttttctcccggctgtctacaacttgacatcaattgcatggtatgagcaatgagttacagctagtgtgaacatgtttcccatattgtaacgtatggccactcggcggctagtaatcttaaaaaaaaaaggagagctgacatcaattgcatggtatgagcaatgagttacagctagtgtgaacatgtttcccatattgtaacgtatggccactcggcggctagtaatcttaaaaaaaaaaggagagctgatgataaacgtaatgataggcgtaggacgccatcctcccctgccgggggactccagtccacagtccgcgaggaattcctccaatctccaatctttttgcggcttccatcccctgccgggagcagaggcgcatcggctagctagagctttcgcttgtccatcttgccgtccgtttcctgagctgtacacgaggacgttgctgtgctgcatgcgtacgtcagtcgatcggtcagttcgtccagctctcgctctcgcatccatccgtccgccgttcgtgtcgcctgtcatctcgttccaaccgaccatgagcgaccggataaacccaacctgatcattcttcccccccgggaatgattgcaccgtgccgtgctgtcccaaaatatctcccgcagaaatgttgcaagattttgtttttcagctggtgtaatttgctcgcgtttcttatgtaacctgtaacaatggtggaataattcgatcaggagtaactgagaggaaaaaaaattgatcatttcgcctctctgttcagagcagagtaccatcccgaagcatcatacagcatgatattcgttcggtaatgacgccgctaatgatcaacgtaactcaaaacagcgacttggttgcttttggcaaatagtgccggtgcagtccccctcctttttaaatattgcccatcatgtaagattgtacttgtcaaaaaccaaatcctttctgctcaaccacagagcccaacatattgcagaggctcccacaagtacaagcttactccttttcttatccaccccaaaaaccaaccatcaaaaagaatattgtattgctctccatataaagtttgcataatggcaatccatgttgaatattctcattttacataaaaaaaacaacatcttaaactactattccaattccgtcttactaaattgtctttggttaacacaacctctttaagtaagtaccacatatatatacaggtaattttcagggcaacatattggcttcggtgttgggctcagctacaaaggtgtgatgaagatggcgagtttatgaaggttgcatgccgtaggcttgagacgacagttatgcaactttttgtcaattatggttggagatttacaaatagacttcaataacgtgttctccttatcttagatgggttattttttattttaagtgcgtgttctcaatgttttgttgaactacacttttttttagtgtaactttgtaataattggctgtagctcgttttgagtaaaggctgggatattctattccattatcttaaaaaaaattgtaagattgtactgaatttctacatttgctaagatgagttttcgagcaattggaatccttcttcttacttctctatttttcaattatgggtttgttccacttttgcgactataccatgtacgatgcacctaggacaaaacgcagatatgaaacctgctgtccgcgagtgtgtgccttggccgccagcgccactagatagcgcggtacggcccgcgcgggctaaacggccgccatgcagacagaccagcgccgccgccgccgcaacgtgtgtacgcgccgcaacgtagagtacgtacgtacgacgtacatgggcctccacttcacggtcacgaggaggcgctgcatggagcgcacgtgcgtccccacttcaccgtcatgttgccgggccggtgcatgcacgcgcgggccctataaattctgctgcccccacaggccacagcccgttcgttgtagggtcgggaatccaacaggccgcgcgccgccgccgtcgccaattcgtcatggcggcgcgcgcggtggatgcgagctgagccgacttgttgcgggtgcagcgtcatcaagattcacgtgtgccgcacggcacacgtatcggttttcaagtgtagtcatcgtgcgtgaatcttgatgatgctgcaccagcaaagagccggccgtatatatattgttctattagtattgtttcaggaagcatatgtgtgcatggttgtctacgtgcaggcaggcaggcaggcaggattagctttttggccaggtacagtatacattcaactctccagggtttctttaaaagtacgaaattctttttgacaggttttatattccttgttcttataattaatagcattgctgtcatctgttctcttatttattatatctgtctttgtttaaaaaaaagcactcctcatttaaaaatataagcatttctagctagataactgtatattcaaatttataagttattaaagttatatatttgaaaaccgaggtagtatgttcttaattttataatggcaacgttgtcatatcgttcttataatgcatatctccagtttttttatgatctaattaattattaactagtgttaccaattttcatgcatgttcatcgtggagattcgaagggaaccatttttggacgtacttgtatagggatgtcatgtgaaagcggcagtccatcccatactgatgagtgatgacaccacacactccccaaaacgaaaatgcattatctacggtccgtgctacttgtggcgacgacattcgggcaagatcagtggcagctagctaaatatttaaatagtagactatccgagacactggctttgctgtctgtccgacggccaatcggtctgggtacgagctcagttcacaatatatacagaggatggaccaaacagcaagggtgtgtttagctcacgctaaaattaaaagtttggttgaaattggagcgatgtgacagaaaaattaaaagtttatgtgagtagaaaagttttgatgtgatggaaaaattgaaagtttgaagaaaaagttgggaactaaaccaggcctaaactcggcctaattgggaggtagaatttgttaacaacggttgtgtttagttacacgctaaaattgaaagtttgactaaaattaaaagtttgaagaaaaaaattggaagtttatgtgtgtagaaaagttttgatgtgatggaaaagttggaagtttgaaaaaaaaaagttataactaaaccaggccaacgtcaagtgtaatatttggaaactggaacgtaatgaactacatcaagctgtggcagtgcaagtatacataaagttaataaaagttgtgtaaattaaagaatcaggactcgattggagcttaaacatgcacgcataaagtagtagcaaataatatagtaaatgtccttttggcttcactcgtcttagataataataacgacattgactgaaatgtgacatgaccatttttatatggtttattttctaaactatgtatactacttatacatatgcttttacaccacactatctaaaatagcgatgcttgttatatatttatactccctccatcccctaatataagggattttgatattttgcttctgatgttcgaccactcgtcttattaaaaaaattgtacaaatataaaaaacaaaaagttgtgtttaaaatactttggataataaagtaagacacaaataaaataaataataattctaaaaaattttgaataagacaaatggttaaacagtacaaataagatgtcaaaatctcttatattagaggacggagggagtacaatgttaagcgctgcagcctgcaggaactgtgaggcaagcaaaatatatatataaaaaaaagcagtgggccggctgcaggaacagtgaagaagcaaaaaaaaaaaacacagtgggctggctgcagccggctgctgcacctgcgtgccgaacaggtccatatgttgttgaatttataagcacaaaataatttaatttattccataactaacataatcgtatcatacaatctacacatgtaaaccagacattatagcatgaacagatcgaatatgcgaaacatattgaaggcgtaccaagggatttgcaaaaccggctgctcagcgggaaggactcgtggtaccgtgcgttaacgatggtgcgcaacccgtgagcgaagaggaagaggagccgttgtggatgaacaaggagcggtcgtgtaaagcacttcccaaaaacattattgctgccttctcccggtgtaggacatcgaaggcgaaggttccggagacctgctctcccgatcgcagtacagaggaggaggcaaaccctagattgatttcgcatatgttgcatggaggcggcggctcaacttgagcgggatggagtagactacaagtgacggtgcagtacagaggaggaggcaaaccctagattgatttcacgtgtgttgcgtggaggcggcggctcaacttatatagagatatcaggacgcatgcacaatctccactccacgtaaccgtactaccgcgtaacatatccggactccacgtcgtttcacgtaccggaatattcggagtgtttccgaaaaacaaatccgaatttccaggccaggcgagcgagcacgtacgtgtgttccacctattctctccacttcacatgcctcaagtggctaggaaagcatcttcccttataaggaggtctccctctcctagaataggcaaggtggcactaaattcctcatgcatgccatcccatgatgtgggcttttatgattttccaaagaattaatcttgaatgggttaaggctcatctattaattcaaataatcccccaccaaatctcaaaatcccactgagatttgccttttctcaatgtactgtttatataccagcggtttgatggagaccaattaaggctgaatatccacctagaattctaagctacacttatttacaacttgaacaatggactatgccttgaattgcaagtcttttgcaagcaagtttcacttagagtcttatgtggtactaccgtactagaccgtcagtagactatccctcgtgtggagcgtataagtcatactccttgctctcttagtaagcttcctagaaaattcatccaaaatctccatagactacgaccactccagctcacaaaggtgcgttctttcaagaatggtctgcaggatagcatcttcgctaattaaagaacttattaagacataaccaacatgccttgcagctcatgagagtacatgcaacttcagttagagatggtttagattggtactcccctcaagttaaataatagcttgttcgtcccagggtctaattcacgggatctccaatcacataattatgttaccgtcatagtagaactcacatgggtctcaaacccatctccttcgatgcattgtctatcatatttcgtcatagtcccttcgtgaagggatctgccaggtttggatgtaattcaatgttataaccccaaagtttctcaaattcctgaatgacttcaatcgtcatttcacatgtctaaacgatttcatgttatccttagaactattcactttgaaaattaccatttgattgtcacaattcataagaatagccggccccggtatttcaaccacaagcatatccatcaatagatcacgcagccattctacctcaacagcagcagtatctagtgccgtcagctctgcttcgatggttgacctcgtcaaaatagtctgcttacaagacctccatgtaatagcagcaccacctagtgtgaaaacatatccactaatagctttgatctcatccacatcagagaaccaattagaactgctatatccctccagtaccgcgggatacccagtatagtgaagctccaagtccatagtaccttttaaatggtgcatcactcgctcaagagcacgccagtgatcatctcccgggttagaggtaaaccagctcaacttgctcatagcaaagaagatgtcacagcccagaaattcataagtaatttccaaactaatttgtgcattaaatcctcgtctagaaatcagctaaggtacataaactgacaatttatacaaattcatcaaaataagcaaagcgataaatacttacataagaggcacttagttctcaccaccaagaaaactgcagcggaaaataaaatctagcgaagctccaactccactcccacaggcagctcaactgggatctaaaccaaaggtcttctccttctagatcctttttcttcaactgagatttggtgtttattgcaaggtgagtacatggaatactccgcaagccacacagcaaatatgcaagtgcatagggatcgataccaaagaatggcatgatgtaggactcatttgcaaaagcatcatttagcaaagagttcaaaatttgtaaaatagtagagtaattaattatcaatattaatccaatgctatacaacatacctgctgcataggccctgccaaacctgaacaaccaaccccggtcgtacagatcaaacctccaaatcaggaattagccattccaaaccagaagttaaactaattatcatcaattatcacattattattattaacgagtagtgtgagactaatcaaaacattattagactcactcataaccgcgagcacggctattcgaataattttactctagccagagatgtaccactgtacgcacaagacacgatttcacacatgttgtcatgccccgaagtaccaccacagcactacaaagagggaaatcgtgacattacccttcacataacacaattcataacagtgcaccgttcctggatcataatcaccccctcaagagccagaggtatggactccccagcgagcctacggacttatcgccgctttacagtctggtgtctcgcaatgaaacacactgtacaaaaggtaaagtcgttgcccatactggcttgtggttgacacggttaatgtttcacaacagtagctcgcgaaccggtccttaattgtcatgagcacaaccatcaaaatcatgtgctcacaactctccattaatcaacttttagtttataattaattatcataacacgttgaccatcgtgagctaccattaaatataaccataagtgatagtgaagtataaattatcccattaatgagctaatgtttctaagcataactaagtaattacatctaatatctagttgaaccaatatataagtctaactagtcaaattataacccaagttatctaggaaaaaagagaaagctatagataaagggagggagtgcattggacttatcaaataaaaaaaagcacctaccttatgcttattttcctttggaacaaagatgtaccaatatcatttcatacaattttacaaatcttgttacttgtcatgggctttgggccaggcgtcctaggctcattggataggattagggtttgttaggattagataaggtttcttaggattagattaagtagtcctccatctatataaggagggatcctatcccaggtcagttaggtattagattaagatttatcttagtgcccatcggcctgccttctcagtgcgacggagagcgtcgcgtcgtttaggttcaggaccattcctcgttatttcatctactataatccaatctatccctattcttcccgattcttcttcatataattcttgctcgtgacaacttggtatcagagcttcggttccgtgcccatgggtgccgagatcgcggcggttcccaacatcagcgaagatcttgccaagatctcgacgaagatgatggacttggcggcacaactccaggctttggcggctccatcagccgagcaggccatgtctctcggagctgctgaacgatccgaccggcaggccatgacgttcctgctaccacggcagcacgaattcaagcagcggttgcgaggcgccaactcgaggaggaggatgagttgcctgccacagccaaaggcggccatccctcgcggtcgtctgccaggagttatgccactcatctcggcggaaacaagacttggtggcgtggtgctggggatggcatcaacggcgccacttctgcccaagccgccgtcgaccaccacggcgaaacgacatccttcaccgtgcctacaggcaccacaaccggttgggttgtcaccggtaacagctgtcagatggagtcttcctccttcgctcttggcggcgcttcaacagtccgagccattggagaccacccgggagaagctcagggcgaccgacgacacaccgtcaagggcagcggtgcctacttttgtgacgccaacccttgaaacaagaaggcgggatcaaggtcgttggagagcatgcctagccggaactcgacctcgctgttcggcctggcaatgccgccgtggttattggcgttctcaacggaggcagaggagacgactgcgagttccacttccatggcggcgtagcacggtacgggcatccgtgcgatttccgggcgatgcgatcatgcgaatcggtttccacagtgggaggcgcaaattccggcgacggttggagcagagccatgggaagcggagcggcttcttcgggcgccaggtttggcacgatctgctggcgaaccgtgcccttcgcgcggatggccccgctcgtgcactcgattggctcccgcggaggcgtggggacggcgcagatcgctccgagtccgagcgctggctcgagaagctcgcgattcgatcgcagttggctgcatcgctgctgtcggcgtggccacgtgaagaaaaggatagggtttctgtcttcttccagttgggctggctggtctggtctggttggtttccacgttggcccatgaatcatagatggttcttcctcatgttttgggccatgaaccatgcaagtaaactgctgcttctccctttgctgttggtctgggcacgtgggttttggtgagaggcatgctgctgtgcttggccacggcttgagcctaactgtccgttcaaggcttctagacggcgttctcctgtccatgtacatgatgacagcagtactagttctttagggctctttacaagctgagatgtaaaaggcttgagagtcttcgtttaggttatggtacttcgtttgagtccagcagggtgagctgcagcttgaggacgagctgctcaaaaaggggggtgtaatgtcatgggctttggaccgggcgtcctagactcattggataggattagggtttgttaggattagataaggtttgttaggattagattaagtagtcctccatctatataaggagggattctatcacaggtcagttaggcattagatcaagatttatcttagtgcccatcgacctgccttctcagtgcgacggagagcgtcgcgccgtttaggttcaggaccgttccttgttatttcatctactataatccaatctatccccattcatcccgattcttctccacaaatccttgctcttgacattcctccaatccaaagaatcatataggaataaaatcctaaggaattcaatcccctatgaaaatcctccaatccaaaggtgcacttaacagtttattaagaaggatttggaagttaggtgttgaatattctcaccactacttcttgtttatgatcagattcagtcaaacttttcagagttgatatggagaaaaacgatattaaattctgcatatttctacactacaaattactgaagttatccgattaaaataagcggaacggatcgataactactaaacaaaacattgtgccaaaccttctagtattcaaattttgttgggcatttcctttggacatcaatccatctaaaacataaacaggcggactatgcgagtggaacatgtggttttcaaccaaatggattcacatgaacaacttcaaagaatgcagcttttctttctatagtgacaattgaaatgcaaaaacaactgatacatgagcctcagaaacagcatatgataccaatccacgggaataacaggtatatgtaattgacaagaacaaaaaaaaaatgaggaggcatcagttgtacatactcagttgtgattgatgacaaatagacatctcaaaagaaatctaaggacatcagtaacaggttggcacaaacttgactaccattcaccttcctggcctcatgtgtcagaaaaccaagcctgagatatcaaagtaaccaaagccatacatatgccaaaatattgctctttattctgtgaatgaaaaacaagactgatctggcattgtgattcatggatctaccgctcgcgtcctgctctgtggcacagtgcactcatgatcgcaatgcagcgactcaaggttctaagcttccaccttcttctttggttgccgatgcacggatcccttccatgacttctgcttcaggactatgcccttcttcttgggggcatactgctgtttcctgataaaaaatatatcagcgtgagattgaaccacaacatataagcaattcacatccatccttcatgattcaaggaacttacatattacaattcaaccaagttatgtcccatatttctatttattaaaattactttgattgcacccatttcgtagataaaacaggaaaaaaattcccacacttcatctctagcagactgaagcagagctactgatttacttctgaattgctggcttctggttttgggtctacaattaaaaaaccttatggttgcaatgaaatcaattcatgagtctattatatgttgctaaaattaaccatgatttgctatcccactcctgacttgccaggcacgcgcactcttctcccattcttcaataaacaacaccttcccctcccagaatctgcagctccgcccgatgcccactcccccctcccctaccagctctccagcaaaagcgccagtgagagccaatgttgcactcctgacctccatgcgcactggcatgggcctgatgctgcgctcccatcctccacacactccccctccccctttaggcctccatgacagaggagactgccgtgtttccatggtaaagttccttcgtctgtgagggttagatggcatctattgtcttctatgaattatgatggatatcacctccattgccctgcgtgctcaattagctgtcatctttctaacctacatgctcacatgggtatcatcacatatcctttagccgatgcacttgtgtcctctccagtcagaactgagacacatcttcagcacagtgcgttctaacaatttttggtgtgtcagcatgatgtcagtgctttaggtaaaattcagtgatggctttcttgatgcttctgagaatcatgctgcaaacattatgtggactggtattggttgctcttctattcacagatgattgtatgaagcttaagcaagacatagttgccctttctaaaaaaggaggagcaagtatgaaacaaacttcagccttggatacagaatactgatcaagatgcacctttccaatgggaattctctaaaaatctatgagaaccctaatgcattggtaggctggttaaaattgccactacaccttcctgtacattagtgtttatttcttcaatttctcatagcaatatgacatactaataagttgacaactttgcatggttctagcttttaataatttgaagcattttttggtttgaccatatgatcgaggtaggtaacaaatggtttggaaccaaaacgtacatctgttgtcgtttgatatcggaggcaatggtttacattaatctatattgagagatgatttcacctcttcatccaactcatattattgtgtccttttatagccgcaaatttgggttggtcaatagtaggcttactggatgtgatcttggaaagagcaatggcagccgatgggaaggctgggtggtggtatgtaacaaaaaggaagagaacttatacctgagctacttagcatacctctacagataaaaaagaaatacatcacagagcaacgtggttgtgtaaattatcttgtgattgtgggattgctcatatattcctttttagttgaggacttgaggtccaaattaccaggctcttgaattctgggattgctcatgttcctttgccatataggtgttttatggaattctgctcaattaatcagttctctatctgaactgcgtgcaatcaagtaaatagcaatgaagaattgttttcacccccattgtgttcttttttcttcaaactttcctatcaaaaggtgaatatattgcagatcaataaaaccactggtcatttcactgcattagggctaagcgctggtcgtcataggtgatatatgaaggaggggtcatttttgtacaatcatggcatgaagttcagaactctttcagttactgtactgcagctgcaatctaacttggtaagctaattataacatatataatactacctgaaaccgtgacatcaaaaagcaactacttcctccgtttcatattgtaagactttctagcat

SEQ ID NO: 5049 - DNA, 2938 bp, Oryza sativa
cgtgcgtgcgtgcgtgcgcgcgccccgcgtcaattcgcgttgccctactcctgcctcctcggcgtaacgaaacctgcggctgctagctagcgcgccgctggggcggtgcaagtggatcaagtggggagtttatttggtttcgggatttgcctgcagggtttctttcattctttggctgtgcctgtgcttagcttgcttttgctattccctcccggagaatattaatcatcgttttggtggtactcgtatttttttttcttcttacccacttgtttgacttgtgagcacctgagttattcgcgcgtaaaattttataggccggggaagcaagctattcagtccagccataattctggaaagattatcgtgtttccaaataaaatagtcattattcatagtctcaatttatctaagacttaaacgaatagataacttagatgattgtctgaaacacaaacgatcattttaatattcattagttacacttacatgcacatatatacagtggcgaagccaccgtaggggccagggagggccaacacccccctaacccctatgtgacctcccctcccatctcttctcccaaggataattagcccttataatctagccattaattacatcattagttgcagatgagactaactatataggataactgcctagctatatatgacttatgaaatgacttagttaactgatttatcattttaaaaatgattacaagactccaattaaaatcatggaacaaactgtttaaattggcaaattatgatctatgggttctcattctctcttctagctaatcgctataacatgtatgatgtcgagttagtgatcatacatttcaaaaaaaaacacggtacaatatcactgttcaccgaaccttaagtaagttaccacgtctcgtaaatggcaccccccatctctaaattctgggttcgccactgcatatatatatatatatatatatatatatatatatatatatatatatatatatatatatatatatatatatatatatatatatatatatctcttttggtattcgttacatacagaatgagttatttttttctgatactgatgataaaagtaataagtttaacacttttttgatagagagtatagtataggtacgccaccaaacaagttgcaatatggtgtggaaatcggaaacgaatggataggatagaccgtaggagcatttgttgttttccttcgtttccctttcggagtgttgcacattgcgccacgtggatcctgatagaatagccactgaatacacaaatacacaatggtactcaataatgttactcctatgtacgcaccgatcgtaccaagtacaggagcaccaccaccacttgtaaacatcttttctgcacacccgatttgatgggctaattaagatatgacaagtacagtagtactgctagttggctgtccgttctactaagttaggccatgtttagttcacaccaaactttttccaaactctcaactttctatcacatcacatcacatccaaaactttcctactcacgtaaactcccaactttttttttcaaactaccagtttttcctaaacttctctccaatttaagaaactaaacacagtctccagactgatctctagactgatagtacttatcaatttgtggataatggtgagatcaaatattaaaatctttaactatgaataattttttaaatatttatcttagaaaattggagactagatatatagattagtcttaccactactttaataaaatcatatatttgttgatgctttttatatattataatagaaaataatgatcaaagttactttttatgatcatgtttttatctaaaacgataagtattactccctctaattttttttgtttgacgttggttagcttaaaattgaactaaccaacgtcgtacatttgtgcaaggaggtagtattaatctgcagggagtacttccaagtcgcttgctgaccttggtgatctcacctgagcgccacaaaaacgatcgccgtacgtttgacttaccagcttcaaaaagctgcctcgagtttttttagcccaactgtatttacgtttgccggtcagcgctgacaaaagttactacgaacccatcgacgggcccctgtcggtctcgtcctcctcctccgctttaaccggctcacggaccacggcgaaggccaaagcgacgtcgcgcacgggcgcgcggccgcggcggcacatgcagcacgccgaccacttgcctccccccacgaaacttttctcgctgtcacctgatatctctttccccccaaccaaaccactagacattggcgtcacagttctgatcgggttggtatgctctgttgcaacatggcagtgcaaatttgcaacggaaaattgcagcagaaaattgatgctagtagtgtacgtagttgcatgtatttgggcctggacagtacatgggcctggaagcttttctcgtctgcagattttaagattttatatgggcctgcatatgattctctctcttttttttttttttgaacttttgttgatgtcaagcatggcgcgaatgtgttgtaggggctggtggtcctgactatccaggctaggaccccgtcgctgatgccgccggtgtgcgccaaggtttccggcgcggcgtgctatccagtgaccgcgccgaagaaggcaatgctgttcgcggggctgtacgttacggcgctgtacatcagcggcatgaatggctacctcccgtcgcacggcgccgagcagttcgacaagcacgcgccgcgtgggcggaaggggcgctccaccttctataactacttcgcttctgcctctccgtcggcgcgctcatcgccgtcacgttcgccgtctgggtggaggacaacaaggggtggcagtgggggttcggcatctccaccatcgccatcctgctc

SEQ ID NO: 5050 - DNA, 3937 bp, Oryza sativa
accggcagggtttcttttggcctactgcagtgtccgatgccgacaaaattgtgcgcacgtgcgaaggttgccaatttttcgccagacaaattcatctaccagcccaagagttgcagaccatcccactgtcttggccgtttgcggtttgggggctcgacatggttggcccgtttaaaaaggcagtcggcggttacacgcacctctttgtggccattgacaaattctccaagtggattgaagctaaaccggttgtcacaatcacagcagataaagctcgagacttcttcatcaacattgtgcatagatttggagtgcccaatcggatcatcactgataatggcagacaattcactggcggagtttttaaagacttttgtgaagactttggaattaagatttgctatgcctcagtggcgcatcccatgagcaatggacaggtggagcgagccaatggcatgatacttcaagggattaaagcgcgtgtttttgaccggctaaaaccttatgccggcaaatgggtggaacagctgccatcagtactttggtctttgcgtactacacccagtcgggccacaggccagtcaccttttttccttgtctatgaggcagaagcaatgttgccgagtgaagtcgaattcgagtctttgcgctttcgtaatttccgcgaagaacgctatgaagaggaccgagtggatgacttgcaccgattggaagaagtccgcgaagcagctttgattcagtcggctcgatacttacaagggttgcggcgttatcataatcgcaatgttcgatcccgtgcctttctagtcggcgacctggttttgaggaaaattcaaactacacgagatcggcacaagttatctcctctatgggaagggccatttatcatctctgaagtcacccgaccaggttcctatcgactcaagcgcgaagacggcacactcgtcgacaactcttggaacattgaacatcttcgtcgtttctacgcttaagcttatcattgtacttccctatcttgactgtcaacatcaagtgttcttcttgaagttgtcagtcgggggctattatcataataatggagtgtgattttttatcaattcaatttgcttacttggtctatcattgccttgcttgatttttctacttagtctgcgaggactgaaagtttttaatagcttctttgggttttaggctcaacaaagcttgataaaagcttttaagaaatcaaagacttggctagaattatcaaacacagcataaatacactagtattgtacaagttgagcctccatttgttacattcatacttagtcagattcagttttttcatcatcagagttgttactactcggctgcaggtcggtattgcggaatctatctacaacgtcacttgcaattttgtcagccgcgttttgagcattgctgataagatcaagagcagcttcttcgcttgtcccgtcagcaaagccatcaatggcgtcaatttcaatccttgggtacaaggatttggtcatcgccaatgccatgctagctcccatgcttccagctttcttgatattcttgaaatatacatccggagcaactctcagcttgtcgaagatttcggttgcgtcgagtgcactcggaccactgttattgaggaacatagcttggacgagtggcgtagcgacactagcgacttcatctcttgctccttcaagcctcttgatcttgccaaccaggacgtcaaattgagcttgagatttgattttgcggtctacaaaacatatttatgataagaatttgctgcatttaaaagagagaagttcagattgttagctggcagtaccttcaatctccttcaaggccgagtccctttgtgcagccagttctaccttgtctcttttcaaggcttcaatttgtttctccatttgggccatcctggtggcttgcgctgtttgaaatccaaatggttgaggatacagttatgacagcgtaaattaatgggacagatctagaagattaccttttgatgaacctctcagctcgaagtttgaatcctggagctgagcaatttggtccctcaattccttctctgtcttcttggcaagctccttggcctcgtgtagctggtccctaactgcttcaagagttcccaaatgaggaaccagcttttctaaagttgcggtcttggcctcattacgaagatggattctctgcatgatggttcatggtttagttctgctaaagagaaaacaaagtcatcaaaggcagtcgcccggaagatttacattcacaatgcgagtggcttctccaagtgctttcttcagctggcacacttcctcatcttctttttgacgatttatgacgatgccggcagcttgtgagttctcgtcccaccatttgagtaagataggaggacgagagtcatcagccgcctttatgcggagaatttcttcttcatcgcctggtggttctgatgtatttccaagacattagacgaataagctggagttattcaaatcggcatcacttgagaagatgagttacctgaggatgttcctagctgaacgtaaggtgatccttgttctttattcggagacccaatcatcgagtcgttaccagcctctggtcctcgagaagttgtcgtctgcgcttcaacttcgggagtttcttgatctggacctacatccgactggtttccagtcgggggctcttgagttgttgtagtttcagttgctgccgactagtttccagtcggaggttggtcactcggatcggccttatcacctgaagtatgggcgccagtcggctggctttcggcagttggctcagaatccttggatgaatttggctctgtcacagccggatcaggatcttttccagttggatctatgtcggatggtttcctgcaaaatattctttcaatattcagtattattttcatgagagaagcatgccgaagtgaaatgataccgagaggtttatacctggaagatgttctaatctttggcattggacggctagccagtttttcctgggagtggtatgctttgggagtttattggtcaagcctttgttcccagatttgttgccgtcgtcgccttcgtcgtcgttaagcaccagttttctcttgcgagaacctgtctgcccagtcggattggaggtttgaggttgtgggtctgatctgattgtcggccctccacctccctgaacggtgtgctggcgaggagaccggcgctgagtgattggggggtcagacttcatcaatacatattcctgaatgagatgcctccacggttagataactcaacatgaagacaagattatgttttggtaacgggttgaggatttcagatacatacctgcggaggcggattgaatgcgttatatggcacaactggcagctgatgtgagtagctgacgacaatagcatttgagaagattttatacattctctccttcatgattttaaaatccagagagtctggttcttcacgattaggatcatgcttgccgtcaaactcaaaagctgtacgggatctttctttaattggtgccaatcggcatttgatgaagtgccgagtaatctgctctccttgtaagccttgttctttgagttttagcatgcgatccatcaattccaaggcttgggctgcttcatccccaatcggaagagagttccaggtatcttggtacaccggaggaagacaagaatactcaggaagagcaggctcaggattctgaatataaaaccagtttgcgtgccaccctttgtttgaagtcttgaagggcatagagaagtacttttggctcagagtccccctcagctgaaatccggcccctccgactacacatggcttactcttgttcggttggggcttgagaaagaagattcggggaaacagagcgaagtggggcttaatccccaagaaggcttcacaaacatggacgaaat

SEQ ID NO: 5051 - DNA, 3888 bp, Oryza sativa
caccaaaaattcacactaccttcgcggtgcgccacacgatgacgatcatagtcttctaaagttctacctgggtgtgtgcgcatccattcggcaacctttacaaccttgtagctgttgctgtttattaacatttcacggtaaaacgggctgaaaaggacacttggtctttggcaagcctttcaccgccacgaacttctcgttcttgtttcgccaattatcagcggggggccgaacgcatatttttcggccacgaacctcctagtaaagcacaaaggaacaagtgcaaaaggaaaaatgcggacgaaatcaatcccactttccagcaaaatcataaagttggcgaaacattaactttctcattaataaaattaaggtcatagtggctacaagacgaaaacggctcaaggtcgaacatgcaaggcgcctatatacatagaaagactaccaaaaagcctaaaagggcaaagagaaaaagtcacacgaggacgaagggcctcacacctcagggtggtcttggcctccgttgccttcaccctcgtgttcggtggctggctccgacgacccgcggtcctctccggtgttggcagcagcggcttcctcgtccttcgtgatcctttcaagattctcgcaaagctgagtcttcgcgcaatcctggccaccatcctctcataaacccattcggaaggccctcaaggccgccccggagcactgcgagttgtcgggccaatcctctttcacgaggtcagggaaatccccgatatggtcacagccgtgcgcgtgcaggaggctaagaacgaagcccgccgaaacatgtgcacagcagtctccgtaggcactggccacttcgacgaccaagccggccgcttcctgcgtcaactcggagaagtcgaatgccgtcccgtcgtcactcggagcgccttccccgtgcgcgccgaggttgttgagagctagcctgagggtgtagccggcttgtttggcggactccgtcaccggcgcctgagttgcagtagcagcttcggccgagacaagacgagcctcaagggacttgatcttctcttcggccatagcaagttgacgatctcgttcagcgtcccgcttgttcgccgcctccaggtcggcatggagagacttgttttcgcccgtgagagacttattctctgcattcgacttttttaagttgtccgcacgacgtgtctttcgtcctccttgtggcgaagatcctcctcgattttcagcggtcgaagccggtacccatccagcctctccaaggcggactttttcgcacttaagtgcgccgcaaggccctagataagagaaaccaaatctgttatgatgtggcagaaatgaaaagaggagaaattttgcaggcgaaagataaagttcacacccgcacgaacaagctctccgcggccgcgcaactctcgccgaactcatttagttcggtgaaaagcccaagaccgtcggatggtgcaatgacttggcacaccccatccacgaatggggtgatctccggccgcgtagcgaaatccgcgggaacaaagtgcggggcggtgagcatcacgtccgacacagacatcacgaacgggggggccttcccatcccgctgatgagtcggcgaagggaccgcctcaacccgttcgcccctcgagatgttcgccccaatcgccggtgccgaagcacttcctcccgtcggcgcttcagcgtcactggcaggaggtggcgaaaagcgtcccccccccggggagcgtaccgctgggctggcaaagtgggtgtcccatcagacccctcgctaactgaaaagccgggagcgacctgcaccaccccacccttcttcttcttcttccgggcgatcgaccctggcttcgccgtagagctagaaatcgccaggagggtcttcgcgccaacaacgttttgtggatgaatggacgaaacatgggaacccgccccagacttcggttgtgctggactgggcgtatagccatgcgacccgtcgtcctcttcggactcggcctccctatcgtcgtcttcctcctcgtcggcatcaacttcagccgcgtcctatgcagcacggcgggttcgcacttggccgcccttcgcaacggctcaattgcgcttcttcgacgttccaacgtcgtcatcgcccccgtggaggggatagaccgatcgggcaattcgccggcatgaactcggttcacccggccgtcaagctggcgtgaaagcaggtgggcgaattcagccgtagttaggccccaaaccatcttcgacgcctccgcttcagcgtcctccaacatgcgaactaaaagcaccaaaaagagggcgaatcagaccaaaaggcaactcagaaaagggggagagaagtggaaacgaaactcacgttcggtcccggcggggagaacaaggcgaggaagcccaagcacttattcgccttcgttgatagaaaccccccagtcgcgagcaagggaggaaattcgaagaaggcagaattcctcacaaagatcgcgggtacttaactgccgcacaactttgcgaaggaggatgagccgggactcaagggtaccgtcgatctccacgttcggcttcgcgacgatggaaactgcaagacgccggaaacgaagccagttcgccttaatgtcctcggcggggtagggattgttgatgtagaaccatttctgcatccagtttcgttcccatttcgccatagacgcaagtaccggccaggcatccgagcgttccggccgaagcatgaagttgacgcagctgaaaaccgtttttcttggcccgaccggcgtattcacatctttagttgtagcgcacgccgtgaacaagatggcgaacagctcggcggtaggttcgaaactgcatgttcggcacatccatgcaaagacgaccaatttggggaaggcggacgggctaagctggggaagcctaaccttgtacatcgccagcatcgatgccaagaaatcgtcgcaaggaacgtgaagtccagcggcaaggaaggcgacgaaaacgaccgttcacctgttgccaggcgaggggacaacggcttcacccccacaatccgcctggccctcggctagaatgccagaggagatgaaatcggccaagtcggcctccttgacaagggacttgccaagaaagcacgaccaccctacgccaaggttaccggggtcttcgccggtcgatccggccttggtgggcttacgatgggccatcgggtctatgccaaaagcaaagtggaaaaggcgaagtgaaccaaggaagtcgaaagagcaagcacgaagtcgcactggtgtgttaacaaccaaatttggtaagtatttgtatcaggaaaagggacttaatcggagaagagttggagacgaagatcgagttctggaacagagcaaggatcggctagagtctggatcagctacggctaggatcggctaaggttgagctaggctaagtaggctggtatagccgattctgataatacgacttgtgcgcgacgtcgggctcagtttgatgtgcttcaagatgattgccatgtctggatagagtcctgagaaggcaattgtatctattaattagattatttatgtaaattccttatagataagtgtgggcaagagtctgccgcaaagactcgtgatattttagagtttgttagagataatggtcgtggccggtacgggcatatcttgtaatcctcgggtataagtagaccccgaaccctatgtaacgaaatacacacattcaatacaattccggcgcatcgccacctttcgtttttgttttatttcgacgagttcttgcttccgggttgagctgcatcggtttcgatcttcaacaagaggtaaagctcgttatgacgaattatgttcttagggattagtgcttacatcttca

SEQ ID NO: 5052 - DNA, 7509 bp, Oryza sativa
agaggacgagccccgtgccgatgcgctgcaggtgggtgatccccatctccgtgcccgtggcgcgtcgcgcgaacgggatgatgatgtggtcgtagaccggggcgaggaggatgatgaaggtgaccgggaacaccggcagcgacgccggcggcaccttgagccccccgacgcgggtgtccatcgtcgccgcctgctccacggagaaagtggacagctgcgccaggcagctgttgagcatgatggtggagaagaagatcgggagcaccatgagcacgatcttgacgttctccacctcctgcaccgtgcacgacagcgccccgcaccgcggttgacgctgcaccgcccggttcaggaacaccagctcctgcgacggctcggtagccacctcggcggcgccgtcggagacgccgcagatgtcgccgggcttgcagtactccttcatgtccgtgctccccgtggggctgggcgcgcggtcgatgacagcgccgttgctggcgctttgcgcgcccgccgccgaaagcgagcccggcggcgaggaccaccttggcgatggtggtgagcgggctccccgtgggcaccttgttgcggtacagcctcgagccggcgacgaacaccgggatgaagagcaggatggcgatggtgaagatgccgaacccccactgccaccccttgttgtcctccacccagacggcgaacgtgacggcgatgagcgcgccgacggagaggcagaagacgaagtagttgaagaaggtggagcgccccttccgcccccgcggcgcgtgctcgtcgaactgctcggcgccgtgcgacgggagggagcccttgatgccgccgatgcccagcgccgtcacgtacagccccgcgaacagcattgcctttttcggcccagacattggctcgcacgccgcgccggcaaccttggcgcaccccggcggcatcagagacggcgtcctcgcctggatcgtcaggaccaccagcccctgcaacacattcgcgccatgcttgacatcaacaaaagttcaaaaaaaaaaaaaagagagagaatcatatgcaggcccatataaaatcctaaaatctgcagacgagaaaagcttccaggcccatgtactgtccaggcccaaatacatgcaactacgtacactactagcatcaattttctgctgcaattttccgttgcaaatttgcactgccatgttgcaacagagcataccaacccgatcagaactgtgacgccaatgtctagtggtttggttggggggaaagagatatcaggtgacagcgagaaaagtttcgtggggggaggcaagtggtcggcgtgctgcatgtgccgccgcggccgcgcgcccgtgcgcgacgtcgctttggccttcgccgtggtccgtgagccggttaaagcggaggaggaggacgagaccgacaggggcccgtcgatgggttcgtagtaacttttgtcagcgctgaccggcaaacgtaaatacagttgggctaaaaaaactcgaggcagctttttgaagctggtaagtcaaacgtacggcgatcgtttttgtggcgctcaggtgagatcaccaaggtcagcaagcgacttggaagtactccctgcagattaatactacctccttgcacaaatgtacgacgttggttagttcaattttaagctaaccaacgtcaaacaaaaaaaattagagggagtaatacttatcgttttagataaaaacatgatcataaaaagtaactttgatcattattttctattataatatataaaaagcatcaacaaatatatgattttattaaagtagtttttaagactaatctatatatctagtctccaattttctaagataaatatttaaaaaattattcatagttaaagattttaatatttgatctcaccattatccaaaatgataagtactatcagtctagagatcagtctggaggctgtgtttagtttcttaaattggagagaagtttagggaaaactggtagtttgaaaaaaaaagttgggagtttacgtgagtaggaaagttttggatgtgatgtgatgtgatagaaagttgagagtttggaaaaagtttggtgtgaactaaacatggcctaacttagtagaacggacagccaactagcagtactactgtacttgtcatatcttaattagcccatcaaatcgggtgtgcagaaaagatgtttacaagtggtggtggtgctcctgtacttggtacgatcggtgcgtacataggagtaacattattgagtaccattgtgtatttgtgtattcagtggctattctatcaggatccacgtggcgcaatgtgcaacactccgaaagggaaacgaaggaaaacaacaaatgctcctacggtctatcctatccattcgtttccgatttccacaccatattgcaacttgtttggtggcgtacctatactatactctctatcaaaaaagtgttaaacttattacttttatcatcagtatcagaaaaaaataactcattctgtatgtaacgaataccaaaagagatatatatatatatatatatgcagtggcgaagccagaatttagagatggggggtgccatttacgagacgtggtaacttacttaaggttcggtgaacagtgatattgtagcgttgatgtatgatcactaactcgacatcatacatgttatagcgattagctagaagagagaatgagaacccatagatcataatttgccaatttaaacagtttgttccatgattttaattggagtcttgtaatcatttttaaaatgataaatcagttaactaagtcatttcataagtcatatatagctaggcagttatcctatatagttagtctcatctgcaactaatgatgtaattaatggctagattataagggctaattatccttgggagaagagatgggaggggaggtcacataagggttaggggggtgttggccctccctggcccctacggtggcttcgccactgtatatatgtgcatgtaagtgtaactaatgaatattaaaatgatcgtttgtgtttcagacaatcatctaagttatctattcgcttaagtcttagataaattgagactatgaataatgactattttatttggaaacacgataatctttccagaattatggctggactgaatagcttgcttccccggcctataaaattttacgcgcgaataactcaggtgctcacaagtcaaacaagtgggtaagaagaaaaaaaaatacgagtaccaccaaaacgatgattaatattctccgggagggaatagcaaaagcaagctaagcacaggcacagccaaagaatgaaagaaaccctgcaggcaaatcccgaaaccaaataaactccccacttgatccacttgcaccgccccagcggcgcgctagctagcagccgcaggtttcgttacgccgaggaggcaggagtagggcaacgcgaattgacgcggcgcgcgcgcacgcacgcacgcacggtcgccttttctccagggctgcgcactcgcggctttagccgcccgtgaccgcgccgcgcgcgcgcgcggttgccccacccccacccacacccaccctgggaggctgcgacaacacgcgtcggtccgtacgtctctctcgacgtacgcgagaaaggccgcgcgccgcgcgggcggtggccaagattggttttgtgcgactctctcgtcgcgcgcgttgacaacgagtgtgtggtgtgatgtggtgtgtggcggtgtgcggtttgcacgtacgcacgctagtggacaccgtacgtcgtacgtgtgtgttggtggaatgggagaactggctggatcacagtgatgagttgtgtgattcgatctggggctaggggggtggggataagataagagatggtggtcggtctcggatcggatcggatcgcgggaggtggtgagagaaatgcctcgagaatgttccacagtggctcttgttcctgcacgttgataagatccgtgcctatccgtaattccgtgtcctacatggtactgtattcgacgatcactaatccatcgtaaatttgcagccgtctctcttaatcatcatagcccgtttttcgctttttctggtgatggaccaactcataataaattaaccaatcgacgacttatcgatcgatccatcaaccgatcgttcatgaaggggcgacccagaaaggtcaccgtgtaccagatcaaaaaagatcgatcccgaccggtcaggatatatccaggggtgcgcgcgtcgtaaacacgtacatttcgtgcgagcgactgcgcgagaggagtggtggtgacccgggcgagcgcgtgacggggcggccagggcgccgggctccgcgacggttttggccgcgcgcgccgatggaattggcggtggatatatgaatggattattattgccccatcccgaagggtactcacactcacacactgacactactcaggcggcggcgacggcgaccgtaatacggccctgtcccactcgtggtgtgaccgtatgagatgtagcatttggtatagctaaggtcgtgtctagtccatcctcaactaccccaaattttcaactttccattatatcatatcatattcaaaacttttctacacacataaactttcaactttttttttaactcccaacttttctcaaatttttaacttttttcatgaactaaacacagcctaagatgtaggctacctatgataggatgggcgctataccataccagaacgtacgctgcccatgcgcctgtcgacgacggtggcgacgtagtcatgtcaagtaactagctgattgatctgaatttgggttatcgtccgttccttccatatatgtctctgagcccgacgatatgagccctacagtacacgactgttgatgtgcacagtaactgtatttttttggtcaagaacaatcatgttcacctcgccggtatggcactcgacagatatatacggttactgcgcccacgtgatccaccgcaaccgcaccgcacacgtctttatacccttatacgccgtatacatccacttccatcctacgtacgtactcatcctacgactagctctagtgctctacgtacccacacaatcataaaaatacacgacatttttgggctaaaaatacagcgcacacataaaaaaaactcatactaaccactctaaatttgaatgtataatgttgctgatttctaagtgatgtttaaccatttgttttatgtaaaaatttagtgcaaatatgaaaataaatataagttacgctaaaatacttttaacaagtgaaaaaaataatatttacataattattttttctaaaaaatgagctaccaaacgttatgttcagaaatcaataatatttatatatctaaaaaatgaaggcagtatgaacaaagcagaacacttcaacgcgcaattggttgcaaacacatatttatccaaatatctcgtagaaatagaaagataaagtatttcaaagaaagtctaaaagctaaaagcttgttgttgttttctccccatcgctaaaagcgagcagtagccatctatgatccatcagtggaccatcacagttgcaatccaaccaagctagcctagccaggccaaacttgaggaccatgaatcgatcgatcgattgtcccaagcccatgcataaaagcatgcctttgtgatagatactcctacttagatagatatcctagcacctagctagtgcagtcacgatacataggggccgtgatcagtagttcagtacagggttccctttgacccaggctatctctgcttgcttctagcgaataaagtgatggttacaatttaatcattggcctaattaatctctagatgtgaatatgtatgtgatctcatgtaacccaaatcacagggaattgcgagctccgtttagccaattaattccaggcaattgtcagatggaacccgtggagaaaaagaggtttcagtgtagggccgggatcacaaaatctttggtcaaatagtggtggtcatctagcgggaactagagccgttcgatcctgcctcgagattagcatcctgtttggctaatctttgacaggtgtcattttttgaccttgtccacgaatcttgtggggtctgttctaattggacggtcaggatgccatcatgggagcggctctgattactgacaggtcactttacgacatgcagctaaattctagagaccggtcaacaaaacatgttatgatggtaatagccaacgggtccagaagatagaaaggaagtcaacgatgacgtggcagcctagctggacatgatcatcccggtatattccttccacgtcagcatggagatacgatgagcaccatgcatgcatatatatctcactaaaatatacactcctacatatgtgatatgtgtctatccggaaacatcttatcatcttattattatcggtatatctacgattgcgtaagctggcatatggtttccttttttcctaggcttatgacggcaaacaattataaaggaaattaagtgagtaactaacttgcagactaacttaagttggatcaattactctcaactaaaaacacacaaaaatggtagtagtactacaactacgaacaaatttagatgtgctgttacttaccaggaattccacaaaggcgctgatgaggtagatggcgtaggtggtgaagaaggcgtcggagaggaagccgccaaggagggcgaggaggaaggcggtgcccatgaagttggtcaccgtcgtcgccgactgcgacggcgagtagtgcatgaaattcatcaggtaggtcaccaggttgctcgcgttcgccaggaacgccaggttctcgagcacctccaccactgcacacacaacaaagccaatattctcaatccaaattcgatcttgaaaaaaaaacaaaatctctatcctaatcagtatatattaaattaagttatactgttctccattggtaggattttccattgaaattaagctatgaaattgagctaccgtgtgccactgaaaaacttcagatggagatgtaaagttgtattttaatcggaggcgtttgaaaaattggaagtactagcatgcatgtgcggtggtaactgatataaccgccccagcataatgtgtgcggttcccagtgcatgccggccaattttctttgttctccctgaccgtttcggccttgcgattcgtgcccgaattcaatgctcgcgtagcgacaattttggacagggtcaaattataatggcaaatttttctccccaaaatccatggctggttctttctctcacactcacaaccgtcagggcaaaaaaaaaaaggaaaaaaaaaagtccttcacacatgcaaggaagcaaaaggcagtcattttccaactgaacattcgggatcggatcaacgggagagatatcgaaaccgaagccggcatggtgcccaccagtcaaccaccaccaccatcagcagcagcagcgcaagattgcaagaagaggtcgccgtcgatcgagagcagggacaccgtctttt

SEQ ID NO: 5053 - DNA, 2944 bp, Oryza sativa
catatatattgtaacactgttatcaataaaggatccactcattcattccctacattcttgtgtttaaattctctctctcaatctctctcgctcaatcaattctatccacattcaacacgttatcagcactttcgctctcgcgaaggagatcgcgaagtgaaagaaggaaacatcgcttttgatttcaagaaaagcgaaagaaacagaagaaactaaggaaatcgcctaagtacgtctaccttgatttcatcctcgatgccgttctcggcctccatcgctgagaccgctttcatcaccttcttcacctcctccctcgattcgatggagtcaccaccatcgccatgtcgggcgccattctagggttggtggccaccgccaccatcctcggcgccgcatttgccgtcgctgacgcacctccgactccaccaccacaagcgcacaccacgagtgcaccggcgccccgccgcgtccaggtccaggctccatggatggactgtggtggtgacgcccgccggcgagtagtgctccctcccaccggagatgcagtcgccgccggcaccgttccccgttcgccgctcggcctccccactactttccgcgccattcctcatggctccccgagctacacgcttccgaacggtgtgggggaggggggggacggcgtccgaacccgatcggcctcttactccgatgaggagagggagccgtcggcttagtctcgccggcggacgatggggacttcggctgctatggcggtggggacggcagaaatggaggcgctggcggtggtgtaatagggggagatggtggcggcgaaaatggaattggcggtggattagggaggcggcggcaaaagtggtgaaggaggaggcgccgaaatagacggcggcggcagacgaggtggaggaggcagcgctgtcttggtggcgtcatgtgcggcggcggcggctcaaactgctgggcggttagggtaaccctaaccccccccccacgcccccctttgcccttttccccatgggcttgatgggccggctgcactgtagtggtggtgggccaaatcctattgatttcggcaccacccatttacccctttattttagtttttaattttattttagcagcaattttatattagtccctgtatttttatgtaatttagtgaaaacagttcattagttctacaaattttgtaatggtcctataggttagtcctcttgctaatattgtaaatttcagagaaggggattttcccacttcgattcgctgattcagctgcgaagctgcatttggtggtcgtggcttatatctctataatctttccccaccattgaagtttcccatgtaaaaaaaccggttccctaggaaacccactccacccaaaaggaaaatcagtgttttcacacaaaaaatcaagacaacaaaccggatagaaaagattaaaccgtataattctaattctgttgcaacgtacggacatgacattagttttctgagagcgagaatatacagtatagttggtagcgactaggtcgagcacaatagagtcgagggaggtaatggggagaggctttattcctgtgtattcctcttatgggtaccatgtggcatgtgggtatattaattgatccacaatatggaagttcagaaaaggcagaccaaagtaaaatcaaagggatacgatgagataagtggcaaattaaatgtacatactgctcaattatctgctaaatttataattgcagttaactttgtggtaaaacagagttgagcccttgcaattatatagccaaggagtaattttccgaaataatcaacagaacaaaagtcaaatcacgcattagaatttcaactgagggagtaggagtataatacagagcagaacaggtaacaacacgatctacgcgtttaattagttcccgatgacagtgcctgcctcaccgtgatagataaaacgggtatgatggatctgcggtggaccatgcggattatctgcaacgatggtgtcaaaaagaaaatattagcagcaatccaagggcggggaaacaaaaacactgcgggcagtagctctagactctattggctggcaaagctaaatctgttgaaaatcgttttgctaatatataaagatgatactcacggactcctgggctgccttgctgagccgagagcatggggaggccgctgcctatcagaagagccaccaaaacaagtcgaatcagaagaagacggaagctgctcagagtgggcgacatgcttgttcagcaggcagctggcctgctttgtgatcgagctcacgaacaaacgatacaacctgtctgttttaccgtgcgtgccgggaagccactgatgtcaaataacgccagacaagaagagtcaagatgtgcgaggatttttcaactggttgaactcttcagcgctttgctctcctatggaatagcagtacttatcaaacgtggaatggctcttttactcccgatttgcaaccttttagccccgggtgcaaaccgggacacccaatccgggactaaagattatcgtcaccctcaaatccccacaaatcatccacaattgcccatccaaaaaatcatccgcaatccacaagtaattcacaaaattatccccaaatctaaaataatctacaacaaaatttacaaatcattccaaaaataaaaaaaattcacaaaacacgccgctgccgtccgcccggccgtgcgccgcctcccggacgcctccgccgccctgcctcccctcccgccatttccagcggaggagaggccgccagccgtccgctgcctcccatctcgccatctctgccgcttcggtggccgcggccctgccaccgctggaggggaggccgccgcccgcctgccgccaggccgccgctcgctgtcgccgtcgccgttagtgaaggggggagggggagttgaggtgaaggggaagggga

SEQ ID NO: 5054 - DNA, 31820 bp, Oryza sativa
ggcgtccggaagccggcgcacggccgggcgaacggcaccggcgtgttttgtgaattttttttatttttggaatgatttgtaaattttgttgtagattattttagatttggggataattttgtgaattacttgtggattgcggatgattttttggatgggcaattgtggatgatttgtggggatttgagggtgacgataatctttagtcccggattgggtgtcccggtttgcacccggggctaaaaggttgcaaatcgggagtaaaagagccattccacgtttgataagtactgctattccataggagagcaaagcgctgaagagttcaaccagttgaaaaatcctcgcacatcttgactcttcttgtctggcgttatttgacatcagtggcttcccggcacgcacggtaaaacagacaggttgtatcgtttgttcgtgagctcgatcacaaagcaggccagctgcctgctgaacaagcatgtcgcccactctgagcagcttccgtcttcttctgattcgacttgttttggtggctcttctgataggcagcggcctccccatgctctcggctcagcaaggcagcccaggagtccgtgagtatcatctttatatattagcaaaacgattttcaacagatttagctttgccagccaatagagtctagagctactgcccgcagtgtttttgtttccccgcccttggattgctgctaatattttctttttgacaccatcgttgcagataatccgcatggtccaccgcagatccatcatacccgttttatctatcacggtgaggcaggcactgtcatcgggaactaattaaacgcgtagatcgtgttgttacctgttctgctctgtattatactcctactccctcagttgaaattctaatgcgtgatttgacttttgttctgttgattatttcggaaaattactccttggctatataattgcaagggctcaactctgttttaccacaaagttaactgcaattataaatttagcagataattgagcagtatgtacatttaatttgccacttatctcatcgtatccctttgattttactttggtctgccttttctgaacttccatattgtggatcaattaatatacccacatgccacatggtacccataagaggaatacacaggaataaagcctctccccattacctccctcgactctattgtgctcgacctagtcgctaccaactatactgtatattctcgctctcagaaaactaatgtcatgtccgtacgttgcaacagaattagaattatacggtttaatcttttctatccggtttgttgtcttgattttttgtgtgaaaacactgattttctttttgggtggggtgggttttatagggaaccggtttttttacatgggaaacttcaatggtgcggaaagattatagagatataagccacgaccaccaaatgcagcttcgcagctgaatcagcgaatcgaagtgggaaaatctccttctctgaaatttacaatattagcaagagcactaacctataggaccattacaaaatttgtagaactaatgaactgttttcactaaattacataaaaattcagggactaatataaaattgctgctaaaataaaattaaaaactaaaataaaggggtaaatgggtggtgccgaaatcaataggatttggcccaccaccactacagtgcagccggcccatcaagcccatggggaaaagggcaaaggggggcgtggggggggggttagggttaccctaaccgcccagcagtttgagccgccgccgccgcacatgacgctgccgagacggcgccgcctccttcacctcgtctgccgccgccgtccatttcggcgcctcctccttcaccactttcgctgccgtttccaccgccgcctctctcatctaccgccgattccattttcgccgccaccatctccccctgttacaccaccgccggtgcctccatttctgccgcccccaccgccacagcagccgaagtccccgtcgtccgccggcgagactaagccgacggccccctctcctcatcggagtaagagaccagtcgggttcggacgctgttcccccccccccccactccgttcgggagcgtgcagctcgaggagccacatgaacggcgcggaaagtagcggggaggctgagcggcgaacgggaaacggtgccggcggcgactctatctccagtgggagggagcactgctcgccggggggcgtcaccgctgtccatccatggagcctggacctggacgcaacggggcaccggtgcactcgtggcgggcgcttgtggtggtggagtcggaggtgtggcagcgacggcaaatgcggcgccggggatggtggcggtggccaccaaccctagaatggcgcccagcatggcgatggtggtgactccatcgaatcgacggaggaggtggcgaaggcgatgaatgcggtctcggcgatggaggccgagaacggcatcgaggatgaaatcaaggtagacgtacttacgcgatttccttagtttcttctgtttctttcgcttttcttgaaatcaaaagcaatgtttccttctttcacttcgtgatctccttcacgagagcgaaagtgctgataacgtgttgaacgtggatagaattgattgaacgagagagattgagagagagaatttaacacaagaatgtatcgcgaaagtgctgataacgtgttgaatgtggatagaattgattgaacgagagagattgagagagaatttaacacaagaatgtagagaatgaatgagtggatcctttattgataacagtgttgcaatatacagggggagagaggcggcaaccggaggcgcgtccgttgctagaatcgccgtgaggcgagaacatgtgtggggcacgaccaaccgttgtgtccctgagttggttgttactctatccatatatatggatgagatcacccaaatatttcataacagtttgacttttgttctgttgattatttcggaaaattactccttggctatataattgcaagggctcaactctgttttaccacaaagttaactgcaattataaatttagcagataattgagcagtatgtacatttaatttgccacttatctcatcgtatcccttcgattttactttggtctgccttttctgaacttccatactgtggatcaattaatatacccacatgccacatggtacccacaagaggaatacacagaaataaagcctctccccattacctccctcgactctattgtgctctacctagtcgctaccaactatactgtatattctcgctctcagaaaactaatgtcatgtccgtacgttgcaacagaattagaattatacggtttaatcttttctatccggtttgttgtcttgattttttgtgtgaaaacactgattttctttttgggtggggtgggttttctagggaaccggtttttttacatgggaaacttcaatggtggggaaggattatagagatataagccacgaccaccaaatgcagcttcgcagctgaatcagcgaatcgaagtgagaaaatccccttctctgaaatttacaatcttagcaagagcactaacctcttgaaaaaaaattttagtcggtctctctcatcccattcctacatttttcctacgatccaatcaaacaaccgttcctatgttttttcctatattttgtaatcctctgttttatacttgcattcttatcaaaatcctgtgtgtcgaaactagatttcggcaataataaaagggggtggctatcaagctggaaaagtgtatgggtttggagacaaaagatttatacaggttcaggccttcttattcaagaagtaataccctactcctgtccggggatgaatccgccgagtgtattattgattgtatgatttggagaaaatcaacatatgcccctagaggcacccggaccccccttatatatgggaaggagtccgtgttacaaaagataatccatatccctaacggaatatgcagatacagataaaatacagtcgtaaccgactaagtctcaaggtatttccttgatgtacaagttgagaaacaaacccgagacacaaataagatattctatctatatttggtatcctgtactcagcccaaataccattgccgtgtagatatgggataaccataatctccacagtagcccccgagacctttgcagtcaaccatcgtagccttctcaaagataataatccgagtgctttcaaacctttcatgccaagactgtaaagggcgaaaagataaagaatacggtgcatcgaatagatgcacctaattaggtgtagcccccaactatgtgattagttaacaaactaaacatatagttgagaacaaaataatagcacaatcgtgcatcgcatgacaaaagcatacgcggcgcctaaagaggcattctagccgactgctttttagccataataaaaggaatccgagtggttagcactctaaaaggttcacgaatgaactcacttgacaggcatccgaataaaaaactctaaagattacccaccaaatattataaaaattatggtaatgaataagtctaatagcctaggctatgactatttaccataatgaaaacaggcatataacataccaaggaaatgactatgataaaaacaagtcattctaagttaaccctgacagctttcgtagcctaaaaaagcttacaaaaacggcataacacctttctgtcgggcaccttttaatttgcattgcaataattccaaagaattatatgaccgcgtaaaaaggattttatcagcattgggcaacactattgtgcgcataaattgccaaagcaaaaaaaatgcctaagtccctaaggagcacaatgggccacgctgtttaaagtactgggctgaggtactgttcaggcttaggcccatttgcacctccgatacccttaacaataaatcccaagatccaatcgacgcttcgtcttccccgccggaactctcgccattttccccactccctgctacagtacagagctgcgccggcaaactagggttcaccattccactcaaatccaccttcgaaaagttcatcaaaatccttcctgtgatccaccgcctcaatccctcacttctcccaagccatccctcgaatcaaatcagcgcattcggataaaatcaatggcggaagagaaagaaagctttgaaggccaatgggcgccatccgacgtgacagaggagaacctgaaggagatggtggcgcacggcgttctccctgctaaggagatcatcgggtggcgaccagcgtgcggtgaggcttttccgacccccgatacacacgaggttgtagtcttctcccatttcttctatggcggcttcgctcttccgacctcaaaatttttccgcgggatattaagcttctatggaatcagcttgcatcacctaaatccaaattccatagtccacatcgccaatttcgtccatgtttgtgaagccttcttggggattaagccccacttcgctctgtttcgccgaatcttctttctcaagccccaaccgaacaagagtaagccatgtgtagtcggaggggccggatttcagctgagggggactctgagccaaaagtacttctctatgcccttcaagacttcaaacaaagggtggcacgcaaactggttttatattcagaatcctgagcctgctcttcctgagtattcttgtcttcctccggtgtaccaagatacctggaactctcttccgattggggatgaagcagcccaagccttggaattgatggatcgcatgctaaaactcaaagaacaaggcttacaaggagagcagattactcggcacttcatcaaatgccgattggcaccaattaaagaaagatcccgtacagcttttgagtttgacggcaagcatgatcctaatcgtgaagaaccagactctctggattttaaaatcatgaaggagagaatgtataaaatcttctcaaatgctattgtcgtcagctactcacatcagctgccagttgtgccatataacgcattcaatccgcctccgcaggtatgtatctgaaatcctcaacccgttaccaaaacataatcttgtcttcatgttgagttatctaaccgtggaggcatctcattcaggaatatgtattgatgaagtctgaccccccaatcactcagcgccggtctcctcgccagcacaccgttcagggaggtggagggccgacaatcagatcagacccacaacctcaaacctccaatccgactgggcagacaggttctcgcaagagaaaactggtgcttaacgacgacgaaggcgacgacggcaacaaatctgggaacaaaggcttgaccaataaactcccaaagcataccactcccaggaaaaactggctagccgtccaatgccaaagattagaacatcttccaggtataaacctctcggtatcatttcacttcggcatgcttctctcatgaaaataatactgaatattgaaagaatattttgcaggaaaccatccgacatagatccaactggaaaagatcctgatccggctgtgacagagccaaattcatccaaggattctgagccaactgccgaaagccagccgactggcgcccatacttcaggtgataaggccgatccgagtgaccaacctccgactggaaactagtcggcagcaactgaaactacaacaactcaagagcccccgactggaaaccagtcggatgtaggtccagatcaagaaactcccgaagttgaagcgcagacgacaacttctcgaggaccagaggctggtaacgactcgatgattgggtctccgaataaagaacaaggatcaccttacgttcagctaggaacatcctcaggtaactcatcttctcaagtgatgccgatttgaataactccagcttattcgtctaatgtcttggaaatacatcagaaccaccaggcgatgaagaagaaattctccgcataaaggcggctgatgactctcgtcctcctatcttactcaaatggtgggacgagaactcacaagctgccggcatcgtcataaatcgtcaaaaagaagatgaggaagtgtgccagctgaagaaagcacttggagaagccactcgcattgtgaatgtaaatcttccgggcgactgcctttgatgactttgttttctctttagcagaactaaaccatgaaccatcatgcagagaatccatcttcgtaatgaggccaagaccgcaactttagaaaagctggttcctcatttgggaactcttgaagcagttagggaccagctacacgaggccaaggagcttgccaagaagacagagaaggaattgagggaccaaattgctcagctccaggattcaaacttcgagctgagaggttcatcaaaaggtaatcttctagatctgtcccattaatttacgctgtcataactgtatcctcaaccatttggatttcaaacagcgcaagccaccaggatggcccaaatggagaaacaaattgaagccttgaaaagagacaaggtagaactggctgcacaaagggactcggccttgaaggagattgaaggtactgccagctaacaatctgaacttctctcttttaaatgcagcaaattcttatcataaatatgttttgtagaccgcaaaatcaaatctcaagctcaatttgacgtcctggttggcaagatcaagaggcttgaaggagcaagagatgaagtcgctagtgtcgctacgccactcgtccaagctatgttcctcaataacagtggtccgagtgcactcgacgcaaccgaaatcttcgacaagctgagagttgctccggatgtatatttcaagaatatcaagaaagctggaagcatgggagctagcatggcattggcgatgaccaaatccttgtacccaaggattgaaattgacgccattgatggctttgctgacgggacaagcgaagaagctgctcttgatcttatcagcaatgctcaaaacgcggctgacaaaattgcaagtgacgttgtagatagattccgcaataccgacctgcagccgagtagtaacaactctgatgatgaaaaaactgaatctgactaagtatgaatgtaacaaatggaggctcaacttgtacaatactagtgtatttatgctgtgtttgataattctagccaagtctttgatttcttaaaagcttttatcaagctttgttgagcctaaaacccaaagaagctattaaaaactttcagtcctcgcagactaagtagaaaaatcaagcaaggcaatgatagaccaagtaagcaaattgaattgataaaaaatcacactccattattatgataatagcccccgactgacaacttcaagaagaacacttgatgttgacagtcaagatagggaagtacaatgataagcttaagcgtagaaacgacgaagatgttcaatgttccaagagttgtcgacgagtgtgccgtcttcgcgcttgagtcgataggaacctggtcgggtgacttcagagatgataaatggcccttcccatagaggagataacttgtgccgatctcgtgtagtttgaattttcctcaaaaccaggtcgccgactagaaaggcacgggatcgaacattgcgattatgataacgccgcaacccttgtaagtatcgagccgactgaatcaaagctgcttcgcggacttcttccaatcggtgcaagtcatccactcggtcctcttcatagcgttcttcgcggaaattacgaaagcgcaaagactcgaattcgacttcactcggcaacattgcttctgcctcatagacaaggaaaaaaggtgactggcctgtggcccgactgggtgtagtacgcaaagaccaaagtactgatggcagctgttccacccatttgccggcataaggttttagccggtcaaaaacacgcgctttaatcccttgaagtatcatgccattggctcgctccacctgtccattgctcatgggatgcgccactgaggcatagcaaatcttaattccaaagtcttcacaaaagtctttaaaaactccgccagtgaattgtctgccattatcagtgatgatccgattgggcactccaaatctatgcacaatgttgatgaagaagtctcgagctttatctgctgtgattgtgacaaccggtttagcttcaatccacttggagaatttgtcaatggccacaaagaggtgcgtgtaaccgccgactgcctttttaaacgggccaaccatgtcgagcccccaaaccgcaaacggccaagacagtgggatggtctgcaactcttgggctggtagatgaatttgtctggcgaaaaattggcaaccttcgcacgtgcgcacaattttgtcggcatcggacactgcagtaggccaaaagaaaccctgccggtaagctttgccgacaatggtgcgtgcggcagcatggtttccgcatatcccagaatgtatgtctttcagcaattgtctcccttcctctaaagatacgcagcgttgcaggatccctgaagggcttttcttgtacaattcagcttcatgcataacataaagtttgctccgccttgaaatccgctcggcttcatctttgtcttgggggagttcttgagaggtcaaaaatcgtatgaggggctctcgccagtcggcttcaatcatagctacgtcatgagtgcccgcaacttgagtagtatctttgtgaggtactgtcggcgcataaaggtgttcaacgaaaacatcagagggcgccacctcgcgcttggatccaaagttggcaagtctgtcggcggcttcattattgtgtcgaagaacgtgactgagctcgagtccatcgaacttgtcttccaatttgcgtacctcctgtcgatatgccatcatattgtcgtcaaggcaggaccactctttcataacttggttgacaaccagctgtgaatcgcctcgaactattagacgctttatccctagggaaattgcaatccgcagtccatgaaggagcgcctcatactcggcgacgttgtgggatgccgaaaaatgtatccaaagcacgtagcttaatctttctccagttggggaaattaaaaccactcctgctccagtgcccgaaagtcgttttgatccgtcaaaatgcatggtccagtgctccatcttctccgcgggggtatcctcctggcactcggtccattcggcgacaaaatcagccaacgcttgggacttgattgaaattcggggcttgaatgatatgtccaaagacatcaactccaaagcccacttagcgatccgcccgtttgcttcgcggttgtgcagtatatcaccgagtggaaatgatgtgaccaccgttaccgagtgaccttgaaagtagtgagatagcttcctggtagtaattagaataccatataacagcttctgaacctgagggtacctcgttttggagtcggctaggacctcgctgacaaagtaaatcggtcgctggactttctggacatggccttcttcctcgcgctcaacgaccaagactgtgctcacaacctgggaggtggctgatacatacagcaacaacggctcctgcgggtgtagtgaggctaagattggtggttcggtgaggagtttcttgaaatcttcgaaagccttctgtgcttcgggtccccactggaaatcatctgttttcttcagtagcttaaagaagggcatcccccgctcgccaagtcttgaaacaaatcggctgagcgccgccatgcatccagtcagcttctgaacatctttctgggtacttggcggtttcatgttgaggatagcagtaactttctccgggttggcttggatgcccctatgagacaccataaaaccaagcagcttccctgacggtactccgaaggtgcacttttcagggtttaatttcatcttgaaagcgcggatgctcgcgaaggtttcttctagatccgaaatcaaatcatccttttgcttggtcttgacaactacatcatccacataggcttcaacgttgcggccgatctgcgttgagaagcatctctggatcatacgttgataagttgctcctgcgttttttagtccgaacggcatggtgacgtagcagtatgctccaaagggcgtgatgaacgaagtcttcaagcagtcggattcctttagtcggatctgatgataccccgagtagcaatccaaaaaactgagaagctcacagccggcggtcgagtcgactacctggtcaatgcgaggcaacccaaaaggatctttagggcaagacttgttgaggtcagtataatcaacacacatgcgccattgccccgttttcttccgaactagaaccgggtttgccagccagtcgggatgaaggacttctttgatgaagcctgccgctaacagcttggttaatttctccttgatcgcgtccttcctgtcttgtgcgaatcggcggagtcgttgtttgataggtttagcatcttctttgacatgtaaggagtgctcaatcacctctctaggaataccgggcatatcagatggtttccacgcaaagatatttttattgttctgaagaaaggtgatgagcgcgctttcctatttacaatctaactcggcgcctattacagcagttttagtagaatcagaaggatctaggggaatctttttagtcttggcttcgctttctccattttttgaaatcttggtagcgggcacttctccttcgctcgccgtggctgcagccagtcggatatcctctcgggcagacgccatctcgcgggtttgggccatgtcgcaactctccttgtcgcatgtgacggcttgcttgatgtcgctccgtagggataggactcctcggggaccaggcatcttcatcatcatgtaagtgtagtgcgggacggccataaacttggctaacgccgggcgtccgagtatggcatggtatgctgtctcgaaatcggcgacttcaaagctgatattctctgtgcggaagttttcccgagtgccaaaagtgaccgggagggtgatctggccgagtggagttgcggataatcctggaattactccgtgaaaaggcgcattgctcggttttagctcggagcgaggaatctgcatatcatccaaggtcttggcgaagaggatattgagtgcactgccaccgtcgatgagggttctgcgaagcttgacattacggaccactgggtctagtaccagggggtaccgccccgggtggaccactcggtcaggatgatccgagcggtcaaacttgattgcaatctctgaccatcgaagatattggggcgtgtcaggctgaacagcattaatctcccgttcggtcaacttttgcttccttttagactcataagccagggggccgccgaaaatatggttgagctccttgcggtggtcttgaaatcctgcctgggtgtcgccgtcgtccttcttcctcgacgtgctttgttcttcatcggagttcttccgtgtagtcttggtgtattgctccgcaaactgcttgtagacgaaacaatctttgggcacgtggttggagttaggatggtgcgggcattgagagttcatgatcttgtcgaacgtgttgacgcgcgaacgctgtcgagaagaatgagtggcggttgcaacaagttcctcaggcttacgcttgcggtccttatggttgttacttccacctcctcccgtagccggcgtacccttgtttggcttccaactgggacccgactgctttgatgcggtgacggcgtcttcagctttggcgtactcgttggctttttcaaacataagcttgactgtcctgggaggcttacgcccgaacttgccgaccaattcttcgtggcgaatccctttggtgaacgcggcgatgataacgtcgtcggtgatgtcggagatcttgttacgttgttcagaaaatcgccggatgtaatctcgaagggattctccggacttctgaataacgttgtagaggtcgtattgtgtgccgggacgctcgaaggtgccttgaaagttggcgatgaagtggtcgcgtaattcggcccaagatccaattgtaccacggggcaatccatggagccaagatcgggcggaatccgctaaagccactggtaaatagttcgccatggccttgctgtctcctcctgctgcgcggattgcgagaccgtagacggtaagccacgattctgggttagtggcaccatcgtacttctctattccagtcggcttaaagccagctggccaatccactcgacgcaggtcgtcggtgaaggctgctactccgtcaaggtcgtcgtcgtggcggtccggcgaatgatgatggcctcgagctgctcggcgctgtatgattgtatcgcgaagatcgacggggcggcgacgaggtggtgagcgaggccgttccactcggcgctccctataatggtcgggaggtgagtgaacggaccgctcgtcgtgacccctgctcctgcgattggatcctgcgccggtggtgctgaggcttggatgacggtagtcatgagatcggaagtgagggactcggctgccagtcggcgtgtggacgctttcggagttaactgggaccgaagccgcaatcatggtcttcgtctggttcaagatgttgacgacgtgatcagattgattgagctcgttttccttgaggagggtgtcgaggagggtgatcgcggcaaccgcattctgttgaggggtacggaaaaccggtgtcccttcaacatcttgttggccgatgaaatcacgcgctcggcgccctgcttccaaggctcgctgccgtcgatcctcagcctccttcgcggtccgctcacgctcctgctgctcacgccgtagccgttcttgttcttgtgcttgactctcctcctccagtcggcgacgctcaatttcgcgacgtgcttcggtttcccgggcttggcgttgctcctccgtctcgttatcggccatgaagacgccgaagtagagaggggtgtagttgtcatctaggcttccgtcgaagtcgtcgagatccagatcgttgtagcgagagctaaactcgtcgtagtccacgatgtcggtgggacgcgagtcgacggtgggagagctgtagtagccatccagctgatccgtcgaaaccgtgccgagtggttggaggatgacgccgacttccctgaagctaggcgaaatcggtgttgaagccgacttccgcctaggcctacgggatggaggtgctgtcgcgatggagacggccgctaaatcgtcggggagcttcatcaggattggtgggtaagccccatcatcttgatctggtgacgttggagaagatgtgatctcgcctgagtggtttgaagccgactcgattgagatggtcttgaagtaacttccagccgcgtttgggagtccaaacgggactgaaatccggttctctcccgactggtccgactccgagtcaaggagagagatcttgccgaagttgttggtgacgaagtcgaggctgccgaaccgaaacgtctgcccgggtgggaagacgaggtcgtcgatgccggagacggatcccattgcactgatcggcgaaaagcttgacgcaccccctacctggcgcgccaactgtcgaaactagatttcggcaataataaaagggggtggctatcaagctggaaaagtgtatgggtttggagacaaaagatttatacaggttcaggccttcttattcaagaagtaataccctactcctgtccggggatgaatccgccgagtgtattattgattgtatgatttggagaaaatcaacatatgcccctagaggcacccggaccccccttatatatgggaaggagtccgtgttacaaaagataatccatatccctaacggaatatgcagatacagataaaatacagtcgtaaccgactaagtctcaaggtatttccttgatgtacaagttgagaaacaaacccgagacacaaataagatattctatctatatttggtatcctgtactcagcccaaataccattgccgtgtagatatgggataaccataatctccacactgtgttttttctattcctccgttttttgaaccctgcgatttaaagagatcctaagatgtcacatctgtgcatacaatattacaaaacgatccagacccacaaacatcggattggatagggtccataaggggagggctaatggccgggtgatcgctcgcccatggcaatcgggcacccccccccctccctcccctaacacgcacgtgcctccccgttgctcccttcctactgcaccatgaatttcaaaccattaaaaaagaacaagttagaaaagaataaaatataatataaaaatctagaatccttaaaaatatattcatgtgactttatacttataaatatatacacagtaaacttcgtatgtaaacaaattatgtatagaaatactctatataaaaatatttgaacccaaattcgaatttgagtcgcgtatataaactttgaccaataaattttaggtgtataaacttcagatgtataactttaggtatataaacttaactaaaaagaaaaactatatggtgccaaaaagaaaaggtaagtggtgaaaaaagaactatcgtctggctcgattgattgctaattagcgatctcgggtccatccaccgaacggtccgacacatagatgaattgttccggaacgattctgtaatatctttgtcgggtgattttttgtttggtatttgacgtttttctgttcgttggattgcactatgattcgtgctggaacagtgcgggatgaggatgaggcccgtgtttggacatgcctcgtggtagtcaacgtgactcgatctctgtgcgaaatttttgattttgcgcgccatgtatgtagagtgatttttttctattatatttgatgttttcttagctgtaggatcatacgtcaagattagtgcaaaaaattacagtcctatataactaaaatcgttaataaattcagctgatatgatatgcaagtgtactgtaattttggtaaaaatattatgtatgtaaatatgtatttgttatttcctttaaaatataaaattacagtcctatataactaaaattatatttatttgtaggtttagttgatataacatgtaagtgtacttttagtagatgggttggtgattattttttcaatgtaaagatctaacaaataaaatatatgcaatatatataattaatatatgttgatacatgtgcactcttctaatcaagtgatcaaatgagcctaattcaactatttaaagtcaatatgatttggatccaaaaatatgtcgcgcgatatatagctagtaccgctgaacctatcttattagtcaaaacattttcaacgatgtggatgagaaaagggcagcaatttgttactgatgcggtgatgccgatatgatatttgtccatcttaattgcttataagctgtatatctagaatcatgtgacaccatcgtttcgcttattaaccgaataagcaaaacaacttatttgcaaacagaaaatattttgtaaataaaacttttagggataattgctcatttaaccctattttagaatctaactaccaataaatttctagtttgcttatttaaccatgcttttaaaaaataaagttaccgtttatccctattttcacaacgatgttagggtttcgtttagaaaaagaaaaaaattgtattattttcagattgaccaaaataaccttaagaactcaaccctatccattcacttccaacctcatccactcattccttatctctttcaggtggcacgcaggggagggagggagcggtggtggtggcggcggcgcgggtagagagggagcggcggcggtgcaccgaggaagggagcagcggcgctaggtgttgcgcggagggcggaacggtggcggtggctgctcactgccgctgggcacggaggggggcgcatggagcaggagctcggcggcgcaggtcgaagagggtggtgcagctcgccgctgggcgcggcacagcgcaggagctcgacggcatgggaactcgccatcgctcggtgcaaagggaggggcatggccagcgatgcggtgaggaggcgcatggagagaagacctcgacgactcgacgcaaagcacttgggcgctgctcacggcgcaagaaagggggtggcgtcctccttctccctttgcggcggtggagtagagagggggcggaggtggtcccgcgacgctgtagatctgaccatcggcgtggtggatggaggcggcgagccgtcggtcgtggttgcaggcgatatgcacaccaacgacaacaccatatggggattcgaggagatgtagatgtacttctgcttgtgttgaacatgtattggtgcttttgtttgacatgttttttttgtggacacaaatttgtaccatgtatatttttttgggcaatttaatattcactaattggtttaaattcacaaggccataaatgaaattttcgtctggagttaacactgtcatgttgtcttcacggaatatggttaggcctcatcttcgtttctacgaaagagggtcaaacaagcaaagtcaaaagatcaaggctaaattggtagttagttttaaagtagggtcaaaagcgcaattaccctaaacttttatatacatgttcttagcaatgtaaaagcaaaggctgaaaaataaattacgatgaaaaaaatcctaaaataaactcgaaatttaatattgaaaatttaaattttaacttataagcataagcataagccaaaagttaaggttgatgtacgtcagcagtagcgcgcaactcgttttttcacttatcagcatttctacttaactagctgccttacttcccacgaagccgtataatttcacggaccacgaacgcataaagaaacagaagtcctagactttgatattttgaatcgaccggcaagtgtatatagagccaagaagtcatcttcacaaaggatcagtaaggtggcgtttggatcgagggacttaactttagtccctatatttagacactaatttagagtattaaatatagactacttacaaaactaattatataaataaaagctaattcgtgagacaatttttttaagcctaattaatccataattagagaatgtttactgtagcatcacataggctaattatagattaattaggctcaatagattcgtctcgcgaattagtccaagattatggatgggttttattaatagtctacatttaatatttataattaatatctaaacatccgatgtgatagggacttaaaagtttcagttccttctaaacagggtctaaattagcccttgtaagtctataggcccaaacctatcttgaatgctgacagtgacgcgagaggaactatacaactacgatcatgctcgaaagtgctagcgtcatgtcgtagtatatcttaccgtacagcaatctaaacattgacgagtctagaaccacgacgttttttttaaaaaaaaaaagtttctcaaaatgagtctagaaccacgaccaaagaaggtccacatttgttggaattaatatacgggtctttttctgtttaaatattaattatttgaaaagtcacaaaacctcatctccttaggtgatatgcatgcatggagatgtttagtaccacattacctattttagaagagggagatatccttataaggaaggacgctctcctaggcacttgagccatatgtggtggagagaacaagactaacatgcacgtgctcgctcacttggtcaaccaggccaggctatatacgttgtgtggagatcgtgcaggcgtcctgataggttgttgggaaattcggttgcctcctcctcacaacacacgcgaaaagcaatttaggatttgcctcctcctctatactggctaatccaggttgttggaaaatttgtttttggaaacgtagtttttgaaaacacatcaaataatctagtgcgtggagcggcatggtgtccggataagttatgcgcaacttatcaggttcggttacgtgatgtggagatcgtgcacatgtcgtaatatctttatataaaccgagtcaccgcctccttacaacacacgcgaaaagcaatataggatttgcctcctcttctgtactgtattgtcgctcgtagtctattctgtcccgatcgctagcgtgcaccgactatcgggagagtagatttccggaacattcgtcttcgatgccctgcatcgagagaaggcggtaataaggattctaggaagtgcttcgcgtgactgcttgctgttcgtccaccacgggtcgtcttactcttcattcgtatgctacgtgccatcgtcaacatctgctaccgcgagttcttcatgcggtgtttgctgctcctcatcaacccgctccacagcagaaccagagtcctcgatacgtgttcaccatgtttcatctatttgatcagttcatgatttactgtctagtttacatgtttagatttcatgatgtggttctgctagtatacatgttcaatgtctttatttattgatggaataatttaaatctacatgtgcgtgcttatatattcaacacatttctcaacagctaacacaaatacgaacttggtggcttcttttcaattacttgatgaagacaatagattatagttcttgacgagacattcaacattgtagttgaaatattttttcctttgagatcgtttaggagtcaaatatttgttacaagctcccagatctgttttgaaaaaaaaaacaaagtttttaagttttcaaatgatctcggatagaaatatgttctatttcaaagttgtatagctcgacgtgatctaaaaatttgaaacgtgaatttacattggttctccgcggttactatgttgtaacaattaatgatcggcaaatatcgtaccaacggccggccatgaacgaacgagaaaacaaaaggcctagacttggtcttgtggatcaactggcaagtgtatatagccaagaagtcttcttcagtagggtatatgatcagtcatcccttgtaagcgtacaggtccaaacctatctcgaatgcagacaaattaacagctcaacggaagcaaaactttgctactgcgattatgatgctcgaaggcaccaacgccatgtcctaatatatcttaccgtatatagtaatctaaacacgtgtgtagaactacaaccaaagaacgtccaagtttccaaacaactgatacaaatattgacgaataagaatatcacatcacacatacaacatccgtgggatttgtcattgagtcaaaaacaagaggtcggaacagaataatgttgcaaacatacaaaagtatcatcttttcattacagccataccctagcgtacaccaaacggatacaaatatcacttggaaagaaaatacatggtacttgaccagtattcgagagagcgaggacactgtgtggatgaaagtgaccaaattgtcgaagggtgtgtttagttctttgggtgcaaagtttttgaagtatacggatacacatttgaagtattaaacgtagactaataacaaaacaaattacagaattccgcctgtaaattactagacgaatttatttagcctaattaatctgtcaatagcaaatatttaccatagcatcacattctcaaatcatggcataattaggctcaaaagatttatctcgcaatttacatgcaaactattcaattggttttttaaaaagatttaactgtaatgaatttaatggtgcaatcaaataaatattttataaaaaaaatgttttgaggtttaaaatcatttgtgaataacaagtcttgggcgtcacattggacaaagtgaaaggtatacccaacgtagccgcaagcagcagagccacctaaatcggacggtgtagatggcacccaatattttcccccaaatcggacacccggcatggaattctttccggattaatgcaaatgtgatgatgtctgcagtgacaaaaccactgcttaatttttttcacaggtcataacctttttcatttcatatgcaaccccgaaataaaaaccatcattaaaaatggccgtggccatctcagaatcataaatcgcatgtaaaaaaattacatatgggtaaaaaaacacgtgtaaaaatacgtctatcttcatggacagttttcctaagaaaccatctgtgaagatcatgatttctatatagacggttgtcttaatgaaggcccgtaaaaattgatttttgaggatggttctcttataaccgcctttggaaacatgggaaatattatttaaaaaacattcataactccactatatgaagttggatgatgaaaaattttatctgagagaattgtagctaccgatgagatctacaacttttttgttgaacaaatttacattagtttagggtccaaaaattaattcgttacaagatctcatatctatttttaaaaataaaattttgagtttctcaattgaccccagcgggacccttgttacatatggagtcttctgacagaagatctcagattgtttaggtgactatataatttttacattgtctgagatatattttacgaatggttcttttatgaagtcaaaactttaaaaattatagaaaaatcattttaagtccaattgtggtaaaacaaagttctttgactaacatcaactttcgtaacatatcactcttataaagacttcatgacataagtaaacaatcatactaattaaagaaacagtttaagaaatatagactcgatcatatttaagaaaatactgtaaggattatagggaactttgtttcaactcaatcagacttaaaattgaattttctataacgtttgaaaattagacattttcaaaataataagagaaaaatgttttttttccgtatggacttctttaagggatctccctttaaataatttttataggcggctctcataaggaaaggcctgtaaaaatatgttttataggtggttctatcataaaactgcccttaaaaggggaggagagcactactaaaatatgacttttcataacatatgaagtatgatggtgacaatctttctatgagaatctaattgtactgactgcggactgtggagttgtggactccctccaacaaatagttgtttataatctgaatctcaaatatttctaaatatatctaaatatttcagatattatttctctacattgtgtattatttcaatactatttatttctttattttcaaaccgaattttacattgtattttttttgcatgtagtattatttaaaaaatatttatttattataaatccaatatttttcaaatatctaaatcgtatttcaacatggactcttctctaaaaactatttattttttaatctgaaatttacatatttctgaattttatttttctacatggactattcttttcatattatttttaatttcgatttcaaataattctaattcatctttctacttggactcttttattataatattttttattcagaattttagactttaagttatatttctacatgagcttttttttctgtttaatttgagaatttctatgccatgatagagaatgtggtggcttatttttctattaatttattaagataatagactataatcctcaacgagatctttaactttctagttgaaagttttgtttttcatttgagatcgtttagggtcccaatattcgttacaagctatcatatctatttataataacatttttttagttttactaatgacctttggatggagacatcttctatatgaaagttaaagagctgggagcaatctaaaagtttgtcttcaaaatttgtaacatgaattttgtcacttttttttgcagttactctgcgtggtaaccatgctaccgttagggttggtaaatcctctcgaattcctaatacttaacatgcaaagataccacatcatcatccactaacacttatcatatttaagcatcatgtaagcatgctatattatctataatttaatagtttattaaattttagagaactaaaatgtaagcatgccaaatcatccaacataattcacgtaatatttcaatatatctctccatcatttgcctatatatatttcatcctcacctagttcatgttatttttgttttctctcgttaagtcatatctcatcaattgtttatagtcctaagatgattaatctatggttcaaattatctctcttattttcttatctcattaagccatatcatctcaatttgttcaccccttagatgtatgatctaaattatcttcttcttttggtctctcataaaaaccacatcatcttacttttacatgaaccatcattctaatactatttaaatttaaatcacatcaatttatataacttatgtgtatgtaagcttatgttgtttaagctatcttacacattatttttactagaaaaatgtctgtgcattgcaacgggtgacgactattttgatcttattattgttatacggtttaattaagataaaatttactgtgtaattcgcttaaaatcatgagttgtaattagagtccgatcatctcaagttagcatgtgagttttttttaaaatgatttcttatacgactcttatgtacttatgtatttgcagaagcaaacgaacttaataaacgactcaaatacggatatgtattttcaaaagtgaacgaacttgaaaccgactcatacacagataatataccaaagcattggcaaaaatatcttcaatttttataatagtagagatttattcttatcattgtaaactcctgtagtaacgcgcggagtttcatgtagttaatagcatgctaagaacggatgagagaaaacaaaatatttatacttgcgcgctgggaattgactggcaagtgtataaggatgaagtcttcttcagtttggtcggtgagtcgtcccttgtaagtctacaggtccaaaacctatctcaaatgcagacagtttagcagctcgacaaaagcaaaactctgctactgcgattatgatgctcgaaggcaccagcgccaggcccaaatatatatttcttttttttaaaaaaaattgcctaaatcttatcatatagcactctaaatattgacgtgtctaggactactcccgtcccataataaagtaagtcacaaataaaataaataataattctaatatttttttaaataggacgaataattaaacagtgtagaaaaaaaaatcaaaatcgttaatattatgggacggagggagtacaacaaaagaacgccattcccagggactgatacaaatttcgacgaataagaatcacatcacacatacaatatctgcaggatttgtcggtgagtcagaaacaggaggtcggaacagaatgttgcaagcttacaaaagtactcgatccgtatcatctttgcattacactcacaccctagcgtacaccaaacggctaaggccttgtttagttcacacataaaaaatttataccatatcacgtttgaacacctgcataaagtatttaatataggttaaaaaataactaattgcacatattgcggataatttacgggacgaatcttttaagcctaattgctccatgatttcacactgtggtactacagtaaatatttgctaatggtagattaattaggcttataaattcatctcacggtttactgtcggattctataattagtttttttattagtgcccgaacaccctatacaatactcggtgtgacacgctaaaactttacacccctggatctaaacaccccctaaacatagcacttagaaagtgaataaatgttacgtgtaccagccggcattggggagagggcacttgatttggatagaagagtgatcaaattatcttttttttgagagaaagaaatttaccaaattatcaaagccgtgagaagcatcaacttttccgatacgcgaaggcacagtgccatgtcttggtatatcttatcgttttgcaatctagacattgacgcgtcaagagaacaaccaccgaagaaccggttcgtatttttcaacaactaatgcgaatatatatggataattagcacatcacacttatagccagcgtacaaattgtcggactcagaatgaggttggaacagaaggttgtaacttgcaacccgtacaaaagtgtcagctttacatttacgcgtgccccagcgtacagcaaacggctagagataagaactttgaaagagaatacatatagattaaagttataaattgtccaagctgcaaggaacatcaatttttgtgatgcacaaaggcactggtggcttgtcaaagtatacgtaccttgccgtatcggaattaatctagacattgacacatcacgaactatgactgaagaacgcgtccgcatttctcatcagctgctgcaaatattgatagagaggaatcacacatcagacatacaacctctaatggatttgtcggatagtcagaacaagaggtcaaaacagttgcaaccttacagaagtgtcaaattcacaatgttgcaacctcacaaaagtgtcctctttacattactcataccacaatgtacaccaaacagctagagataagcacttcgtatttggactactcagtagccggtggaggactcgatgtggttaaaagtgatcaaattgttaaagctgcaaggatgactccctacaggcatgagaaacttgcaaggaatgtatcatgatactcttccaggcaaagcaagtgacaccaaagattctcctagcggagataagaggaggctcttggagagggaatattggagcattgcctcttcttttaatttattttgatcatagaaactttctaaatttaagagagggaatatggactcgattatatggactgagtaggtctaaagggaaatttaatatcctctcactcctacgcactacccttcagcactatccactcgaactaccccgatgcaggattttaggaatcgaggtacgatgttaaaagtaactacttcatttcatattaaataagtcactttggttctgtcctaagtcaaacctattcaaatttgatcatgtttatagaaaaatatagaaatatctacaataacaaattagtctcattaaatttatttactatgtcaaactggaagatgtttgactaagcacaaatccaaagtgacttataatatgaaagaaagcgagtattgctcaataaaaatgatgcaggcctgtgtaagaagaactaatatgaacatagctgaaagtaaagtgaatatggtgtacaataaattactaaactataaagtactcaattgaaattcctttctgaaaaagggacattatgtatttaccatgaatatgtagaaaaaagtcattttcaaataatgtaatcaataaattgttcaagtattattatgttcatgatatttcttcatttatttcaaataaaaatcaattgcaatatttaggacaatgtccgtttgcaaaaatcaatttctatagacggtccttctaataggaccacctgcgaaaataatgatcgccagcgaaaataatgaaaatagttattttcgcaagcggtcctgttaggaggcttgcctggcaccaggccagcggttggcctgtccccactccctcttcttttatctcctctcttatctacttaaaaaatctcctcacccccctttcctcctcccttctatcctctcatcacccctcctccagtgccccctttttcatcccttcctccactgcccgtagtctccaggaatgacgtcgcgacgacagtggtgatgggagcggcggtggctagggcgatgacagcgggtggatccaatgccatcagacgagcaacgacgacgatggctcatcctccgctccctctccctctctcttactctctcctcctctcatcatccccttcctctcctactgtacaagccggcaaaggcacgcgaggaggttggtagattgcagcgacgatagcgaggggtccagcggcacgggaggaagccggcaaaggaggcacgcatccacggcggcagcggcgtgcttcgacaacatcacctcctcagggcatctctgccacctcgggagcagtaggccccgtcagggatccggcgttgccggccttctcccttgtggattcggcggcagcggccttcttcctcacggatctggcgctgccggccttctccctcacggatctgggggcgacagcctcacgaggggtggatctaccaccattggcctccctcgtaggtctggtgacgaaaacgagagcggcaagccacctagcagcggatccagctgccccggtccagggaggggcagatcctcaaccgccgtcctcgggtgtagcggggtctcaacgacaaccattgcagctaaggcagatttgagctagggttttgacattttctttttctttttttgcaattatcatttttgcatgcggactgcattactgaccgcatgctaaagttacttttcgcatgtagttgtgtttctcattacgaaaattactgattttgattgagaaatatatcaacttgttagcaaaactgaacttttttggtatatagaaaaaatgcctgtgcgttccaatgggtaaactaaaattataacaaatataaatatattagatgagtagggtttaggttttcatgatatgaactctttaagaaaatatattcctaaagatagaaagaaagttctcataaactgcaagggcattatcgtgcgcaatgaatgaagtgcatgcagcccaagagtgctttggcccggcgatggaggcctgctcaacgctggatcggtatgagccattcgttttaacggacgacttggatcggttcagaataagtcgaaaccgacggtgcccaaaaaccctaaccctagtttcacatcttcccctcccctcccatcaccgccggccacctgtccccaccggtggtgcctctccccctcaactcccctatccccataggcatcaccactccctctccgccgctccccatcccccttccctcccctcaccccactatcgactcatttcctcctcgttggggtgctaccgccaccccgctcctcactagatctggtctgaggctcatcaggtctggccttgggaggcggcgacgggcggcaatggcacggctcaatcgagccaccatcggcagccactctgtgccccctccttgctggatctggccttgggaggcggtggtggcagctcgaaggcagcagcggcgacttaagctcgacgatggcaaactcatgccgctcgtgtctccggcgtccggcgaggtccgatggctggatttttgttcgatttgggtattttcttcaattgtcattcttcaatcactacaaaaaaccgtaattttcttggcggtcaaaaaccaccaaggttaattattccgtcggccgaccgccaactctagaaagctaggaatgttacaatttcttggcgcttaaccgtaaggaaatgccttctgggcggtcgaaccgccaagcaaattaagaagattgcccactttcgaaagcgccaagaaaagtaaccttgtcggtttggaccgacaagaatatacctttacttggcaacaatgaaactttctagacttggcggccaagagaagtaaccttttcggtcataatcgcaaagaatatgtacaaacttggcagccgttttttggccaccaaagaaatcacttcgccaccaagaaaattgcggattcttgtagtgaattcttgtatttgggatttaattcgaggaaattttgtgaccaattttcgtatgttgtttctcctggtgtaacacgaactagtttaaattttgtgttatttaatgcggactctggataatttttacccgcgttggactcaggatgttacgaaaaaaaaaggtgaggatggacggaaattttcaccagaattcttgcgtatctttttatacgggtataggtttctaaagacaagaactatttattgtcaaagaacatatttacttagatgggtttttttgtgttacatactgcttaaatgcaagatcaaattcaatctaacatgaagtaaaatatatattttgcaataatttatgtgtcaaattgaacatttgatgggaaattaaattgtaacctttaaaaacttttatttctatttaattagaccgcgttcatgcaataacgttaatttgggactagattagtatcctcaatcctcagtagcgaccaggcaaaatgaggacgcagtctatcgagacggtgacactgcaggttgaggttctataaaaccgaccagcagcctagagaagaagaggacaatgagcaagtgagcaactggctaggttacctggttagctagtaacaactcaaacattgtaagcgcatagaggagtctggtgctctactcaactctgaaacaatcaactgcaccagtgtactaattaaatatattactgtacttaagacatggctatcgcgtcgtcgtcgttttcacttgctgctatcctcctcatcatcatcatgtactgctgccccacgggtttggtggaggcagctcgcaaggggccggctgctgccggcggcggcgacgacagcgcgatgagggagaggtacgagaagtgggcggcggaccatgggcgcacgtacaaggactccctggagaaggcgcggcgattcgaggtattcaggaccaacgccctgttcatcgattcgtttaatgctgcaggaggcaagaagagcccccggctgacgaccaacaagttcgccgacctgacaaacgaagagttcgcggagtactacggtaggccgtttagcacgcctgtaattggaggtagtggcttcatgtacgggaacgtgaggacctcagacgtgccagccaacataaactggagggatagaggcgctgtcacccaagtcaagaaccaaaaggattgtggtgagctttaattattcagttcattcattcctttctttttttatatatatatgtatatcttctttttcctcctgtgtcatctcttaattaaactcaagtaactcgtaaaactaatcataataaaattaatgatcggaaaaattgcttacggatcaccagtagtactatttctatgttagatatctactagcaaatatgattttccatatattgattaactacttttttttttctttttgtgtcgtcgtatgtataaacagcgagctgttgggcgttctcagcggtggcagcggtggaaggcatccaccagatcaggagtcacaatctggttgccctctcgacgcagcaactgttggactgctccaccgggaggaacaaccatggctgcaaccgcggcgacatggacgaagcgttccgctacatcaccagcaacggcggcatcgccgccgagtcagactacccctacgaagaccgcgcgctgggcacctgccgcgcctcagggaaaccggtggcggcctccatcagaggcttccagtatgtccctccgaacaacgagaccgccctcctgctggccgtcgcccaccagcctgtgtccgtggcactcgacggcgtgggcaaggtgtcccagttcttcagcagcggagtgtttggcgcgatgcaaaatgagacgtgcaccactgacctcaaccatgccatgacggcggtggggtacggcaccgacgagcacggcaccaagtactggctaatgaagaactcgtggggaaccgactggggcgagggaggatatatgaagatcgcgcgggatgtcgcgtccaacaccggcctttgcggcctcgccatgcaaccctcttaccccgttgcctaataaactaaagagacataaattgagccgataaccgtgttagcgtctggtgaaaaagtagtacggcgtggtgtaatatgcgattcatgtgataaattattatcagtgtttgttatattttactatgccgttttcatgacagtattacttttagaaagtacatatatgtgtgctgtaaagaaatactttgatgacaataagtcactactacggacaagagttttttggacgcccggcacttttggttccaggcaggccataactcgaagtgcacagaaaaaatgaggggaccggcgccggactatcgcccgcacggaaaaatgcattttcccgtgcgggcgtcctaacccgaccgcacaggataatccttattatcccgtgcagtcgactttagaggaccgcacgaaaaaatcaattttcgcgtgcggactttttaagtgaaccgtacggaaaaatactctctctcttctctctcacccatttcaaattttttacacactctccctcttcttttttattctctctccccatttagtctcctcgatctcctcccctcccctctcctctttcttcctctttttctcatcctcacccctctctctctatggctgtatttagatccagagtttggatccaaacttcagttttttttcatcacatcaacctgtcatacacacacaacttttcagtcacatcatctccaatttcaaccaaaatccaaacttcgcgctgaactaaacacagctatttctctctgcgcgcacgcagcatctttacttcacatctttcctttcacaagaagcatcagccgcatcttctccatttctttttctcctctgcttttgaatgaactcgagaagcatcagccgcatctctactacccttgctctgtgtgctccaagtccaagcagcagctagctagtgtggcggtggagtcacggggatagggtggtggccgccggctgtgtggcgatggtggggggtggtggtcgtcgtggaggcaggcgcggacgatggcgggggccacgacaacgacgagcaggcggcgccgcgtgcac

SEQ ID NO: 5055 - DNA, 6915 bp, Oryza sativa
atgtcttgagttgatttattatatagagtatacataatttgtttatggtgttaatcgataccactaaattttagtggtatatatataattttctcttttaaaaattagcagggtggctcattggactctacttcgaaaaatctaatagcttccggggtgtggaccacgtaaaaaaaattgctcaaactgtgatcctttgctaacatacaagttaatatagggtttaatttttttcttggattatacatctaattcaccatttcatgtttgtggggattaatattggataaatttattaaaattatttgtgctaaatgttaatactattttgctggggacaacataaaaaagagatacaatgttgttacatgtatgttttttctagtgaatagtagtctcatgtatggacgtttgtttttttctttttttttcttttccgacaaatatttgtatatcataggaatagggagtgcgtatttgtattcataatgtgcgtatgcacgcatttatatgagctcctacgattgccttttaaattgttagtaaaaaaagtatttttaaaaatttgacaggaagagggtggagcaacgggtgacatgagacaatggtgtggcaaggagtgatcactacgtatatgctcaatttagaaaagaaaccttagatctagaaataaagataaaacaaccatatgggacaaatcatatacacactcttcttttttttccttaaaaacttgacaggaagagggtggagcaacaggtggcatgagacagcggcgtggcaaggagtgatcactacgtatatgcttggatctagaaagaaagagaaaacaactatatgggacaaatcatatacacactcttcttctttttttcctttttatatatcttgcgtaggtatgtacataggagatgtgtataggagatgtgtatgtacgtaagaagtgattagatggtttttagacagagggattattatcatagatctaatttaatggttgaaaaataatggatcaccgattttgtgtgtaaatcgatgaatattatttttattttattttacagtttttcttagattatttctaattagagcatcacatgatatcttagaagcgtttgtatgagtatagaaatgctattactcatagtcacaatctacctttagtcaactattgtttgcggtggattagttgcatcctctacttacctataatttgttgatcgttgcacacttatatgccctttatcatcggtgtttgatgacatacatgctcattatatatcagctacccggctgttaggtgcgttgtgcacgaatacctcataagtaatatgacttggtgattagtaaatggtgacttatatataaaacttatatatatggggatcattgaggatatacaattgatattttaggctaggattgacaaattatattgtatactacatattaagtttttaatatctaagtaataaatttaagacaataataatgttgtaaagtgcttttaagattagctactccctatttaatttatttggctaaaattatttatttagtttttatctcatttgagtgaaaaagaaaaagaaaaaataaaaagaaaggaaggaaggggaaggacgtacactaacgaagtatgtacatacgtgaacgtacacgtacgtgagtgatcgacatggatgtgtggctttctgaattttaaagatgaattaaatatatttggtattttagatctaacggttaaaaatatgagttcaccggattaaatgaaaatcaatggttagatgttttaaatgccacttggcagcctagaagcgtttgtagagatgccatgtggcagtttaggagcgattgtaggaagtttaatggacttttagtatataatagatagatagatagatagatagatagatagatagatagatagatagatagatagatttattctgaaattcaaaattgttattctgaaatccatagtagtcactaacatttattcgaaacaatgtttccatacagaaatagttatgtagtgtgcggtcatgttcaattaataatagcccatgcgaatacactgactaattaattaacgacttggctcgtactcaaaaattatatatcatcatccatagtccatacgaagatcttgctctgtgttgaggattacctgacttcaaagcccatttagaaatatacaaagaaaaattttcgattcctgctcaataaattaagatactccagaagtcaacgaccctccccaaaactctggaattgtgttgacagctgccatgatttcttaaccagcttacccgcccttgaacgtgcattgcattaaggtcaacacttatgaacaatctggtttacatcgtagtatagtataagtgaagtatatagattttccaatgcacacccagacgatcactggtattagtttctattattattatattatcgaggaccaccgcatattatgatttcttgatgcattaatggtacgtgtgggtgggtgcagtaaacaagatcaacacttacgaactaatctaaaatgcaccgctagtaactcaactcgtgaggtgggtgtaatttagtcacccatcttgtaaaatgctcgaataagttactcatcttatcttgtttttagggtgcaaatcacataaaacatatgttgtgtagggtgttcgcaatgaagttacgtgttgtgttgatttgttttgtaaacatgatcacacgatctataaataagccaacgtgcaatactaccggtattaaaatccaattaaagatgaattttgttattgattattaagcataatatggtggcgttcattaaaaacatgagtattaggatatacataaaaaatatgtgtattaatttgtaattgtaatgcttgccctgctcacatagctaaaaaatgcacgatgttaggtcaatacgacctccaatttgaaaacaaacaatccatgtgacaatgtattcggtaagatttgcaccatcgaagcaaaatgagtgacatatttgagcaatttataagatgaataactaaactgcacccatcttgcaatttatgataccaccgacgtattatactcgaccgttaagttatagcaattaaatatataacaaatcttgggctgttcgaaactctatattgaagtagcatattagtgacacgtaaaacgaacaactcattagtgtgtaattaagtaagtattaaatattacaaatttaaatataaattatttaattttttaagaaaaaaattatacatatttttttttataaaacacatcatttaactgttcaacaaaagtgctaatgtaaatagtattactagtactccatccatttcatattagagcaaggctaataatacagtcgacctgttggctataaggttctttgtagctttctctcagtctacctatatgatagttagctatttataattaatatagggcccacttgtctctctcacagagtttattggttattgtgcccgcttctcctgtcttctctcctccacctcagcatttagctggcttatagtctactatattatacttgctcttataagtcgtttgacttttttctttatcaaagatctttttgtttgactaaatttattaaaacaattagcatcatctacaccactaaattagtttcattgaatttaatattgaatatattttggtaatatgtttgttttgtattgaaaatattagtatatatttttacaaacttgatcaaatttaaacaaatttgattaaaaaacaaaataacttatatataatacgaaatggatggagtaacatgaattaacgtatttctttttataaaacacatcagagtacagcgacagcttacagagtacagtacgcatatacagtataattttcccagctatctggaagtcctctgcagactacacgtcacacgtatacaaagtcatcggaacgtagtgcaaaagtctgcactaattaattgtatcgtgttactaatagaggtcataaatatatctttacatggaggactgaaaaatgccacgtagaagaatatatatttgcatctttatcatggtgtggggtctaaaatgaccatagctaggttgatcgatttgtttactaaaaatacaaattctatttatattgatataaacgaaacagtacgtaaatacaaaatgtttgtacgtatttataaaaaccggagcgagagttgacttgcaaaattaaattaatttagtggaaagaacggcaaacatatggacacgtatatgatcatgacatcgatccagatctttttgcaaataaaatgtggattattatttacaatttattcaaaacgtcagaatatcaaccatttggacttgaattagcataagccaagtccaagccgtgcgcgtgtatatatatatatatatatatatatatatatatatatagctagctagctgttcttcgctatctagtagtgaacgggccgtttagttcctaaaaagtttttctcaaaaatatcacattgaatctttggacacatgtatgaagcattaaatgtagattaaaagaaaaactgattgcacagttagggaagaaatcgcgagacgaatcttttgagcctaattagtctatgattagccataagtgctacagtaacccacatgtgctaatggcggattaattaggctcaaaagattcgtcacgcggtttacaagcgagttatgaaattagtttttttattcgtatccaaaaacgccttccgacatccggtcaaacgtccgatgtgataaaaaaaaattttattttgcgaactaaacagaccctagtgagagcatcattccgatggctacacataaataattattgattttttttaccatactactgtttagtggttctgtttgatgttacatgcactctaatatcacggggcgtatacatgaagaaatagtaaattttggcgtgcatatcacactcattttttggtctcgctcaaacgttttatagactgcgacctatgtgagtacatacggtgcattgcagaaagagaaagaagaaaaagaagaatgcagtggagtgtactccctccatactcgtagaaagtcattttggacagcgacacggtctccaaaacacaactttgacttcttatttctataaaaatatttattgaaaagtgatatatgtatatttttatgaaactatttatcatgacaaatttattcatataatttttatatttttaaactcaacaacttgaaagttatttataatttatatttccaaagtttgacttaaaccttttcctaaacgactttgtttacgtttacgagtacgacagagtattcagggaagccatacagtcgaaagctcaagttgcagttgactctccctacacgtgtagaatacatgcacatgcatatatacacggaccaaactgttcaggatttcagatctcatttaactagataaaacttggtggatatatggaaatgaatatatgctaaatattatagaaatgaaggacacatttggtttgggttaaaatattatgaaaatgatgtgaggaatgataatttattatgctttataatgtaataaactgtagatgtaattgctaagcttgaatcaagtactattcaattcaagttcctctatttgaaaaaaaaaacataaatccaagtctaactaacgaataggaagagatatacactactaaaaatgatttttctgtacgaacacatcaataggttgcaaacgggttataagtgtccgcgtctataaatcgacccatattttcccatacagctcctcaagagacgcgtatgcaaaaaaatcaatttttccaagtgaaccacttaaaatatccacacgtgaaaataagggtattttcacgtgcggggctcttaactcaccctcatgcaaaaaatcccccctcctcttcccactcattttttttattctcccccctctctctctctttctctcacccacttctcctcctctcctctctctcggcctcccccactcctcctcctactcctctcccctctcttccctcctgacggcgggcatcggtggtggcaggcatgggcgacggcgacggcgcgcggcggcgtcctccgccctcctcccccccaacccccaaatgcaccctgacgcgtggcgggcacctccagcggtggagagcttggctgcgagttctggcgggcggcagccaacccccgcacagatctggtgcccagccaccctctcctcgcacgggtctggcgcacggcagccccctccggtggtggagggctcggctgcacggcggctatcccaagcacggatttggtggtggcggtcgtccccagcatggatccagcaggagccgccctccccctgcgaatctggcagcggtggccatccccccccccctccccctccccccgctgatctagcggcagcggccctcgcgacgatgatgacctcgatggctagcgggtggcggcagactggatggcagcggatctaggtttcgggactagggtttggatttttagacttatatttttttatattgcagatgggcagcttatgcgcccgcacgcaaaaattggatttttgcgtgcgggtgcgtcacccgcatggagaaatgataattttttgcatacctcttggtgcataagggtcttcgatccacacgcaaaaatctagttttggccgtctaaaaaaatagttttttattagtgatagttggatttatgttaaaatattgtgaaaataatgtgaggattatttgatatgcttacatgttaagctcttgaatgcaataatttacagatttgcacgtgtttgtatctaaaaatataataattgctagtgaatgatgataatatgtttacatatgaagctttagaatgtaatgacttgtat

SEQ ID NO: 5056 - DNA, 16979 bp, Oryza sativa
gggaaagggagctgggccgagaggggaggaggcccaagaggagggagagaaggagagggagagaaagagagggaggagagagagacttcgggctgggcttggcccaaaggaggaagaggagaattatttttaggtttttctttttaataaactttgttaattgtttttgttgcttaataaatatttccggcgctctgaaaattcaagtaaaatttgagggctccttttagaccaaggagaatttaacaaaaattctccgggccacatttgaatttttcttgtacgtattttagtgtttgccaaattcttttcgaatttttaattaattctattattccttttagaaaatgaattttaattcgggatgaatttatcaggacgtgacatttaacaggttcaagcatatcagctttacatctcctcggaggttgctgatgtggcctaactcctggtttaataggtagccgatgttcgacgatcgatcggctgagtccgggcatctcatagtattcccaagcgaagcaatctctaaactcttttaagagctctatcaacttggttctgaactccgaagacaagcctttgctaatgaatgtcggccttggtcgatcgcccggacctatatcaatttctttcaaatcatcggccgacataaaactttgaccctgcttatcatcgagatcatctactgtgtccttagcacaggtatctgaaccctccacaacgccctcaaagtaatagcttgggttctccatcttcaattggctgtatgtcagaatcggacacttttagaaaatctccatcccagacttttccagataaacaatcaaggccatccatttcctagagagctaaatcggcattggcaacattgactgaccggtcggctggcacaacctctatcttgtcacattgccactgaatcaagcactgatgcatagtcgaaggaatacaacaattggcatgaatccaatccctcccgagcaataaactatatgaacccttcccatcaatgacaaaaaacgtggtaggaatagtcttgttgccgactgtcaactccatatttaacgcacctttggtttctgatgggttaccgccaaaatctttgagcaccatattcgtcttgatgagatctacggcattcctacccagcttcctgaacgtagcataaggcatcaaattcaccgctaccccaccatcgaccatcattttagacatcggcttcccattgacgtaaccatttacatacaatggcttgagatgccgattctccgttccctcaggcttctcgaacaccgcctgctccgatgatatgaccaacttagccgattcatcctctacttcatcgacatcggcctggctgattccaaactcggctggcagcgtaaaaaccatattgactggtgctgtaacgacactctttccttttgccaatctctttgcctcatcggctgtagtatcatcggctgcaggaacttgggtcttaacgcgccacacctgccttggtcttggtttcctcagtcaatggttgatttcctcttcaacctcctggaaacgctccctactcctcaatctctggaccctccttttctggttcttcgtaaaaataccagaaggacaccattgattcttcctggtcaactcgtcctcttgattacgatcgtgactcattggacccaatctttgatgaacagggagtcttgtctgtctcagccgatcacccctatcatgtggtcggcttaagctcttaatgacgtcgctacatccaggacaattttcgatagatggcaacctcatcccttcattccagcagaatctgaagaattcacaatcccaatgaggatcaaaaccgttgtcattctcctcgtagcatctctcctgctgcttgttatacctcctttgatatttatcaatgattctggccgaatgtacttggaagctcttcaaacgaggtccatcggctgcttgacttgccgtatacaccatattgacaggaaaaggattcccatcgaccttcatcggcttcttggagtcatcaaatttaatctttcccccttcgatggccacctggatttgctgcctgaagaccttacaatcattggtagaatgggatccagaattatgccacttgcaatacctcttcttgcctaattcctcagccgacgggatcgtatgaccggcaggaagctgaatctgcttttctcggattagcaaatcaaagatcttgtcagccttagttatatcaaaatcatatttttgctcctttccagggttttttacccattgacacggtataaccttcttgctcctcacccactcggctgcagcgatctcaggatcatcatcttcatcatctgattcatacatatactggcagacctggttaacctttttagagcttctcctgacgtcagccgacctatgctcatgcaaggttaccttttgtattaaatgcgacaagctatcgaaatcttcggatgaaaatttctccctgatcggagggatcataccctggaaagccaaatcggctaactgggcatcggtcaaacttaagctgaagcacttattcctcatctctctgaacctctgaatatactcatgtacaggctcatcataccgctgcttgatcgctgttaagtcagacagcttcatctcgtgaaccccgctgtagaagtagctatgaaattgtttctctaaatcagcccaactattgactgacccatatggcaaagatgagaaccatgtaaaagctgatccagacaaagacaatcggaacatcctaactctcaaggcgtccacagctgacgcttctccacactgagccagatatcggctgatatgctcgtaggttgatacgccctcttgtcccgaaaacttagagaaatccgggattttaaaccgattaggaagaggaaccctctcaaaccactctagataaggctgccgatacaagcttccggtctctttaggcttgagcccgaattgttccctcattacatcggcaatcacatcggcccacggtcgttgctgagctgatccttgcggttgctgctgcatggattcgaactgaccaaactggggagcgaactgctgctgagccgatcctcctggctgatattgggcttgtatggatgaaggctggtacctatagcttaagttgcccccttggtagtcgtgcagatccggctgaatattgcgtaccaagtgctcagggaccatctgaggtatcacagtgccatctggttgtacgtgatgaaccaaatgttctggggtggcttgattcccaaactgctgcgcaggttgccccccaggtgctgcgaacccagccgatgcattagccgaccccaggtgttgaatcgactgctgccgtaccggagtctgctgaatcggctaaagtcgttgcctcggcggtgtttgttgatttggttgaaaatgctgctgcggcaatgacgcttgctgaaccggctgcagaacttgttgttgaactggttgtaccatcggctgaactggtggcacaacttgttgctgaaccgactgcactatcggctggactggcggtgcctgctgaatcggctgtacagcttgttgctggatcggttgcaccactggctgaactagcagtgcctgttgtgctggttgcaccacttgttgttgggttgattgtaccgccggttgaattggtggtgcttgctggatcggctgctgttgcaccaaattaacaacgggtggtggcaggaacatagcagcaacctgatcctgagttggctgatttgtaatctgttcggcaggctgtggatactccctcaccagtaatcttggattcatcggctgagccgccacagtagccgatgcagcaggtacagatgttgatgctgacgccgttggttgggctgttggcgcgacagatggagccgcctgcacaactggctgagcatcagtgattaaggtccagtaacttggaaaaactcctcatggcaagtaaaccgggcctgtagcctgaaactcagctatcgagccatcggctattgccttcatcatgtttgatagcgtgtcgactaacaccccggactggttaatcaaagcatgatgtaccgcgtagtcaacccgatcttgaaagttgtggaaagacacttgaagatcttgactgaaatctcctcctggtagttcttggggaatacggcttggagttccatgcacctctggaaggttatcgccttgattccctgcaaaaccaccggtagctcctttggcgctcggctgagccgagccatctggatctcgcttaatttccccatctttagatgaaccggttccagggatgtcggcgactagcttcaacttgtacttctgaacgagtgatcccttgcgggtttgcatgtatgagctcagatactgatcccgtgcttgttgcatcattgcttcgaagtcctgcttctgctctgcttgaacttctcggggtcaaccggcaggacattgtcgtcaacgatgtcggtcagccctggctttggcggtttgcctttgccggagcctgggcttggcggtgctgttttcttggccatgagggggatatgacgtctgacttctaatcaggtcccaccgggcgtgccaaaagcgtgttgatagaaaacacgaggcctgggagatctgcttaactccagtgcaggtccaaaactcgccttcggatacgtgagcgtgccagttgatttgatcctacaatcaacaagaaacagagacaaaagaaccgtggttaaatctataaatgatagccgatcggccaggtgccgatgacatatcatttacgtttgagccgatgtcatatatagatcgatcggcaatggaaaatagataataaagaactaaatctattcgatcggctgtagatattaacaatacataattcttatatcgacatatacttaagttaagtgattgggatagatcggccatcatgccgagacagtacaaatcacttggactaaaagatatgtttataacagaactatatacgtctacagcatagccgatcaaataaatctagcatgcatcggctaatactccgatgcaattctatgttaagatattataacaagcagaatatgccaaacaaaagcttaatgtatgtaaatgcaataatatcttgacatgaaaggcagatttaacatatcagtgcgacatataaagcgaatatagttaaatcaaataagatcggctgaaaccccgatactatcctaattaacaaccagaaagcaggctagagattgctattctaagcatgacttaatggatcaaactcaactgatgcagcattaagtatgaaaagaagaacaatatctagacaatcaagccactggaagattcatagaatggtagatatcttatataatccaaatcaacatcgagatctaacctaatcggctgtcttttgcatgcaaatgttagccgataatagattagatagagatattgttgaagattatgtaagatatgtgataactcggcgaattatataaatgagattagagtatcatgaagatgtaagcactaatccctaagaacataattcgtcataacgagctttacctcttgttgaagatcgaaaccgatgcagctcaacccggaagcaagaactcgtcgaaataaaacaaaaacgaaaggtggcgatgcgccggaattgtattgaatgtgtgtatttcgttacatagggttcggggtctatttatacccgaggattacaagatatgcccgtaccggccacgaccattatctctaacaaactctaaaatatcacgagtctttgcggcagactcttgcccacacttatctataaggaatttacataaataatctaattaatagatacaattgccttctcaggactctatccagacatggcaatcatcttgaagcacatcaaactgagcccgacgtcgcgcataagtcgtattatcagaatcggctataccagcctacttagcctagctcaaccttagccgatcctagccgtagccgatccagactctagccgatccttgctctgttctagaacttgatcttcgtctccaactcttctccgattaagtcccttttcctgatacgaatactgaccaaatttggttgttaacacatgccccccaagtccgggatattcgataatgttccggatttgctataagccgactccgagtaagtttcgcattttaccgtttccgaccgttaccgccgtgctttaaatatttaaccgtcacccccgagaaacctcacaccgtaacttccgtttccaccgcttaagcaaatccaatcccctttcttctccggcgacttctccgacgcaaaggcgactccccggcgattcccctctcgacgagatctctgccctcagctatgtcttcttccgccagcccttctggtgcgccaacaactgagtacgctgaggtaagttccaatcggctaaatccctccttcttcagcaatacattgattttctttcgtctcataccgcttctcccttttccattgcttctggatttatagcacctttctcatcaagtcgcaatcccaagtctttcgcatcgaaaccactatttcctcggcccaatcggcagcctcgaccccaccgatttcattactggtgaaaccaaccggattcccttcaggctagccaatcccaacctaggtcattggaagaacacctttaagtcctggccatctttggagaaactttcgcctgacaggagctggtccacttggtatcagcgtgtatcggctagcaagaaagttcactaggacgagatcggaatcggccaagcacttgccttaactatagccaactctgccaaagatgaactattaatagctgccgccacttacttttggtcaaacaccatcaatgctttcctattcaaccaagggccaatgactccaaccctaatcgatatcaccatgatcaccggattagatgtgacttcatcggccaaccccatgagcaagaacacccggaataaatttgatttcaagaccaaaaacataggtggttggtctggctatgtagcagcatacatgggtcaaggatctgtcaccccccgagagcatgtagcctttttgctcatgtggctggaaaaatttcttttctgtggatccagttgtggccccacaaccaactggcaatttgtagccgaagccctggaatcaaagaaagaattccccctaggaaaaattcttctcggctacctgtaccagatgctaaacaatgcatcagctagaattgctgtcggctcaacagttggagcaggtggaccctggtggttactgcagacctggttaaacctaatggttatgaaggttgtcaatcggcctcctgtgacagaagctgaattccactgccagagccaattacaggtgatgatggagaagaacgcacacatcgcaggtgcacatcatacggggaatatgcatccacacctaccgacgctggagcaaagctatcggctgagctgctcaaggactggttctgtagcttctacgaaggtttcaagaaagatgctcggatctggttcccatatgaagactcaacagaccttgaactcccatcagatttcaggttcgaagacataaatcacgagaaattccagaaatccagagaaatccttatagctgcaatcagcccttgcatccaccccgtcggcatccatcaaggaagaaacatccaggtgtcttatgaattttatcatccaatgagctcagccaggcaacttggattaggccaactcccaatcggcttattctttgccgacaagattcaatgtcgaggccaaatcacatccactctaatgatggatcggctactcaatctaccaggacctcctctgggcagtattgagaacattgagttagccggtttcagaagcaaaaacttcgacagatggtggggtgaatggaagctacatctgtttcaccaattggccacaatgtatatgacagatcttttccctgacgtcataccccaggtaaatattgtcatcattaagtttgtatagtcaattgatcaatttattacttaaccaatcttttttccccactttacagacgacagaatcttcccctcctcatcaaagtaacagcggtaaagacatcgaatacgctgcaggcttgattccaaacggaggtggattagctccccctgtcatcggctaccatgcccctaagacatcaactctcctccatggcctcactagagaaccggccgatgcaggccaaaaaaggaagaccagagcttcaaccacaagcatctcaatcctggctccaaagaaaaagaccagagtcaagagagccaaaccagatgacaagccagccgatgatctgcctgacttagatccatccatcgaacaagccttagacgaagaagccatcggagatgaagtcgatcaagccgcagccgaagtaagcgatactgaaagaacaccatcggcatcacccaagcaaacccttccaactccatctgctccagtccactccatcttcactaattcctttttgaacccttttaccttatagccgatcacccccgagtcttataattgcagaaaaagaagaccgcagtgaaaaagagaccggctgcaacaacatctaaaccagtttcaccagtaagataacttaaactttcaattttagctggctctacttaacgcttgctttcttttcagctttcacctcctccttcttcctcggcccaacaatcatcgagtgatcagaccccttcggccgtgggaagtcaccacattgaggaagaagaacaaccagccgctcctgctatcccagtaagtttcccctagcgagcatccaaatcgactacaattgtttggtttctaaccattttcatattatcaccacaggtcctagccgatcttttctcttttgatatcagagattatcttgatgaaggagaagaagataccacaagcaaagcattggcccctttatccgaatgatgtcaagaagactctaaaaagtatcttagatcggctagaagcatcatcgctagacagcttggtagttgactgtggcccaatcagagctcggttgcatgaaatccaagctttaatcccggatgagttagccgatgtccttactccagctgtttaccttgaacaacatcaattcaagctggagaaagccaagttaagactagccgagcggcgggaacgcaaagacattgagtccactatccaggccaaccgacaacttgtgcatgaagaaaaatccaagctcgatcaattatctgaaggtccaatcaagtccaatattgatcggcttgaagcacgcaagatcgacctcctagcacaacttgaggaatgcaacgctgagctggatatggagcgcaagaaactagccgatctccccaagtcaatcgaagagcagaaagccagactgaaatcggctattaagcatgtcgctgaactaaccaagtccttaaaagttattcctggaaccgacgctcaagatgctcaagccatagaagaagtagagcaaattaggcaaaaagctatgtcggctatccagcaatacttatcacagtaatcccaatgtaataggacttagaaatcttttgtaatcggcaaaacagcttgatacttcatcacttaacatccttctatgccgattaatataaatttaaaattcgcgcaaaaaattttgccctctgtatttgctgcattttaacagacatatatgcccccctagttttacaatgtcaatggcattgataaaactataaaacaactaagggcgatataacaatatcggccattgcaaatcggcaaaccgtcggccgattacattataaaacaactaagggcgatataacaatatcggccattgcaaatcggcaaaccgtcggccgattacattagaaaacaactaagggcgatataataatatcggccatctcaaggcgatgcacatacatcggctatcatgtatcgacactaggaaccgatcatgaattaatccatacactcggataatacttcttcaagtatttaccattaagcgctcgtccataaacttcaccatcaagcccttgcaacatatatgcccccttagaaacaactttatgaccacttgtcgaatttactatcacgagtatcaatcggcaatatcaacttccatacaagctcgccctctgaaaaatccttaggcacaactttcttattataatgccgagcgacgcgttgcttgtccttagtaaccttcgcaagggctcgcaaacatgactgaaccaaatcctccctctcatcggccataagattgtaatactcattggctgtcaaatcattttgcaactccgttcgacgagaaccgattctaacttcccaaggcagaatagcctcatgtccatagacgagtttgtaaggaggaacttggatcaatccatgacaagccatcctataagaccataatgcttcggccaaacgagtatgccactgccgaggataatcagaaatcttccgcttgatcaatttgatcaagctcttattagacgcctcggcttgcccattagcttgtgcataataaggtgaaaaattcaacaacttgatacccacgctatcagcaaactgaacaaactcatcggacacgaatatggaaccctgatctgtagtaatagtttgaggaagaccaaatcgatagattatatgctcttgaacaaactgaatggcatctcccgaatcaactttcttcaagggaattgcttctacccatttggtgaaataatcggttgccatcaatataaatttatgtcccttgcttgatggtgggtttatcatgccgatcatgtcaattccccaacctctgaacggccatggtttaattataggattcatagccgacgctggtgctcgttgaattgctccaaacttctgacaatcctgacaacccttataataccggaaacaatcctccaacatcgtcggccaaaaatatcctgcacgtcgaatcaaccacttcatcttgtgagccgattgatgagtaccacagatcccctcatgaacttcaccgattgcaaccttagcctgatcggcactcaaacacttaagtaataccccatcaattgtccgataatagagctcatcatccagcaatgtatacttcaatgccttatatcgtaattttctagaagccgattgggaaggattgctcaaatactgatgcacatcatacctccaatcattggctgatattgctgcaatctcaaccttcacatccttgatcatcggcttataccccgatgccccttgagtcaaatcgttagcgtcaagattttgatctcgagatacatgcttcaaagtaaccagccgaaactctttcattaactctaagcacttctcattataaaccagcaatgtatcattcttgcattcatattcgcccaccaactggctgattactagcaaagaatcccccatgatttcaatagtatcggcttcaacttccttgagtaactgcaacctcttgagcactgcctcatattcagcttgattattagttgcatatggtttaatagtataagcaaactcaaaacatgccccctaggggaaattataaccaagccgatgccacaaccatgggtgcagaccgatccatcaaagaataaagtctatggcactatttcaaccgagccgatcgaattatcacgatgttcaacaatgaaatcggctatagcttgtcccttaattgccttcggtgattcgtaccgaagatcaaactcggttaaagaaaatatccattttccaactcgcccctttaatatcggagccgatagcatgtatttgattacatcggctttgcatataacagtgcactcattagataatagataatgcctcaaccttgtacacgaaaaataaaggcacaagcataactctctacaggagaataccgagtctcagcatccaagagccgtcgactaagataaaacacaactcgctccttcccttcaagctcttgaaccagaaccgagccgattgacttctcaccagccgataaatacaatcggaacggtattcccctctgtggaggaatcaaaacaggaggagagctaagataatccttgatattatccaaagctttttgctgctctaccccccaagtaaattgctgatcggctctcaacctcaataaaggcatgaaaggttccaactttccggataaattggaaataaaccttctaacaaaatttatgttgccaatcatctcctttaactcggttttattttccgggggtttaatcctctggattgcgttaatgctccgctgagttacctcgatccctctttcgtgaacaagaaatcccaaaaactggccagccgatacaccaaaagcacattttgtcggattcatcttcaaaccatatttcctggttctctcgaagacttatattaaatcggctatatgatcagcaatttccttagatttaactaccacatcgtcaatataaacttcaaccaacgagccgatcaaatcgtgatatatatagttcatggccctttgatatgttgccccagcactctttaggcccaaagtcataacaacccattcaaataagccgattgcaccaggacatcgaaaggccgttttatatatatcttcctcagccataaagatctgattataacctgcattcccatccataaaactcaaaatcttgttccctgatgcagcatcgaccggctgatcggctgctggcattggatattcgtccttcggtgttgctttattcaaatctcaaaaatcattcccattggcttgggttcttgagtcatcggatccatcattcccatagcctttgttaccagtattatccatctgtcacaaggtagaggttgagaggggaagcatacaaggaaagaatagaccagaactagggacaagaccttaaaggaactaattcttcttgctgatgtgctgtttgtttcacttattctgcaagttgattaagcaaacaacctagcatggttacatcacaacccaccgatgcaaaccacgcgctacacacacaagcaaggaacacacgactaacaacactaccctagagggtggcttaggttctgcgacgggttctccaagatcttcactcctgcttcttctcagctggcttcactgcttcctccacttcgctagcggatcctgcagtcttccggagcttcggcaaacaactgacgacatcttcttcttcgcaaagctgaccatctagtacttagttgaaatccgaagaaagaaaagagtaaaccttttgcaaatagcattaggggaaggagaaaaagaggaactttcgcaaataattttatttataaaatatgtccttaggttttatccacttggcttatcctacagtcaagatggctctgataccagcttgtcgcgaccgggaaaattgccttttcccgaacgctagtgtattaatccccgtcccaggaaaagccggggtacaccatacaaacatgatataaaagacacatctttattacatcgataatatttacattattacaaaggcacttaaggcctgacaatcaaaaataaacagcagcggactagcgggcctacggctccatcttcacaggcgctcaactggggtataagccaggactccacctaagacatcttctccaaagcttctcttactgaagaggggaaagattgagcaagaatgagtacaaccacagtactcagcaagccacaccgaagatgcataattaatgcaaggggggtacaaggagataataatataggggttaagttttgcagtaaacggcatttaaaagtcacttagttgcccaaagctattttgtaaagacgatcctagctatacaatattattaaccaaggccgtgaaccctcacgaacctgccttaacccaaggcctacgatgattcagaccgaactggcaacccgaccctgggtcccagctcgtcccaagccaacccaggccaaccattccacagtttagttgttgagcaaattttaagaattataacactgacttgggtacattgctcggcttgcccataaccgagggcgcggctattcgaatagattatactctgatcagaggtgtacatctttacccacaagacacatcttcctcacgtgtaaccacgtgccacataccaccacggtatacggacggaagacgtgacatagttcccaacccatcctagccatagacaagagtaccgacccaatcccacctacggccggaacccccgggacaggcaggcaggactgagcccctagcagcagggcaccaaccctctgccatatgacatctcgactaccgggccgcagctcgtgtagccttcatttgccctggagaatgtccatcgacccccgacttcatccatctccaatccgtgtacttttgtttatgactagactgagccacaaactaagccttacccactagacatgtggaagtacggtagtgctttgcaacagaggcccaagcttaatccttatagtacccgaggtacgactaacaaaacccaaccacgcacctcgagcccagcctaaaccattttgggggttttgaaaagagggggaggtgtgtgtccaattccaacataagccaaccattccaaagtgtccaaatgatatgagaatatcccaaagtctagagttgtaaaaccgcctaatgttacctaattaaattgcgaagcatctacctaaatttaaactagggataccacgagtagagtgtccactagttgaggttttgtttaatctagggtgaacaaggtaataataataacaataacaataataatatggtcataacaaaggtaaataggcatggctaaataaaacagtgataacgcgggaatttaaataaagcgataatgcaataatttaaatcaacataattttacaaactgggattcaatatgttcaaagatgatgtgacttgccttgctcagagagaacggccttccgaaccttcggcgacgaccacgaaccacgcttctggaacctccggaacgacgaagactacgcgaagcacacaagcaaagctacaagcctaaaaagaagcaataacaatacataaaaagaaagcacacggttctttaggttatacaaacattaggagacttgaacgggtcgattcagagctcgtatgaccaagatatgatcatccgaagtttaatgctgttatatggagatttgcgaattattataattaagctttgcaattataaaacatgtgtaagcgctagcctggaaaagacaggaaggctgcgccgttgacatgcggaccccacatgtcaacctaaaggaccacggtagaccgggtacacagagacggtccacgggtcgacggaagcggaccccgtgtgtcaaccgaggcgagtggccaacaaacggagtccactagacaccacacgggctgcacacgtggaaaccacgcggctaccgagcgggcacactaacacggtcaccacacgcacaagcgaacgactaccgacaccggtacacgggtaccggggtcgacgaccgcacaacgggtacggggcgacaccgaaaggacgagggcggggaagcgagaggacggatccttaccaccacgcgacgaggcgtgggaacgacaacgacgaacgggcgcggcggagacagacgggcacaacggagacgaacggcgaggggacggcttcggcggcgatccttggacgaaggcgagacgcggccggcacggggcttgacgacgcggagccgaggacgaagacgaggacggggctgcagcggcgcgcttgacgaacgcggacgacggacgagaacggctcgacggagggacgaacgccacgacgaccgggaacgacgagaggacgacgacgacgacgacgaccgggaccggcgaggaggcgacgaggacagccggcagtcagctgcacggagatggggacgacgtggaacacgccgctacgatgccgacgacggaggcggcgccgcgagacgacgagccgggcgaccgatgggacgtcgatcggcgaggacgaacggtgacaaggaaacgacgatggcagccagcagcggctgcgcggaggaggggacagcgtggaacacgccgctgcgatgttggtgaaggtggtggtgcagcggggtggcgagccgacgaggaggaaggagaggccggcgcggagacgacggcgttccggcgaaattcgggcgacgccgtggcctggccgggagagaggacggcactgcgacgtcaacggaggagacggcgacgtcggtcggcgtaccggcgacgaacagcagccggccggagacggggaagtggtggcgacgccactggacgccggcgaggacgcgtctccggtgctttccccgcgaaacggagggctgaccgagggagagggggcagccgcgacgccgggagaggtggcggcgcagccggagggtgcacgggtgaggcgggaggtgcggctggaggtggccggctcggagaaaagaggagggcgacggcgggaaggcagctccgggggtcacctcgcgaaacggagggcaagccggggtggaggaggtggcggcgacgctggaggaggcgacggcgcggccggacgacgctccggcgaggcgggagaggcggctggaggccggccggcaacgtgggagagagagggcgacggtggggaggtggctagagactacgggagaccgcgggagggggctaaagcgatagaacggagcgagggggttgcattttatagcggagggaagcgagccgagcacgggagagggcggaacggcgacgggaaggatggccggcggccatggttggtggccgggaaaagtgcggccgttcccgatgattgggggcgccattcaagggggaattaagggggaaagagagaggagggaaaggggattaattccccctaatcaatttgggaatcccatgcttgattcgcgcggatttgagggagtaatgg

SEQ ID NO: 5057 - DNA, 9242 bp, Oryza sativa
ccccccaacacacacacacaacactcctccccttcctccccttccccttcacctcaactccccctccccccttcactaacggcgacggcgacagcgagcggcggcctggcggcaggcgggcggcggcctcccctccagcggtggcagggccgcggccaccgaagcggcagagatggcgagatgggaggcagcggacggctggcggcctctcctccgctggaaatggcgggaggggaggcagggcggcggaggcgtccgggaggcggcgcacggccgggcggacggcagcggcgtgttttgtgaattttttttatttttggaatgatttgtaaattttgttgtagattattttagatttggggataattttgtgaattacttgtggattgcggatgattttttggatgggcaattgtggatgatttgtggggatttgagggtgacgataatctttagtcccggattgggtgtcccggtttgcacccggggctaaaaggttgcaaatcgggagtaaaagagccattccacgtttgataagtactgctattccataggagagcaaagcgctgaagagttcaaccagttgaaaaatcctcgcacatcttgactcttcttgtctggcgttatttgacatcagtggcttcccggcacgcacggtaaaacagacaggttgtatcgtttgttcgtgagctcgatcacaaagcaggccagctgcctgctgaacaagcatgtcgcccactctgagcagcttccgtcttcttctgattcgacttgttttggtggctcttctgataggcagcggcctccccatgctctcggctcagcaaggcagcccaggagtccgtgagtatcatctttatatattagcaaaacgattttcaacagatttagctttgccagccaatagagtctagagctactgcccgcagtgtttttgtttccccgcccttggattgctgctaatattttctttttgacaccatcgttgcagataatccgcatggtccaccgcagatccatcatacccgttttatctatcacggtgaggcaggcactgtcatcgggaactaattaaacgcgtagatcgtgttgttacctgttctgctctgtattatactcctactccctcagttgaaattctaatgcgtgatttgacttttgttctgttgattatttcggaaaattactccttggctatataattgcaagggctcaactctgttttaccacaaagttaactgcaattataaatttagcagataattgagcagtatgtacatttaatttgccacttatctcatcgtatccctttgattttactttggtctgccttttctgaacttccatattgtggatcaattaatatacccacatgccacatggtacccataagaggaatacacaggaataaagcctctccccattacctccctcgactctattgtgctcgacctagtcgctaccaactatactgtatattctcgctctcagaaaactaatgtcatgtccgtacgttgcaacagaattagaattatacggtttaatcttttctatccggtttgttgtcttgattttttgtgtgaaaacactgattttctttttgggtggggtgggttttatagggaaccggtttttttacatgggaaacttcaatggtgcggaaggattatagagatataagccacgaccaccaaatgcagcttcgcagctgaatcagcgaattgaagtgggaaaatctccttctctgaaatttacaatattagcaagagcactaatctataggaccattacataatttgtagaactaatgaactgttttcactaaattacataaaaattcagggactaatataaaattgctgctaaaataaaattaaaaactaaaataaaggggtaaatgggtggtgccgaaatcaataggatttggcccaccaccactacagtgcagccggcccatcaagcccatggggaaaagggcgaaggggggcgtggggggggtagggttaccctaaccgcccagcagtttgagccgccgccgccgcacatgacgccaccaagacagcgctgcctcctccacctcgtctgccgccgccgtctatttcggcgcctcctccttcaccacttttgccgccgcctccctaatccaccgccaattccattttcgccgccaccatctccccctattacaccaccgccggcgcctccatttctgccgcccccaccgccacagcagccgaagtccccgtcgtccgccggcgagactaagccgacggctccctctcctcatcggagtaagaggccgatcgggttcggacgctgtccccccctcccccccactccgttcgggagcgtgtagctcggggagccacatgaacggtgcggaaagtagcggggaggccgagcggcgaacgggaaacggtgccggcggcgactgcatctccagtgggagggagcactactcgccggtgggcgtcaccgtagtccatccatggagcctggacctggacgcagcggggcgccggtgcactcgtggtgtgcgcttgtggtggtggagtcggaggtgcgtcagcgacggcaaatgcggcgccgaggatggtggcggtggccaccaaccctagaatggcgcccgacatggcgatggtggtgactccatcgaatcgagggaggaggtgaagaaggtgatgaaagcggtctcagcgatggaggccgagaacggcatcgaggatgaaatcaaggtagacgtacttaggcgatttccttagtttcttctgtttctttcgcttttcttgaaatcaaaagcgatgtttccttctttcacttcgcgatctccttcgcgagagcgaaagtgctgataacgtgttgaatgtggatagaattgattgagcgagagagattgagagagagaatttaaacacaagaatgtagggaatgaatgagtggatcctttattgataacagtgttacaatatatatgggggagagaggcagcaaccggaggcgcgatggtttgggaaccatcacgtctgttgctagaatcgccgtgaggcgagaagaggtgtggggcatgaccaaccgtcgtgtccctgagttggttgttacactatccatatatatggatgagatcacccaaatatttcagaacactcccccttgatcgaatccagctttgatcattgctcatttagtgttcagatatctgtaaagataatcttagaaataattatagttaaatacatcacgtaaaactcctcaaaaacccagtgggaaaaataaggagagaaccatgatatattattgactatttttagatctctatgagtaaagctcatagtatgatccaaaatagtatagtgtctacagttatcatttagtaaaaacacagtggcgaaaagccaaatgataagacatataagcttatgttgatattacctcgttaaaaactttggatgagaaaacctaaagggtaaaactcatacaaaggaaaaagagtataatatgacgaaaataggttattttccaaaggaagatactccccctgaatcctgcaaatttttaagtcgtctcataccaattccttcgacacatttaaagaatgcggagtatggtagagattttgtgaataaatcagcaagattatcacatgacttagtttgcaagatgtttatctctccatgttgctaaagctcatgaggataaaataatttgggagcaatatgcttagtgatgttgctcttaatataaccagtttccatctgaacaacacaagcggcattattttcatagataatggtaggtgattccaatgaaccaataccacaagaagttatatgtggttaaccattctgcgaagccatacacattcacgtgatgcctcatataatgcaattatttcagaataatttgtggaagtggctactagagtctgtttagaagacttccatgaaatagtagttccaccttgtaaaaatacgaattctgtttgtgatctggcgttgtggggatcagatagatagccagcatcagtatacccaattaaagttgaatcctggttctttttaaagaaaagtccaagatctcttgtgccattaagatatcgaaagacattcttaactccagtccaatggcgtttggtaagagcagcgctgtatcttaccaatagatttaccgagaaagcaatatctggcctcgtactatttgcaaggtacataagtgcaccaatagcactaagatatggaaaatctggtccaagcacatcctcaccataggggttttggaaggatatgacttgtccatattaaatttctacaaaattttctaggtatatgcaccttggtgcacaaggattccagaagataaatgctcaagttgtagacctaagcaaaatttggtttgacccaaatccttcatctcaaattccgtctttaaatgatgacgtgcttcattaatatcttgtgtattgccaataatgttgagatcatcgacatataccgagataatacaaaatcctgtggggtctttttgataatgacgcacgggcaatcatcatttttagtgtatccctttagtgaaaggaattcacttaatcggttgtaccacatcctgaccgattgttttaagccataaagtcacttctgcaacttaacacaatacatgttacgatttaccttctgattcgggatgtcgatgccgtcaggaaccttcatgtaaatatcagaatcaagtgacccataaagatatgcagtcactacgtccatcaactgcataaatagacgattttgtactgccagtgatattcaatatcggaaagttataccactcataactggagagtaagtttcgttgaaatcaacgccaggtttttgcgtaaaaccttgtgctacaagccttgctttatgtctcaccaccacgttgttttcattccattttcggacgaaaacccatttgtatcccacaggaaagataccacgaggagtaggcattacagccgagaatacatctcttttgtaaagtgaggctaatactgcgtcaattgcgtccttccatttgttccagtcagagcacttttggcactcttttatagacctaggttctggatcaacttggaggcaatcagcaatttgttcagaaaaattaatgtcgacaattgtagctcttctatcaaaagattctccagtttcagagtagttgatggcaatttcatcaacccttatagactcatcgtgatctcccgaaacaatgtgtctatggtcttccgaattcctagtcttagcattgtgcaccaccgagctaggttgcagactatcatgatctgcttgatatatagtatcaatttggtgtgtaccaactaaaggttggtttgcatttaccgtctttctttgcttattagcaattgtttctcgctgagtggccatacttcctctctttttagtgagtagaagttgagtggttttatttggtacctccactctttttggcgcattctgagcaggaatgaaagatttagtcacacctttataattagtaaatgcatctggcaggttatttgcaagtctttgcaaatgtataattttctgaacttgtagttcaattttagtaatacgtgggtctgaggctggaataccctaggcatcccaatcaatttcctggcattctttcgggtacttgaagtctccccctaatgccgggaaatgttcctcatcaaagatagagtcagcgaaccgggcagtaaatagatcacctgttaagggttctaaatactttatgatcgacggagatttgaatcccacatagatccccactttcctgtgtgggccatagcagtacgatttgatggtgagatcggtatgtatacagcacatccgaacttacgcaaatgggaaatacttggaggatttccacatactaactgcattggggaagtttcatgatatgcagttggttgtagttggacaaggtcagcagcgtgcagaactgcatgaccccaacatgacgaaggtaatttgcaattcatcaataatggtcgagcaataagcttaattcttttgatcaacgattcagccaaaccattttgtgtgtggacatatggaacagagtgctggacctgaattcccaatgccatacaataatcatcgaaagcatgagatgtaaattcggcagcgttgtccatacggattgattgaatcctatgttcagggtaatttgccttcaaccttataatttgagacattagtttggcaaagacatggtttcgtgtcgatagaagacacacatgagaccatctagtagatgcatcaatcaaaaccataaagtacctgaacggtccagatcttggcacaataaggccacagatatctccttgaacgcgttcaagaaatttaagtggttcggctctaattttgagataagatggtctcaaaatcagtttctcagtagcacatgcagtgcatacgtaatcagaggatttgggaaatttatcagtgatcaaatgatgaccaatagagttgccaataatttttctcatcatcccgatactggggtgcccaagtcgatcatgccaagtgtggaatgcatcaacattttgaaaaattactttgtacgcaacatgtgcaatgggcttaatgtatgtatagtacaatcccgatgtgagagatggaattttctcgcaaatgcgtttgccatatccgttttgtttggttaagagaagaaattcttctcgattatccatatgggtttcaatgtgaaacccattttgacggatatctctataacttagtagggtacgggttgaatcaggatacaataaagcatcctcgattgtaatttgtgtacccattgggagtgtaataattgctcgtcctgagccaactatcacagtatcgcacccagcgatagtcaaaactttgccttctctctttttgagagtttgaaagtatttgatctccctaagtatagagtttgtggtactactgtccacaagacataattcctctccaatcggagtgatatccttagacatctatagtaaaagaagaattacttagtgaagaattctttatccacaatatatacatacatacaataatgaaaacataaaatacatagtatgacgtttacatatgttaaaagtacatactctaatgactagcaagtcatacaaccttataatataagggagtttgtacttatctacttattacaaccaatattgtttggcaaacttataggatatcaatataatgtctcaaacacactgagattaaagcagctttatctctaagtgggatgcactgagattacagtaaatctccaagtgggttcgttgagcagtactcgatgagcatgtcatccattgtagaaagtgcagtggtatcttctgggagaagagcgaggttgttctctggttcaataggagcctggtaaaaactttcaacctcaggtctttcttttgtaagattgaagtgagcttcaaatcttagttcctcagaagactttttctcctttagggatttctgatacaggagaaaagatgttgttgggatgcggcaatctttagcaacatgatagtcagatccacacctgttgcaatgcctgttgctattgccactaggttgtggtgccttacccttcccttttcctttccaatcaaccattggatttgcgctgttgttgcatttgcgttttccagtcagattcttagggttattcgaggaatttcccttgaatcctttgagtgcgatactgttggttcagtatcatgtcctctggaaacatagttgatagagttttctctatcttctctgcttccgttggctctttttcgcaaaacttcaacttggagcaaatgttaagaacaacatgattgtattctgccacagtttttaaaatcctgtaggcgtaaatgaatccactcataattagcctcaggccaaatgagttccttttgctgatcataagctttccataggttgagagggctcgtctccaacatgtattcatgtttaagatctttatagatgtagagccttagaagtaaaagggcaatatatagttttctgttctcaactggtagatcccaatcattgggttcctaatttgtatgtgaaatcccactagaagaaaaatttattttgatattggaagcccaaattgggtagttactcccatcgagggcgagttcgtcgaactctatagttgccatgtccctataatcatgataaacattattaatttacagaggtaaattaataaaaagatgatattgtggttgtaatctcaatgcgaaatgtaagacttcatattttgtaatgtttcgaaaaaatgcaggtaatagacctgacaatttgagttagaattcaaaattaggtggcacaatgtggataatctccaagtaattaaacagtgtagtagatctcttaatagtgggcaagttatacttgctgcctaaaacacggtctctaggcaaatatattctggtgaatataccgcagccaatgtttaggactccactaccttgtgctcaaccaaaattccaataatctcattttcaaaacatattctcggaaaaaaacacatgtcggtaatcatcgtgagatgtagacctctgtgagatcggcgagatactcgctgcctaggttacgaccagtgcggccaatttgtagggctccatcgggtaatcatctcaaaatgtagatcacttgttgatgggcgagatactcgctgcctaagttatggtcacgatgaccaaagtataggactccatcgacatgtgattaatttccaagtcaaagtgtgaagtggaacatgcattaaatcatccattaattatgtagtacataattaagagaatttgctaaattaaagtataaaatttataaaattttgtaaattaataaagcaagaaagtagagcatgtcttgaaataatatgcaaaaggcattttattaagacaactaataaatttagtgaaacatggtatttgaaaaaacacctatgttaattaacacataacatcagtagtctataggaccattacataatttgtagaactgatgaactgtttccactaaattaaataaaaatacagggactaatatgaaattgctgctaaaataaaattaaaaactaaaataaaggggtaaaagggtggtgccgaaatcaatttgatttggcccaccaccactacagtgcagccggcccatcaagcccatggggaaaagggcaaaggggggcgtggggggggggtt

SEQ ID NO: 5058 - DNA, 7129 bp, Oryza sativa
tcgccctcccagagggcggtaggcgactatttccgtcaattttcaaaatggaaaattatttttgtaaaacttttaataaaaaaaattataaataaaaaaaattcttcgtttagatggactgctcagatcggctcctaatccattaaaactccggaccgaaccctaatccctaacccttcctttttccccttcctcctcctaccgcaggccactctctccccaccggcaaccgcgcaccttccccacctccgccgtcttccccgcgcccctcccccaccgccgcctctccgcgcccctcccccaccgccgccttcccgcgcccctcttcacctccgctgccttcccgcgctcctcccccaccgctacctctctgcgcccatccccgccgccgccgccttcccgcgcccatcccccaccggcgtcgtctccgcgccccttcccaaccagcgccgcctccgcgcccctccctcaccggcgttgcctctccacgcccctccccaccggcggcgccgctcctcctctccatctcctctcattatctattgattccgatttgtatttgtatttgaatttggattgagattttgtttttgtttggagccgcagcccggatggcgtggggacggccggccggacctcgccgctgccggatctagcggcggcgggggcaggagggggcggcggcccggatgcggcggaggcgggagaggcagctgcccggacggcgtgggggcggcggcggcccggcgtccctgcgtcgacggcggcgacggcggcaccctccccttccggcgtcggcgtttttgtgcttgtgatgttcctgtgttgtcgttgttgttgatgaaatatgatcttgtgatgttcttcttgtagtagtgttttctcttggaatttgtgatgattccgatctgtatttgaattgagattgagattttgtttttaggttggattggatgcgggatttggagaggaggagcgcgtgaggttagagaggagagggacgaaaaaccggtgtgacgaccggaaaaatactaatatttatattagttgtagatatattattatctttatacctattataaaaattaaagatgattttatactcaccttaattttcgtccatcaatcgagttaaacacatataaaacctggatcggactggaaaaaatcatctactggcgatccgtattctcaatcggatgaaaaatgtcttctctagtattataaaaattaaatatgtttttgccgatacttttgtacgtcatcgagttggtttgtaatttcattagcttttagaaatacataaggagtcatgtgagaaatctcttaaaaaaacacttacatattaaagtgagatgatcaaactcctaatcaactcctaatcgcagctcatgatgattttctcatgtgattgaaatcctaagactttacccgttgcaatgcatttttctagttgtatactaaaagtcaattaaactttttcaaattaaacgctctcagaccgtcacgtggtgctctgataaattaagggaataatagaaattatgagaagaaaagtaaaacatccgtccaatgatttttatttaaattgataggtctaatattataaaccgttaatttagattaatcttcaaacggaccgcacaaaacaactacggtctcacctctcctccttccgcgtaggtacgtacatgagcgtacgtacaagaccgaacaagacatccgtttcttctgcttccctcctctcaggaatactcaaatacaaataagtatatagtagtgtgtcttatttctggctaactactttgtaaaggtgaggaaagttaatgcaaaatataaatacactgtgatcatgtgataggtaattatgtatacattcatgtagattatatcgtcatatagctcattccaaatatacgtaactaaattagctatgtaatacttaatatttaaaaataaagtttacaccattatatatttaaccattaactaaattaattatctagttgtgaattaacttacccacaagaggagtacacaggaataagcctctccccattccatttcttaactcgactctcttgagttctacctagtttctaccatactgtatgttatcattttgaatcaagtaaagttgcgttttgttttaatttgggttagctttgttccttgtcgtcgcagtgaccggccaaccttatatcgagcaccttgctcgtgctttctccaggccaggccgtgagagatgggaaccacatcaaaaaatactaaaattacttaagctatctcatttaaaaatgtacccaaaatttatatacgggtcagtgactagggtagattagtctgggaataaaaacaaaacaaaccaaggcccagtctgatttaaattgttgagtggattatagttatagattttctagtgataaattaaatatctattatatactaaaagtcaattaaactttctacgaacgttctcaaaccgccaggtggcatcctaccaacgttcctaactcgctacatcgcattctaataaataacaaaaattcctaagaaattctaaaaaaaaaccaaaacatctgtccatccgttttcattaaaatagttggtcccattatttcaagccaacagatttatctaaaaaatctttccacctccacctccctcctcccacacgtaacatctcttccctttgtacgtagtcacgtaccatgtacaaagaaggttatatatgtacgtgcagcccatatatgtgtcctccttttctctctacaccctattttatagctagaaatttaactaagcatggcgagttaaatggtaatttaatttagaattaaactgataacttaagatcaataaaatccaaaatatttcaagggttaattggatccataccattgcaaatttgcctattccgaaaaatgtcattacaattcgtctattcttaatcgtgccattgaaattttccaaaattaaaaccgtgccactgccatcacgttttccatccatcccctgcattttccgtcttcttccttcattccctcctcaccgccgcacatggtgccgtcgccttcgatcctcaccgacgcaggaggcagcccagagcttggtagcggtgtcaaggtggcggaggacggtggcggcgatggcgccgtccatggagaagaggacaaagccatcaccgccggggaggccgagggtgcgggaggcaggccaaagggaggagcgcggtggcggaggaggatggtcgccgctgtggaggaggtcgcccctgaggccagcggttggatccatgcggcggtggaggagggggaggaggaggagacaggggatttggggatcgggaagaggagggagaggagagtgcgaagctgcattgcgacgccgccagcatggttgggtcgctagtaagctctctctcctcctccgagcttgcctcactacgggagatggcccgcttgacgcctccgtcgtcgccgtacctcttgctgctgccaccgttccaccgatggctacgtggttctcgtcctccacggcgaggtgcgctggaggcatgacgacagagagatggagagagaagatataagatgcagagagaagatggaagagagaaggaagaagatggaaaaagaaggatggaaacgtgacggcaacggcccggttctaattttataaaattttagtggcatggctacaaatagacgaattgtaatgacatttttctgaataggcaaatttgtaatggcatggatccaattaacccttgttaataaatagtcttaacaatcggcacaaataaaataaacttgataacatatattgttccatcatatattacccccacgaacatgcatagatgaattagatcaataataaaaaaacaaaaatatcaaaactcatatcctatccaatcctatatcctataatactatataattgatccccacttagtgtagttattaggaattttcctgagctgtggttaagccacgtcacttcttttattttcagtcattcgatcaaacctcgtgaatggtccaatcgtactccatcacacacacatgcacgtccttttgcctccctccgccaccgatcgaatatgccgccgccgccgggtgcgcttgcttcctctcccacatcgcgcgctgcttccacctaccacccccgcgcgcgccaagacgtgggccctctcctccatcgcccgtggcagtgcgggccctccctccggccgccgcgctcgctcctcctcccatccccagcgcgagccagccgcgagcctgccatcctcgcctcgccgcgctcggttccccatccctcgcgcactctaccgccaaccgcgccgcttctccaaaaccccaccccaccccaacccgcccccccccctcacccacacacacacggcggcaccccaggttgccccacccccagcgcacagtcctgccgcttcgcctccaccccccggtgattctttctccacgcccaccaacgagcagcgcgcgcgccacagaagcgagccgtcaccatcatcagcacatcaatggaatggggatcgccgctgccatagcagggcaagggacggagaaagccagcccagcaggttcccattttctgtctatacatcttcctctgataaccgtcacaattaagttattatttgttaacccaaagttaatatgatgaattcatttatcatgtttattttccttcttatgtactgaggaaacttcataatcagtcccctaattttattttatggacaaatcagtcaataattcatgaatcccattttttcatatgggaattagcattaggccagtcaataggcggaactttttccccctaatttgtatgtatcttaggttactcatgtttgttgcttttagatgtgccgattatctggatacatctataaattacggattggtgactgggcaataagctagcttcgtttcatcataggcctattaactgtatcgaagtattttccagctttgttcttcccattgctccatttatatatttagaacctaacttttggtttatataagttgtatcctgagcttttggttgatataatcatcatgcttgaataagctcctatctctgtaaggacctgaacccatcgcttcgaaagtgggtacatctatgctgcatgctgttgttatgttatctggaatttttgcatggatctttctttcaaacacatatcggtatataatatcccgcggcaacacacggggtatcatctagttactataaagttataacccactaacttttaaagcttagcatgcaaagatgccacatcattatccactaacaagttgacacatcatcatccactagcaatcaatacatttaatattatgcaaacttgttatattatctataatttaaaatttcttacattttagagcttttaaaatgaaagcatgttaaattattatcccacataattcacataatatttcaatatatatcttcattatgttttataatatcttatgtacatacataagttcatcctcacttagttaatgttatctctctcttctctatttgagccatatcacgtcaattgattttagtgcttatgtaagtttatattgttcagctatcttacatattatttttatttattgttatcatactgaactcccacagcaatgtgtggggtttcacctagttacctcatatgttcgtgaataattacttctcgagatcaactctacttattttcagggagaaaattatatttgtactgctaaaatttaatggaccaattaacgccatagacaagtgtcaactctattccataaatggattcaaaactttaaaaaaattatcacttccatcttatctaattatcattccacgaagggcgccaagcatggataacatagtatgctctgctactgtacgaatttgggggggggggagggggcatgcatatgactaagtaaaggtgaccgtagtgagaggctactatttgcaaataaagttcaactaaccttctttctgatgctattctttagctgataatgaattaggcgttaaaattgtgctgcacgctgattttgaggagcacaactatgtagattaaggacacatatttcaaggcataagagaagaaagcctaggtggctacactcggcttcaactattagaggggcatttatatataattttaatggttttatcccatgaattggtaggagcaatacttcaaaatatttatacatatatttaaaaacaagtgagacatgaacaatttagtattaagtagagatgatcttttcttgtattactgacatattaagtttgttttcttgtatggatgtaattccatcataactgataatacaacgataataaataatggtgacaagcaagtttacatatatccggaacaacgttatttctgtttgaatatgaaagatactattgtcatttggtatataaaaatttatggtctagatatttatttttttattaattataagctgatatactgtccttataattaattaatatggtgagataggatttctttagcatcatttttgtaaataataaataagtggttctaattataaggtgaagcatgattttttaacaatcttttataaataagttgcccgcgcatctgcgcgggctttctttctaattcgtaaaaaaaataacaaagaacttatttttagtggtgtaagtaattgattcaataatccggtaaataaggtaaaaaaatagggcatgccccgctaagtatactactggataaatgaaatttgctgggtcacgcaaaaatcacattagtcctggtttgagtaagaaccgtgactaaaaatatctttagtcccggtttgaaaacccacgggtactttttttatcgttaccaaccggaactaaatatcatttgtagttccagttaaaaacatgttagaccctattttaccaaccgggactaacgatgcatctttaatcctggttatttataccaaccgggatcaaaataaaaaaaatcgtgaaaatccctaccccgagtcacgggcgctgccttgtccttatcccctcctcttctcctcctcctaccctcccattttctctcctgcacctactccccccc

SEQ ID NO: 5059 - DNA, 37701 bp, Oryza sativa
aagtttttgcttctgaaaccggctaactcaatgttctcaatactgcccagaggaggtcctggtagattgagtagccgatccatcattagagtggatgtgatttggcctcgacattgaatcttgtcggcaaagaataagccgattgggagttggcctaatccaagttgcctggctgagctcattggatgataaaattcataagacacctggtgtttcttccttgatggatgccgacggggtggatgcaagggctgattgcagctataaggatttctctggatttctggaatttctcgtgatttatgtcttcgaacctgaaatctgatgggattcaaggtctgttgagtcttcatatgggaaccagatccgagcatctttcttgaaaccttcgtagaagctacagaaccagtccttgagcagctcagccgatagctttgctccagcgtcggtaggtgtggatgcatattccccgtatgatgtgcacctgcgatgtgtgcgttcttctccatcatcacctgtaattggctctggcagtggaattcagcttttgtcacaggaggccgattgacaaccttcataaccattaggtttaaccaggtctgcagtaaccagcagggtccacctgctccaactgttgagccgacagcaattttagctgatgcattgtttagcatttggtacaggtagccgagaagaatttttcctagggggaattctttctttgattccagggcttcggctacaaattgccagttggttgtggggccacaactggatccacagaaaagaaatttttccagccacatgagcggaaaggctacatgctctcggggggtgacagatccttgacccatgtatgatgctacatagccagaccaaccacctatgtttttggtcttgaaatcaaatttattccgggtgtttttgctcatggggttggccgatgaagtcacatttaatccggtgatcatggtgatatcgattagggttggagtcattggcccttggttgaataggaaagcattgatggtgtttgaccaaaagtaagtggcggcagctattaatagttcatctttggcagagttggctatagttaaggcaagtgcttggccgattccgatctcgtcctagtgaactttcttgctagccgatacacgctgataccaagtggaccagctcctgtcaggcgaaagtttctccaaagatggccaggacttaaaggtgttcttccaatgacctaggttgggattggctagcctgaagggaatccggttggtttcaccagtaatgaaatcggtggggtcgaggctgccgattggccgaggaaatagtggtttcgatgcgaaagacttggattgcgacttgatgagaaaggtgctataaatccagaagcaatggaaaagggagaagcggtatgagacgaaagaaaatcaatgtattgctgaagaaggagggatttagccgattggaacttacctcagcgtactcagttgttggcgcaccagaagggctggcggaagaagacatagctgagggcagagatctcgtcgagaggggaatcgccggggagtcgcctttgcgtcggagaagtcgccggagaagaaaggggattggatttgcttaagcggtggaaacggaagttacggtgtgaggtttctcgggggtgacggttaaatatttaaagcacggcggtaacggtcggaaacggtaaaatgcgaaacttactcggagtcggcttatagcaaatccggaacattatcgaatatcccggacttggggggcatgtgttaacaaccaaatttggtcagtattcgtatcaggaaaagggacttaatcggagaagagttggagacgaagatcaagttctagaacagagcaaggatcggctagagtctggatcggctacggctaggatcggctaaggttgagctaggctaagtaggctggtatagccgattctgataatacgacttatgcgcgacgtcgggctcaggttgatgtgcttcaagatgattgccatgtctggatagagtcctgagaaggcaattgtatctattaattagattatttatgtaaattccttatagataagtgtgggcaagagtctgccgcaaagactcgtgatattttagagtttgttagagataatggtcgtggccggtacgggcatatcttgtaatcctcgggtataagtagaccccgaaccctatgtaacgaaatacacacattcaatacaattccggcgcatcgccacctttcgtttttgttttatttcgacgagttcttgcttccgggttgagctgcatcggtttcgatcttcaacaagaggtaaagctcgttatgacgaattatgttcttagggattagtgcttacatcttcatgatactctaatctcatttatataattcgccgagttatcacatatcttacataatcttcaacaatatctctatctaatctattatcggctaacatttgcatgcaaaagacagccgattaggttagatctcgatgttgatttggattatataagatatctaccattctatgaatcttccagtggcttgattgtctagatattgttcttcttttcatacttaatgctgcatcagttgagtttgatccattaagtcatgcttagaatagcaatctctagcctgctttctggttgttaattaggatagtatcggggtttcagccgatcttatctgatttaactatattcgctttatatgtcgcactgatatgttaaatctgcctttcatgtcaagatattattgcatttacatacattaagcttttgtttggtatattctgcttgttataatatcttaacatagaattgcatcggagtattagccgatgcatgctagatttatttgatcggctatgctgtaaacgtatatagttctgttattaacatatctttcagtacaagtgatttatactgtctcggcatgatggccgatctatcccaatcacttaacttaagtatatgtcgatataagaattatgtattgttaatatctacagccgatcgaatagatttagttctttattatctattttccattgccgatcgatctatatatgacatcggctcaaacgtaaatgatatgtcatcggcacctggccgatcggatatcatttatagatttaaccacggttcttttgtctctatttcttgttgattgtaggatcaaatcaactggcacgctcacgtatccgaaggcgagttttggacctgcactggagttaagcagatctcccaggcctcgtgttttctgtcaacatggtgtcgaagaggtgaagcgcaaagtgagagcataaagccataagcaggcctgtggtaaaaatggaagggggggagagaagcggtaacccggggtggggttatataacctcatcgcgacggttcagcttccatccaaccatatcatgacacgtgttcggggctagacgaaatggtaaattcccatcggaccggaccggggcagaacagtaaaaggcagaatgcaaggatgggaaggcccacggggcccattactattcatagtagtttaaagaataagccaaccttttcaccacttgctggcgaacatagcaaggaaatcccccccaagaattttttgtatgaacatggaagcgaattatatatatattctacaggtgtgcagcataggtttcgacaggaacatcggccaaaagggggcgcctcgtggtacacctttcaatttgcacagtctcggccgaggctccctactcacccttgcccgtgaggggcttgttggaggtataccacggaaggcctttggccggacctgccgaaaccaaggacctgggtaacaggctcggaccggcagtaagcggcgaaggatgaaagagaaaccacatgggcgaaggccacaaggcgaaagccgaagacttagagtacgccagcttcgtcagcgaggtcgacctcgttagagggccgcaaggacggagatggtgaggtgaaggcctcggcgtcaaggcacgggtttcaccaaaagtgccgaactacgccgccaggaggcccaacaggccgccatgccctcggggggacttcagcaaatagatgggcctagtcatttaagcccaatagaggcccttacatgtaaaggacacggtgtgccctcaataatgtcactattataagggtaactatgtaaattcccctgtaaaacctaaaccctaataggggaacatgtaatagagctataaaaggccccctagggccatgtaataagggatccaaaaaaaatttcactaagtaatacaattattctttatttctaaccttatttctaaccactgttgagagaaccaagactttcgatgtgacgcagttgtctattcgacaacataaggcgtaactgctttttcaccaaattccctaatacaaggcggcaacatctcggctaccgtttgtgcatgcaagcattgatgagtcatgtactggtgcatgcagaataaaccaactcttgatgatgtgcatgctggtcattcgcttggaaagtgcaggtgtcgggtggatgctgcatggtggttattgctggcgaaactaccgaaacatcacacatgggaagaagagaaattatcggtgcaactgctgttaagggcacccacaatagttatctataggctctctacaagatatacatgtcagcatattttcctacttagaagatattaaataaagagatagagcaaagctatctactaacttagagatagtctatagagaaaaacaaggcaatgcatacgagagctatagatatccatgtagatatactattgaggtggtttactattaatctagtctattgctgagatgtacatgttttatagagagcacattactttaccattgcgggtgctcttagaacgattttattggtttttgtgttgtcaacaggtgcgccctacattaagtaactgagggagtatggatcactcaagagacagcactgccaactgccaacgcataaagagaaagtacaatagcaagctagtataatcacgtatcgagaagaaaagagaagagagaaaagaaagcggactacagatttatcgccagttgtaacacggactctaaaatattatctgtgtataagaggtgggactgaatattaatggtgtagtatatttctatagttaactattatatgaataggctattagattagctatagataacttagagatagcagctggctaaactattaaacttgctctaatgtaatcaccctcaggacctcaacgtacatacgatgatgagcaagtttaatagtgtagcccactactagctccagattatctataaccaatgtaatagccaattcatataatagttgcttactatactattaatatctagtcacatctgtcatacatacattatattttggagttcgtgctgcagctggctacagatatgtagtccgctgctcttccccctcttactttatctttttaaaatatttttatagctggcttatagcctattattgtatctgctctaatcgtgtttgctttaaaagatggtaaaggaggtttccatgattgcgtcgagtggccattattctcgatggcagcaaagaaaatatatgtaaacatcactaactttggtgcgtttgcgtgaaagttaccacagcaaatcaataaaataagtaccatctgtttgtttttaaatagaggacgtcggttaattgttaaatacatatttaatcattcaacttgtttaaaatttttatcttagaggtcattcttgaaagtacgtacctgtggtgataaaataactcacaataaaattattaacaattatatattttttaataagacgaatggttaaacgtgtgactaaaaattaactgcatcaattattacaaatgtggtatattattagagtggctactattatatgaaaaatataactattttttatcatagccgctgcaggtgtataacaaacagggctatacttttcaaaggcaaagacaaactttattttctaagaatactataaagcccatgagcatgaaaaacaaattaaagctattgtcttcaacagaatattgctattgaaaaacagagagtggttggtcatgaccactatactagggtttgatttctggtgtaataccagcaatttactggcctttatatttttagcctatggttaggcaaaggtacatgcagctgtttggtgggtagtgatgtttgcacgtcttttgtatattaatcgagaaaaaaatatgaatggcctagcttttctgaaatgccagcaatttgttgggcttgagcagatgactcgagttgcgagcttgcaaaagtaccattgattcggcccattatcatggttcgttgccagcagatgaacagaacctagtttgaataagttcaccttatgtctctcatctcgacgtcagtttgaatcacattcttagatcacaatatcagatataacgtgtgttagtgatatgccctaaaggcaatcatagagatgattgaatcacacactatgtttacatatttatccgactttgtttcttgaaatagataaactcattattggttaatgaatatgtgattttttcatgagactctttatgttatgtgttgctatttctaaaggatccctgatcaaatatcatatgttgaacaatatgtttagataatcagcacatgtattaattgatgatcatgtctcatgtatcatggtatagagataccaaattaataatgtagacatatgttagtgaacatgttgttggatagacccaacatgagacactgcaagagccatatgtgttgtgtcatcagtgatctcatttagtattggtgttgaatcctcagacttgtgattatcatgattcccaacatgtgtagtagcttacttagggactgctaaactctactccgtaattgggtagttataaaagtagttttcggatatgctatgaaacatgtagtgggatatgaataatcaagatgggatttgcctctcctatggagagatatctctgggcccctcgatattgtagattatggaagtgcatggccatgccaaaggtgattgaggagtcaatcacaagttatataatctatcaatatgttcgagtgaatgattgagctattagaggatggcacatatctagccttgagctaaatcgatatcgtgaggcaaaggagttcatacaagtatacactagagattcagccgatatgatctttatgtatgcccggtgggtcaatacgttctgctaggggccgctgttgacgcgtggaccgaaaaggagttttcggcttagagctgagtatacatgaacctacagcatcgcacgcttaatgggccgaaataaggggattggatggagatccaatatgagcttgattcggatagggatccgaataggagtcctacgggccttggaggcccgagtgatggatcctatatattcgtgaggggtgtgaccggcggaggcatcgcatcacgtgagaaaccctagccgtcacttccctccccgagcaaaaccctagccgcgcgcgggtgctagcacatctgcgcgtggcattccgtccctgtacgtgtggataccggtagaggcgtcgctggtttgtggtgctgatcggcgtgagagtacggcgaggagaatgcacgaggaggagaaggtcgagccggtgcgatcgactacttcctctacatcgacgcacgctacttcgcgagagttccttcgacttctcagcgtcttcttccgctgcgcagcgtgtcgagtggtaacgatttatgatctaatacttgcatggttcctggttgggatccaccgtagttgttagttgtgtagcggtggttttcagccggttttcctgtaataaaccatgcaattgtatggttttcgggcccggttttccttataaactgggtcaattctcttcttctaaatataaaagtggaacaaagttccgccttaggtttcaaaaaaaaaaatattatgctaagaacttaatttttcacctgaaagaaaaccataacaattcagttacataggtatatttgaccaacatggcaaactacttagatttttcaattcactttctcttatgacccaaacagggcaagcatacatgccttacgggggacaaacatgatcatggtacattgctccaactaaaaattcgttttcattattttacactaaagccataaattctgtatgccgcgagcacaaaacgctaaagctagtactatatagttgtttactgcattaattttactggtttcagaagaatcttcccttacggcgatggaattagggaacacaaaatgcactggtatccttatacagagaaattggaagttgcaaaacaaatgatctcttgttcatggatcatccactcagcaccatccattgtgagacgttggaggctatgagagaccacagggaagagagagataggtggccgtattgtacctgcttggagaaaggacctagggaggtgagggcgtcgtggatgaggtcgccggtgggttccgctaccgcctgctctcgccgaggcccgccaagcctctccgcgtccacggaggcctccaccgtcgtgcatgctctagtcccaggggaggatcgagcgatggcgatggcagcgcaacgggtggagggcactgcgaggaggcacgatggtcggctcgaacagcgcgacagcaacatagcggcggtgaatcggtggtgccgcgagggtgacggcgacgatagggagataggggagagaggagggagtggcggcggcgattagggtttggccggggagggagattggcgattcggcgcgacgacgagttggcggtggggcatcgaccgcagccggaagagaggaggaggtggcgccggcgactaggttttgaccagggtagtaggggcggcgcttgtggcggcagaggagaggagaaggtggcggcggcaggggaatggcggagcgatctaggcgtcgattgtgcgaggtcgagagggggagcaattgggggaaggagaacgtgaggcggagacgatcgtgaggcgagacgactgatgcgacgacgacagagcggcggcagtcgagggatcctggacgacgtcggatgcgacgacggcgatggggatcgggttgagggcaagccggcgacggggatcggtggcggcgagacgactgatgcgacgacggcggagcggcggcagtcgagggcggcggcggcggcagtggcgtcgcatgaaagggagcgattagggttggggaggggaggcggcgcgtgagagtgattgagaaggggtggagaagagcggcgcaatcgagggatcgatctggaccgggagatccagatatatatatggtagcgctaaaccgcacctggggtgcgtactaactaaaatgctcccctcatgttttggtgacgatttgtgaatgattatttgtgatgtcaatcgattttggtgacgatctgtggatgatttggggatttcaatttgatttgggcacatggcgacggtggtgctcagtgaggtcggctccattcgagccggctctctcttttttttttctcgagcaaagcaaaaggtgccggtttaataattgtcataggttctggtttctattatcagtgccgaccaataggtgtcggttgggaaatcggcacttgtaggcggttcccaaccggcacctatgcccctttttttaagtagtagttgtcagtatcccgattcgtatcctactatgatacgatattacgatcctattaagccgaaacgataccgatcccatctagtatcttaattctcatagtatctcgatcctactattcattactacacgatcctacgaaatcttagatggtatcccgattctacaatccctattatactataaaatattatttaaaatatcatggtttgaaaataatgtaaataaatacactcaaatttatataaaaacagttaaatatatcaaaaccaacgtggtttctcttgataaatgtctctatttgcatgacatatatcattactatatttttatatagaatgtctatatataattaatataaatattaattaaacttaaaaaaaaatctcatagcatacgatatgatattacttttatcaaaactatactgcatggtatcccgatcatgacattgctcttgtcgtccccctcgaatcatcgatggcgccgtcgcagctgccgcgctctagcgtttgccggtcgttcagcttccccctcaactcatccagacatccacgtgcaaaagctggcaaaccgcacattgtcagcatgcgcgtgcacgtatatactccctccgtcctgaaaaaagataaaccctgggtttccgtgtccaactttaactatccgtcttatatgaaatttttttataatttgtattttcattgttgttagatgataaaacatgattaatattttatgcgtgacttgtctttttaatttttttcataatttttttaaataaaacggacgatcaaacgttggacacggaaaccagggttggtctttttttgagacgaagggagtatgcagcaggtaactgattggtcggcaatggcggatatgcacacgtacctgcgtcgcgactcgacgcgatcgagcgtgtggtggagggtgtccaactcttgcggcagaaggtggttactgggaggagctctccggccgtgggcttgcacaggaatcggaactcccgccgccgccggccagcgagagagaacaggaaagagagagatgggagaaatgggcgagaaaaaagaaaaagatgagatttgaatgattgacatgtgggctgttatttttttattatttttctgactgacatgtggccccataagcgtctcgtaggacgaaaccgctatcacagcttagagactcgatctgctctggtttttaagatgtaggaggcattatattggtatctctaatatcgaaatccgtgcacaactcttgcaggggctcatgccacgtggctcaacaggtttcgccggaaagctctcctgcctggcgcttgcgaattgagatggtgtgatggtgtgacgctcgttaaaaaaaaaaaccctatatatgggccctgcaaaattaacagccctggacgattctagacaaatcgaaaagattccatatttaggtggtgtttaaatattctgaagatgaatacgaagataaagattaagtgtttcacgcaaaatgaggtagtaataacgtgtgattaattgagttttaattattacaaacttaaaaaatggattagtcttatgttttacaacaactttcatatataaagtttttgcacaaaacgcaccacttagcagtttgaaaagcgtgccacttttatctaaaagtttatccagtatttgttggagaaaagaacatagcctaatcttataacatgaattttgtgcaacttaatccttggcacacgtccttactcacggaattggtctccacgcaaaatcatgggtatccatgtaaaatatttgaccgtccgtcttatttaaaaaattagtcatacataaagtattatttatgttttatcatctaataacaataaaaatactaatcataaaaaaattaaataagacaaacggttaaatgttggacatgcacagtacaaaactgcacttatttcggaacagagaggacaaatttaattgaaaatcaagacggtacataaacaagtaacaccaagaattttcctaccatgttgaaaaatatctagataaatacaaataagagaaataccattgccatgttcatatcttatatttatagaaaattgaaaccaattgctaggtagaaataaacaagttaacagtaaaacacaggtaatacacacggggctatcaatttattggcgtgccagcaggcacgctggctttctagttatggttaagggatgtggttcaatctataacaagagttgtgagaggcaaaatagacttattcatttctgtaatgccagcaattagttgggcctgagcaactgactcgagttgcgagcttgcaaaaggacccttgattcggcccattatcatggttcgttgccagcagatgagcagagaccctagtttgaattagtccactttaggtatctcattttaacgtctaatttgaatctagtcgttagatcacaatatcatatataacatgtccatcaactccgaaaataagtgtaaacaaggcacagtttgagcgacggtttcgattgacatagcacctacatagttggtttgtcatggtcctcattctacgtgatattgatgtggcactagaagcaagattcaaaatattcaaaattaaaataaaatacgtgagattcatatgtgaagataaaataaaatacgtgaggacccgtgtgttagtcgatcccacttcctcctcactctccctttagtggaaaagcaggagagaaaaagggagataggaggaaagggggagagaggagtgacgtagacggagaagggcaaggaggagagagggtgaggtggaggaactttgacccacttgctagtgggttccactatattttttatctttttattttactggtatataagtgtcgacaggggatacccgtagaccggatatagagggtgttggggtacgttggtacgagggtctacgtagtacgacatcaagtaaacaaaagacgagagttatactgattcaggccacttggtatgtaatagccctaatccagttggtatgggattatatgatggaaaccacatattacaaaaggaatagtagaactcgatgataccgacgagaccgtagtcgagttggttcgactagatcacccggcgacttggctcctgtaggctccgatttcgtaggctgtggtggatgtgttggcggtgagattctatgccttaggtcctgcccaggggctcccttttatactgcgggtcagttgatctctaagtaggactcggagatatcggacccctcacgatattgtaaagacccagtctcgtccgagtaggactccttccatccgtggattctgtttctatcacgtgatagatttccttaacgcatataggaactatccgtatacccgtatacgcgtaggtataccatatcagtactcatcgtatatccaaggatagagggtgtaccttatccgtaaccctgacaataaggtcctacatattttgtttcaacttttttatttttaatctttgcttttagtgccacgttaacatcacgtggaacgatgactaaatcaaaccagccacgtagcgtcacgtcagctaaaaccatagtccaaaccacctagtgatctcacttacactggtttaaaatgttgaggaatacactatattctgtactgcgatttgagaacgtcttttaatctcgacgttttgatgagcgatctaaaatcaaacttattgcatatatattatgtactccgaataattagtttgggtttggcccaaactgttcctttgctgctaggccgtaagtcggcccaatctaaataactgaaaggtaaaacccttctcgcaaaattactttgccacgtcatcaactgaatatacaccattagattgtcactccggacattacagaccgttgggtctgtcgatttgcaaaatatcttcgtgatccttcacgaatcttctattaatttctggtccttccccttacatgaaaggattacgttatgttttcattttgtcccctccccttaccgcgcgagtgttcaacccctcagtcctcacagtgcaccgcaagcccacagcggacgcctcccactcccgcgccaccgaagccgagtaggtctttgtcaccgctgtcacccaaacatcctcctgctccgccgccgccaccgcaacctaaggttagggttaggggttagggattttctcctcggtggtgtgtggcgacgaaagtgatcgactccgtttcgaccgcacctagtcggtatagatggtgacacagggacaatctgggcattacgaaaaaattatcacaattttcaactgggaaatgataaaataatgggtccgatgtcctatggcaaatttcacaatttttgtacagtgtcctggggcaatatcacatttccgcggtgtcccttagctaattaattacacgatttttgcgttttctgtagcaaatttttcctaaaaaaataaggaatattgaaagacagatctaaagtccatataataatacaatttagaaatatctaaaatttgataaataattaataactatcacatatataccatacaatataaatattacacattggtagtttggttaagttggtataaaattaaaattatgttatcattttaatatattttaatgataaaattgagaaaatatatatgctattatatgagagaaaaatataatcatgctagccgcgtaatatgcgtaggccaccatgctagttcacatcagctcgatcactaggtgatcgtgtatagaccaaggtcagtttaatgttagcaactattaatgggtcgtaacaatataaaacagtgaaagataaactgaacttagtatgcattatcttcactatttttcttttccttcattgaacaccgatctatttatgaacaacttgcttaatcgctgcttcttttcattcatcggccacagccagccaaccaattccacacagcaatgagcatcctcaagaccaccaaattaacctccctcctttttttaccttgccagataattaaacagttaaccctgcattacagattgatcatcatcccttgatgaccccggcgtttctgtacttgtaccggatggcccagaacaagaagaagaggtagttgagcgtgctgagcacacacatcacccagtagaacctctccaggtggtagtggttcaggttctccccctgcagccacgcccgccgcccgccgcgccccgtcgcgctgttcaccaccgtcaccagcaccgagctcaggtagtaccccagcgccagcgacgcccacgacagcgacgtcgccagcgaccgcatcctcgccggcgcctcgctgaagaagaactcgagcagccccgccagcgtgaacaggtcggcggaccccaggaacaggtactggaacgcgatccagaagaaggtgatgggcagcggcgccgccgcgtcgagcattccggcgttggacgccacgttcttgcgcttcacctccaccacggcggcgacggccatggcgacgatggagaggacgagccccgtgccgatgcgctgcaggtgggtgatccccatctccgtgcccgtggcgcgtcgcgcgaacgggatgatgatgtggtcgtagaccggggcgaggaggatgatgaaggtgaccgggaacaccggcagcgacgccggcggcaccttgagccccccgacgcgggtgtccatcgtcgccgcctgctccacggagaaggtggacagctgcgccaggcagctgttgagcatgatggtggagaagaagatcgggagcaccatgagcacgatcttgacgtcctccacctcctgcaccgtgcacgacagcgccccgcaccgcggctgccgctgcaccgcccggttcaggaacaccagctcctgcgacggctcggtagccacctcggcggcgccgtcggcgacgccgcagatgtcgccgggcttgcagtactccttcatgtccgtgctccccgtggggctgggcgcgcggtcgatgacagcgccgttgctggcgctctgcgcgccgccgcggcgagcgagcgcggcggcgaggacgaccttggcgatggtggtgagcgggctccccgtgggcaccttgttgcggtacagcctcgagccggcgacgaacaccgggatggagagcaggatggcgatggtggagatgccgaacccccactgccaccccttgttgtcctccacccagacggcgaacgtgacggcgatgagcgcgccgacggagaggcagaagacgaagtagttgaagaaggtggagcgccccttccgcccccgcggcgcgtgctcgtcgaactgctcggcgccgtgcgacgggagggagcccttgatgccgccgatgcccagcgccgtcacgtacagccccgcgaacagcattgccttcttcggccccgacactggctcgcacgccgcgccggcaaccttggcgcaccccggcggcatcagcgacggcgtcctcgcctggatcgtcaggaccaccagcccctgcaacacattcgcgccatgcttgacatcaacaaaagttcaaaaaaaaaaaaaagagagagaatcatatgcaggcccatataaaatcctaaaatctgcagacgagaaaagcttccaggcccatgtactgtccaggcccaaatacatgcaactacgtacactactagcatcaattttctgctgcaattttccgttgcaaatttgcactgccatgttgcaacagagcataccaacccgatcagaactgtgacgccaatgtctagtggtttggttggggggaaagagatatcaggtgacagcgagaaaagtttcgtggggggaggcaagtggtcggcgtgctgcatgtgccgccgcggccgcgcgcccgtgcgcgacgtcgctttggccttcgccgtggtccgtgagccggttaaagcggaggaggaggacgagaccgacaggggcccgtcgatgggttcgtagtaacttttgtcagcgctgaccggcaaacgtaaatacagttgggctaaaaaaactcgaggcagctttttgaagctggtaagtcaaacgtacggcgatcgtttttgtggcgctcaggtgagatcaccaaggtcagcaagcgacttggaagtactccctgcagattaatactacctccttgcacaaatgtacgacgttggttagttcaattttaagctaaccaacgtcaaacaaaaaaaattagagggagtaatacttatcgttttagataaaaacatgatcataaaaagtaactttgatcattattttctattataatatataaaaagcatcaacaaatatatgattttattaaagtagtttttaagactaatctatatatctagtctccaattttctaagataaatatttaaaaaattattcatagttaaagattttaatatttgatctcaccattatccaaaatgataagtactatcagtctagagatcagtctggaggctgtgtttagtttcttaaattggagagaagtttagggaaaactggtagtttgaaaaaaaaagttgggagtttacgtgagtaggaaagttttggatgtgatgtgatgtgatagaaagttgagagtttggaaaaagtttggtgtgaactaaacatggcctaacttagtagaacggacagccaactagcagtactactgtacttgtcatatcttaattagcccatcaaatcgggtgtgcagaaaagatgtttacaagtggtggtggtgctcctgtacttggtacgatcggtgcgtacataggagtaacattattgagtaccattgtgtatttgtgtattcagtggctattctatcaggatccacgtggcgcaatgtgcaacactccgaaagggaaacgaaggaaaacaacaaatgctcctacggtctatcctatccattcgtttccgatttccacaccatattgcaacttgtttggtggcgtacctatactatactctctatcaaaaaagtgttaaacttattacttttatcatcagtatcagaaaaaaataactcattctgtatgtaacgaataccaaaagagatatatatatatatatatatatatatatatatatatatatatatatatatatatatgcagtggcgaagccagaatttagagatggggggtgccatttacgagacgtggtaacttacttaaggttcggtgaacagtgatattgtagcgttgatgtatgatcactaactcgacatcatacatgttatagcgattagctagaagagagaatgagaacccatagatcataatttgccaatttaaacagtttgttccatgattttaattggagtcttgtaatcatttttaaaatgataaatcagttaactaagtcatttcataagtcatatatagctaggcagttatcctatatagttagtctcatctgcaactaatgatgtaattaatggtagattataagggctaattatccttgggagaagagatgggaggggaggtcacataggggttaggggggtgttggccctccctggcccctacggtggcttcgccactgtatatatgtgcatgtaagtgtaactaatgaatattaaaatgatcgtttgtgtttcagacaatcatctaagttatctattcgtttaagtcttagataaattgagactatgaataatgactattttatttggaaacacgataatctttccagaattatggctggactgaatagcttgcttccccggcctataaaattttacgcgcgaataactcaggtgctcacaagtcaaacaagtgggtaagaagaaaaaaaaatacgagtaccaccaaaacgatgattaatattctccgggagggaatagcaaaagcaagctaagcacaggcacagccaaagaatgaaagaaaccctgcaggcaaatcccgaaaccaaataaactccccacttgatccacttgcaccgccccagcggcgcgctagctagcagccgcaggtttcgttacgccgaggaggcaggagtagggcaacgcgaattgacgcggcgcgcgcgcacgcacgcacgcacggtcgccttctcctccagggctgcgcactcgcggctttagccggccgtggccgcgccgcgcgcgcgcgcggttgccccacccccacccacacccaccctgcgaggctgcgacaacacgcgtcggtccgtacgtctctctcgacgtacgcgaggaaggccgcgcgccgcgcgggcggtggccaagattggttttgtgcgactctctcgtcgcgcgcgttgacgacgagtgtgtggtgtgatgtggtgtgtggcggtgttcggtttgcacgtacgcacgctagtggacaccgtacgtcgtacgtgtgtgttggtggaatgggagaactggctggatcacagtgatgagttgtgtgattcgatctggggctaggggggtggggataagataagagatggtggtcggtctcggatcggatcggatcgcgggaggtggtgagagaaatgcctcgagaatgttccacagtggctcttgttcctgcacgttgataagatccgtgcctatccgtaattccgtgtcctacatggtactgtattcgacgatcactaatccatcgtaaatttgcagccgtctctcttaatcatcatagcccgtttttcgctttttctggtgatggaccaactcataataaattaaccaatcgacgacttatcgatcgatccatcaaccgatcgttcatgaaggggcgacccagaaaggtcaccgtgtaccagatcaaaaaagatcgatcccgaccggtcaggatatatccaggggtgcgcgcgtcgtaaacacgtacatttcgtgcgagcgactgcgcgagaggagtggtggtgacccgggcgagcgcgtgacggggcggccagggcgccgggctccgcgacggttttggccgcgcgcgccgatggaattggcggtggatatatgaatggattattattgccccatcccgaagggtactcacactcacacactgacactactcaggcggcggcgacggcgaccgtaatacggccctgtcccactcgtggtgtgaccgtatgagatgtagcatttggtatagctaaggtcgtgtctagtccatcctcaactaccccaaattttcaactttccattatatcatatcatattcaaaacttttctacacacataaactttcaactttttttttaactcccaacttttctcaaatttttaacttttttcatgaactaaacacagcctaagatgtaggctacctatgataggatgggcgctataccataccagaacgtacgctgcccatgcgcctgtcgacgacggtggcgacgtagtcatgtcaagtaactagctgattgatctgaatttgggttatcgtccgttccttccatatatgtctctgagcccgacgatatgagccctacagtacacgactgttgatgtgcacagtaactgtatttttttggtcaagaacaatcatgttcacctcgccggtatggcactcgacagatatatacggttactgcgcccacgtgatccaccgcaaccgcaccgcacacgtctctatacccttatacgccgtatacatccacttccatcctacgtacgtactcatcctacgactagctctagtgctctacgtacccacacaatcataaaaatacacgacatttttgggctaaaaatacagcgcacacataaaaaaaactcatactaaccactctaaatttgaatgtataatgttgctgatttctaagtgatgtttaaccatttgttttatgtaaaaatttagtgcaaatatgaaaataaatataagttacgctaaaatacttttaacaagtgaaaaaaataatatttacataattattttttctaaaaaatgagctaccaaacgttatgttcagaaatcaataatatttatatatctaaaaaatgaaggcagtatgaacaaagcagaacacttcaacgcgcaattggttgcaaacacatatttatccaaatatctcgtagaaatagaaagataaagtatttcaaagaaagtctaaaagctaaaagcttgttgttgttttctccccatcgctaaaagcgagcagtagccatctatgatccatcagtggaccatcacagttgcaatccaaccaagctagcctagccaggccaaacttgaggaccatgaatcgatcgatcgattgtcccaagcccatgcataaaagcatgcctttgtgatagatactcctacttagatagatatcctagcacctagctagtgcagtcacgatacataggggccgtgatcagtagttcagtacagggttccctttgacccaggctatctctgcttgcttctagcgaataaagtgatggttacaatttaatcattggcctaattaatctctagatgtgaatatgtatgtgatctcatgtaacccaaatcacagggaattgcgagctccgtttagccaattaattccaggcaattgtcagatggaacccgtggagaaaaagaggtttcagtgtagggccgggatcacaaaatctttggtcaaatagtggtggtcatctagcgggaactagagccgttcgatcctgcctcgagattagcatcctgtttggctaatctttgacaggtgtcattttttgaccttgtccacgaatcttgtggggtctgttctaattggacggtcaggatgccatcatgggagcggctctgattactgacaggtcactttacgacatgcagctaaattctagagaccggtcaacaaaacatgttatgatggtaatagccaacgggtccagaagatagaaaggaagtcaacgatgacgtggcagcctagctggacatgatcatcccggtatattccttccacgtcagcatggagatacgatgagcaccatgcatgcatatatatctcactaaaatatacactcctacatatgtgatatgtgtctatccggaaacatcttatcatcttattattatcggtatatctacgattgcgtaagctggcatatggtttccttttttcctaggcttatgacggcaaacaattataaaggaaattaagtgagtaactaacttgcagactaacttaagttggatcaattactctcaactaaaaacacacaaaaatggtagtagtactacaactacgaacaaatttagatgtgctgttacttaccaggaattccacaaaggcgctgatgaggtagatggcgtaggtggtgaagaaggcgtcggagaggaagccgccaaggagggcgaggaggaaggcggtgcccatgaagttggtcaccgtcgtcgccgactgcgacggcgagtagtgcatgaaattcatcaggtaggtcaccaggttgctcgcgttcgccaggaacgccaggttctcgagcacctccaccactgcacacacaacaaagccaatattctcaatccaaattcgatcttgaaaaaaaaacaaaatctctatcctaatcagtatatattaaattaagttatactgttctccattggtaggattttccattgaaattaagctatgaaattgagctaccgtgtgccactgaaaaacttcagatggagatgtaaagttgtattttaatcggaggcgtttgaaaaattggaagtactagcatgcatgtgcggtggtaactgatataaccgccccagcataatgtgtgcggttcccagtgcatgccggccaattttctttgttctccctgaccgtttcggccttgcgattcgtgcccgaattcaatgctcgcgtagcgacaattttggacagggtcaaattataatggcaaatttttctccccaaaatccatggctggttctctctctcacactcacaaccgtcagggcaaaaaaaaaaaggaaaaaaaaaagtccttcacacatgcaaggaagcaaaaggcagtcattttccaactgaacattcgggatcggatcaacgggagagatatcgaaaccgaagccgccatggtgcccaccagtcaaccaccaccaccatcagcagcagcagcgcaagattgcaagaagaggtcgccgtcgatcgagagcagggacaccgtctttttctcaggtggatgcaatgcatttgatggagggaaggtacagaggacactcaaggaaggacgccaatgtttggatcgtacaaaagcttctccccactgatgataacgacgacgatgcgcaattgcaagaggggggggtcaagttggggaacccaacccaacttgcaagaacaggggggagaggagagatgggagattaacctcgttggaagagaagagcacagtggtgtactggtgtgaaagggaaaggaagaaacaggggagagagagatagagagaaatggagcccaacggcgaccagtggggaggagggcgaaaaaaaggggagaaaaggcaacttgtttcgcgagcgaaagcggccaaatccggcgggaaaagggtgcggtctgatcaggaaaaggaggaggaggcgtaaagggtggtgatgatggccgatcgatctgaccacggtgctgtgcctttcagtctccagaaaagagagagaggagaggtgcagggaacgggaggaggaagaagaagaaggtggaggaggagatggtccatggctgagtatcctattcgagctttctttctttcgtgcttgcatgctgctgctgctggtgatagctagctagctgcaacagtgcaatgatatgatcgatcttaattaattctgggcttatccatcgtccctgtgggttccagaagaatctagaaagaaagaaagcaagaaagcaagaaagaaagggaagaggaggtgcgtgtgtacttaccaagaacgaaggaggcggcgagcatgccgccgtgccggccgcgcaccgccggccggttcctccagtcgacgtacccctcccacctctccgcctcccgcgccgccgcaccgtcctcctgcaacgccgccatggaaaaacaaaacccattcatcaccgtcaacacaagaaccgctccagggacagagacagagaagaacccgcgccacacgacgactactcggcactcaccatggccgccgccggtaggcggtgcaacttgcaccgggagcgagcgagctcggtcgcgctaatggcgggtgaacagggaagcagcagcggagcagaggcgaggagtctctgtgcctgaggaggaagagggaggaggtggtggtgtatttaaaagagtggaagggaagggaggggggagggggcacaaaaggcagcagacgagggcgccacaaacaaacatcacacacaaaccccagcacacagggggtgatcgacatggacgtgaccgcatccacaagggagatgcaagcaggcacgtcgatctcaagatgcccttccccttcctcctcttgtgaatgaaaagaagagaaaaaaacagagaggggaaattaggatgagaaaagagaggtttagtgtttcttgtttgtttttcgttttggatttgagagaaattcattagaagttctgttgttatttgttacctcccatcgatcggttgaccaagagttgattataagctgtaagggcttattagcggaaaaaatttgggagtaaaacttttataggtgtttcttttgtgacttaaaagtcaatctgaaaaaaagataattaagtttcaaattttatattctaacaatggcttattctttatatggtaaacaataagaccctatctcctatgggttgtacaacaacaactattagatagcttatgaaactgccaactaaactaatttgctgagtgtatagcaacaattgacagctggctcgccaaattgcaacctatatctatctactaatgtggataagagagagaaatcggtgttaatcttaaagcaagaaaagagaaaactttgctagataaggatatagcattagtggaaagagcatttattgtctcaactatagaagaggatactatctctgtgtagaaggctaaactattctacttgtcctaagggcttatattgttttatctttccacaattaccatttaattagatgaggttatgcgtgaaggatctatcttaagttgcgctcttttacgtggctaaaaggggccactgccttatttatcatgagtatatttatcgaacagctaaatggtacgtttttctttttttaaaaaaaaaattctatattaaagttatttagaaaaactaaataaatttattttttaagtttgtaacggttaatacttaattaataatctgtaacgtttctcgtgcttggagtaggtaagccaaacaacaacatagaacgcaaccttataaggccactcacacttttgaagttatattgttactgtctaataaaacggattaaaaattgtcactacgatggaagcgtaaaaaatgtttgatggaaattaattcaatcatttttaatgtaaaactcgaatgctattaatctttcccccctttgtgcggaaaaaagactagattaagatgaatcattggagagtgttatctgatcattactgtctaaatcatttttacaaatgcctgaaatgttagatcctgtggatcatcatggagaatctatattaatggtaaaatggaacaaccaaatgagctcatctatctctctcctcttctttccctttggtttaagatcagaataatattaacatgcatatgagctaatctattatattattaaaacagctttgaaatgagtcaccacgttcgctgtgggggctagaaattcccacattaatcggagaaaaagaaaaaaaaaagaaaaggagagtccaagtagaaatacaatctaaaaatagctgaaattcggaattaaaaataagcaatattgaaagaagttcccatataagaacctaatacgagattaatcaaaattagaaataaaaataaaataaaatccaaaattagaaaaggaaaggagagtccaagttgaaatacaatttaaaaatagctgaaattcggaattaaaaataagaaatattggaagaagtttccatataagaacccaatgcgagattaatcaaaaattgaaataaaaataaaataaaatccaaattagaaaaggaaacgagagtccaagtagaaatacaatctaaaaatagctgaaattcggaattaaaaataagcaatattgaaagaagttcccatataagaacctattacgagattaatcaaaattagaaataaaaataaaataaaatccaaaattagaaaaggaaaggagagtccaagttgaaatacaatttaaaaatagctgaaattcggaattaaaaataagaaatattggaagaagtttccatataagaacccaatgcgagattaatcaaaatttgaaataaaaataaaataaaatccaaattagaaaaggaaacgagagtccaagtagaaatacaatttaaaaatagctgaaattcggaattaaaaataagaaatattaaaagaagagtccatctaaaaacccaatacgagattaattaaaattcggaataaaaataaaaataaatctgaaattagcaaaagaaaataaagaagtgttcaagtaggaaatcaatttaaaattagcttaaattcggaattagaaatagcaatattgaaagaagaatccatataagaatccactacgagattaattaaaatttagaataaaaatataataatatcccaaattagaaaaactaaaacagagttcaagtaggaatacaattttgaaacaactgaaattcagaataaaaaataaaaacattaaaagaacacaatatggtattaactaatttttttagaaaaaaataaattctgaaattagaaaaaaggatttcaattaggaataaaatttataaataactaaaatttatgataaaaataaagactattgaaagaaaagaccatctaaaacacatgacgagataaattaagtaacatacctataaagtagtagagttggtggcagttaatacagcatataaaaattgttaataaaacaacaaatagaatcctaatgacgattaaaaggagggatatcaggcaggccgtaaagtaaacaagtaaagcggttgccgggacttctagaaagtataaagaaaaaaaaccacattgataatcattttcgatttttaaaatctcaatgacaataaaaaggagaagcagcgagcggggtgtataagagtatagttgcagagcctccgacggttgacgggacttctagaaaataaaaaatgaattgcaacgatagttatgttcgatttttagaatcacaatgacaataaagagtaggcagcggacgggctgcagaggggcatagtggcatcgtttgatgagacttctaaaaattataaaaaataaaactacaagtccaatttttaaagattcagaacttctaaaaagtaaaaaaaaaaccaatgataatcatgttctattttaaatctcaatgacaataaaaaagggaggcagcgagcgagccgtaaaggaatacaatggcaaaaccgctgatggtttggcgggacttctggaaagtaaaaataaacccaaactataattatgttcgatttttaaaatctcaatgacaataaaagagaagagatagtggacgggctgtagaggagtataatggcaacgtttgacgggacatctagaaattataaaaacgaaacccaacgtgacaattaactctaaaaactataaaatccaatttttaaaggttccaagatgaatgaatagaaacagtgatagatcgagtaagcaaataaagaagatgacataaggggtagcaattggtgtgatttttaaaactatataattagaaacacaaggatgataaggtttgatctttcaaagtcttaacaatgagatagctatttaataaattttaagtaaaattatacttaaaaaaatatatgatttttttatgctagccgcgcaattgcgcgggcaacccagctagttatacttaagtgaggagttatttcccgctgttgacatgatcacgcatgcatgcatatccttgttaattagttgcgaaaaataaagtatatatatatccttgttgacttaatgcatggttgttttacacttttccaaatgatcacgtgtttttcttttttccatttcctttgcggttgaagataagtgattgggccctgcactcatatatcgggcgtaactgacgaactgatagcacgatcaagagtgtgacgcacaatttgcagtattaccgtttttccattatttgtgcggtgtgccgatgagggtagggcagtatataattaagcggttaattttacgtacgtatcagggttgtaacctgcactagtctagccagtacgagtacgtgtacgacgactagcttgttaatgttatgccaattgattgaacacgacgactttgtttgctatctgcaccgtacgtacgtacgtatcgctaccatagagtactctatatttattggttatgattaactaacatcatgcaaaatagggatgtgtgcagtagacatgattcaaacatcaggatttgtcctccatgtacgtgaagctcattgttaacgctttttgttaccaacacaatatcacctaacaatagcaagataaactaaatagaagacgaattacaccacaaacacccaagtaccttctcatctatttattagtaataccattggagtataaatgtttcttcctttggtccatttttttaatcttttgatgaatacttataattatatggtctcaaaagaaaaagtatcaactatatcaagtagtaatttaacaaatatatgtgacaacaccaagtagtaacagatatatgttgttgagacattaacttttaactttcatagaagtttagctccatatatacaacccattgtataaaattatgaatatcaaaatattagatattctactattatcatgcagtttataataagaaacaacagtgatagcatgaacagtgtaacgaacaatacttgatcactgtcgcatcacgatttcctttttatccctaaactcctctatcgctaccctctgtacaataattttccacaacaccccatttccctataaaagcagttaaataggaacatgttggtacaaatagtgaaggaggtgtaaggttatggaccacttctaaaaattgatgcccagaggcggccgcttgggtcaattttcgtaggtagcccacttagatgaccacctctaaaaatgggtactcctaggactggtgtctaagcagatcacctatgaaaacatcaggtgatcttgatatgaataattttacgtcaaatgtatgcaccctagggccctaacaacatcgcctatcctccttcctctctcctttctccctcatccaaacttcccactccctcttcatctccctccctctcctccctctaggtcaagaacagagtgaagccatggtggatccggtgaagcagtggtagggtggtatcaacgtttcaaattttgttttgaaatttccgatatttgcacccctcccccaccggcaagctcatatctcttttatatttttttttgtgaatttggtcaaattttatttaaattcatacaaaatttcaaacaatttaggccaattcaaaatttctgggaaatttcgccccccccccccgcgcagaaaaagcaatttcgatattgaaaaccctgggtggtataaatctgacagccgttgggtcggtataactctgtagctgtgatccgagctgctaggtgagggggtgagtggtgactctagttgtgaatagagagggagacgaaaggggccagccatggattggtgggagggcaggggtagggagcgcttatcctgagtgtcttccttccacgcttgttgcctaccgtcacaccgtatctacccgtcatatctggcgatataagactaagtgcccgtatgtgaaaataaagcttcattttcacatgaagccatgtgtccagccgtctgcggaaaaattattttagttttgccgtgtgcaaaaatggttttcataaaatagtagtgataggtaaagaattgaccgtgataagaggggttgaattatttttttatatagtaacttagtggctttactatttggtctgcacatttcagtgcttcatgttgacatggactaccctggccggcacgcatgcttgggactccatttggttggtcgatgcgtgcacccggcctttggatggaaacctcatctcctctgagcgacatgtacactttgcatgtcattcatggccctcctagctagctgaatcatcatcaacccagctaattctgcatatccatgggggctgttttgtgtggccatggtagtttccatcaggctgcgaattggaagaggataaataatgcaaaggggaccgtggaaatcgacgaggttattctggagggatcctctttgctacttgcttagtggcgatcgattgtatcctccgggatcttaagagacgcgacgacttcgttttagttaattcatttcttcgatctcgtcgcattttttacgcgtcagttctttctttatctgggtgttcagttccatcagctgttgggatatatatgaccggagaggcaaaaagttaatttggtagaatcatgctttagaggaaacggaatgtgaatatatgaaaggtttgattgtgcaagtttgagatgcagaataattaatgacctatagacgcgaactttctagttttgctacacagtttgagttcacattttataggtgctagctaggcgttaaacggtttgtaggaagttgttgagcggtatagctatagctcttttgttagtctagcggtggtcgataatgcttagtgacagctagtcggattgtagtggtggtgttttctttttccatagcttttcatggttataatgccataatttttttttcttgctatatgtgataaaatatcgcacatatgttattcatttgttttagaaaaatatgtttttattgagtaccctctaatgcgtgccaccctgaaatcattaaagtgataatgtgttaattttcgctttattctcaatttgcatttggctgtcgtgatcagtcaccagctagctgcagtgtcgttgcatttgctcaaattagccttatcaaggctacatgcatccttcgattctccaacgtgatcaaatctcttctcgatctgcattcctacacaagccattctatgcttagctagctagcttgttcagtgtaccaaggttgttacatctcaggtaccaattcaaagacaaagggattatatatatcactcgtacatagacagcaattgcttaattcactgacagtttctattctgtagtagtgtacacaaatgtcgtcctcttctatcgatgtggtacatcagatggttctagaagaaaccgaaatggccatacacatacacagtacttaacttgtcgtgctcgatcgcacaacactgcaccaattaatctttttttctccgttaattgtgatcaacaaaacatggaatatgcttcacatgcaagagagctacgtgaatatgatttttttttgcccctgtttgtgatgtgctagggaccaaaaaagaagcatgaaaggagtggtcataatacaatgttactgcttgtggaaatgtcatagcctcctagacgaatcacgtctcttgtccctacgtactgattattttgggtcacatcgagatttatgaatgaagtatattatgtggggttatatctatcgcatcagaagattattttgattaaaaaaatggaagttcttgaatatatgtaatcaaagagttttatttgaaaaaacagagactatttaatataagtacattggtggtgtttgaaactcatgaagatgaagattaagttttagcgcacgtaaaatgagaaagctattaatattcctcgcaaaaaaaaagagaaagctattaatatataattaattaagttttaattattataaactcaacagataaatatatttgatatttgaaagcaactttcatatagaaagtttttaaacaaaacgcggtgcatgaggccgcggtggcatagacagcggcgggcggcggctccctccccttcgacaacggcgacagcaactgtggaggcggcaggcaggccgcgatgggaggcggtagggcggaattggccgccgcggtgcacgaggccgtggcggtgcagacggcggctccctccccttcgacgacggcgacagcggtggaggaggcggtaggtcggccgtggcggcaggcggcggcctcgcctccgccagattcagcgagaggggaagccgggcggtggcccgacggaaggagggaggccgggcggccggcggccaatggattttttttatcttgtgaatgatttgtatattttttttagatttttgttgatttggggatgattttgtgattgatttgtggattgtggatggacatttattgtggatgatgatttgtggatgatttctagggatttgggtgtgacggcgtttgtggtcgaaatcagtagatgcaagcagctaaaaaacaattaaagaaaaagaaaaaagaaaaaaatatggtagcgccagccacgtggcgctatcatctttagtcccggatttggggtcctagtttgcaacctggaattaagggggttgcaaaccgggagtaaagataggtttttccagcagtgcgagctagttcattaagataataaaccaagcttggcacattagttcaccctattatcatgtagagtcttcacttacggtgctctctactggtagtagaaagtaatataaatcgttgatctcatttgatcgaagggttcacatttatttataataccatcttagttagcggcaatagaaacgtggaggggtattattgtctgaaaaataggtgcggaggggaatcatcatttagtagtgggtaaaccttgttttgatatttttcatggaatatgagtgatgccagtgcgatggatgatcatagatcaattatatttaaccaggaaaaaaaaatgatagttcctcctaatcatggtattatagtaaattactaaattatgcctaattgtggtattaaataaattactaattaatctctaataatattggtagtatattaataccggtagagagcaccggaatatcgctcaccaaaatataaaaatgaacaaataagttaagcaacatactttaacacaaattgcccgacaagatatatgtactatagttagcgtgacagcaacatagtatatggcactgcgatgctctaacgcggtcattggctagtacggagtacgttgtaagcgcaatttcagattcaaaatatccagcttttggcacggccatataacaagcctcatgcatgcatgcatgcatgcatgcatgcatgttcatcctaaaagccaaagtggccgattaggtactagcaaatattctttgtgtcctatattatctattgcaagacctacaacgtatgtcaacaaattaagataagcaaaccaaaggccatcaactttaacttttctaacattttaaaggggtgtttttccatgaataaaatcatattagtcaagtactagaaatttccatgcgtcctcttttcatgcatgcatgccgccttcatttatatatactttttgcaggaatataacaagagaagcttaactgaccttggtcaaattaaacacaatatatcagatgagatcaatggtttagattactttctactaccagtagattacgttatagtggagctcttagaagtagctacacaaattaagcagcccacatattacaaaaaatcgtccactaattcgcatcttcattagatgggggccatttcccatatgcaggatgaacacatttctatgttgctgcactctgtctcggtggtatgggtcagatgcccactttatcttaggaatgtggttctcacagtcacaggcatgcggttttctcatcacccacatgcatgctccctagctctcttttcctttcgacaactagatcgctagaggatatgcctcactgctaccctgtcgttgttcaattttaccatacgttctgaaatgtagtatatataaatttaaaaatggagaattgattaaatcaggagcctacaacaaactaccttcttcctctctaatttactgttggcaactccagaatcaccgtcatgtaacatgttccatatcaagaatactccctcctttcggatttatgtgtgacatttctgacggctaaataatattatgtgcaaggcatttacatctatctatcttctattatatactaaaagttcattaaactccctgtaaacgctcctaaaccgtcatgtgtcatcctataaacactctcgagttgccacgtggcactctaataaaatatagaatatcataaaaaatctaataaacatctagccattgattttccgttaaattggtggacccacatattttaaccattagaccacttgagaaacaaaaaatccggtagccctcatctccatggtgcatatatgcggcatgtgcaggtacgtgctatacctagctccctccctccggcctctctctttctctcctattttctcggtaactcctactttttagctaacacctctatctatcttcagattttctaactatgtttacctatgaaagatttgcacgtacaaaaaaaaagttccactgttccacatacgtgcacgtacatacatacatactctcttttttttccttttcttcccttcttcttggttagatgagatagaaaaccaaattaataatttaatacacatattaactgttaatattttaagttctaaaatgcactttaatagattagaaaaaaattcaagaaaatctgaggaaaaaaagtaaaacatctagtcatcgattttcatttaaattagtagatatgttatctcagatcattaaattaaatctattaataacctcacacctaatctctctcagcgcaccaacgagagaaaggtacttatatactgctcataaaaaaacaaaaaaaacaactgtaatgcaacgtacgattaaaaacaaataatgatatattatatatatcattaaaaattacatccgcttccgtatcctcccctcttttctctatgcatgtatagatgagatcgtaactataattagtgatattaaattttaaagaactataactttataaaaatagattatatatatcacaatatatacgtaaataaattagatccataatctttggaaataaaatttttaggattctattattttacccattatattaacaatataatataattttatatagaaccattattttaaaaaacacaccgtttaaaataaaggttacacaactatattttataccattaattatcaatttatgatctatgttaactaatttatactcccttcatttctaaatatttgacgccgttgacttttttaaatatgtttgactgttcgtcttattcaaaatatttaagtaattattaattcttttcctatcatttgattcattgttaaatatacttatatgtatacatatagttttacatatttcacaaaagtttttgaaaaagacgaacggtcaaacgtgtgctaaagagtatactatttttaataaaaatattttgccatcgattttcacttaaactgacggacctattaattaattaattaggaaatcattatatctttcataaaaagtaaaaaaagcttctaaagacctcttttcagtcctctgcacaacacgtgttcatatttgccttttacacatatgacaaaaagcattgtacctgaggcagctaaaagtgattaccaaagttatcatgactatcaataaacactacacatactaattaaatttatataatttctctcttatttcaaacaaatattatttcgaagaaaacaattgaacatgtgaaaaacaaaaaaaaaaggctttaaacaagcaattgtgtagatgatttgtgtcctaacataaaaagtcttcaattctttaaaagtgtggaaaaatatgaacattttgaactgctacgaatggaggaacaatccaaccattaatctatccttaatttggttgttactaaatcatgcatcttcataaggcgattcagtcacaataactttgaatttcttactatcacaatttgtgcttatagcaatattgtacataatatttacttacttgatccaaaagtcgaactcatatgaccttgatttatcatctaacatgaatgatatttagatatgcccaccctatagtttatccttatgagatgcaatttctgaaaaaaaaaatataatctcatgttttaataatgcggatgcccacgcattgcgtgggccacccttctagttatcctaaaagtcaaataatttcgtccggaggaagtactatgttactgtgccaaattatatgcaactctttgggctgaactcatgcaaactacgaattgacatgttgtatctgttctccaaatctcttttatccgttcttctgcttctactctaatacattatcaaacttgtacgacttttattttgttcgataaaagcatgcattcaattggcgaaggacccctcccactcccctgactttttattctcaaaagatcttaaaatcttaactcactaacatataaaactattaattaatatcaacatgcaaaaattaaaatatatagatatgaaaatgacatcatagcagatttgccacttcttccgtgcaaatttatatttttaaaggttctcatggaaaaacaatgataaaatgtatgcactaaaaactatgtgaagtaatatcctaaacacgtaaaaaaataacgaattaaattaatataacctgccttcaatatcagtattagatcccatatatatgtaacaggcccacgtacgcatagcattctacttatactttcacatcattctaacgtggttaatttgatgcactgtgattagggagccaagaattttaagataattttcatccacctaaattttcaatatgcatgcaacgtaacactataaaaatcacttctaggtaacataggtctcagttacatcactagctactacatgctgtaaatagcttgatatatgatgctacaattaatcaccctttcaagcaggcagctcaacgcatgcatacacaactgaagcccatcaccctgctgaccttggtggcatatggtatacgcaagtagtttcttattaagtgggggactgaatagtttggtccgtgtacttatatacatgcattctgcacgtacgtgtagggggatcaatgaggtccctgtagctcactgtgtacatatggctgaggctgcctgggtgatgaccatgcatgaccccatggtatacaagtcattacattctaaagcttcatatgtaaacatattatcatcattcactagcaattattatatttttagatacaaacacgtgcaaatctgtaaattattgcattcaagagcttaacatgtaagcatatcaaataatcctcacattattttcacaatattttaacataaatccaactatcactaataaaaaactatttttttagacgcccaaaactagatttttgcgtgtggatcgaagacccttatgcaccaagaggtatgcaaaaaattatcatttcttcatgcgggtgacgcacccgcacgcaaaaatccaatttttgcgtgcgggcgcataagctgcccatctgctatataaaaaaatataagtctaaaaatccaaaccctagtcccgaaacctagatccgctgccatgcagtctaccgccactccgttagcgatagaggtcatcattgtcgagagggccacagccgctagatcaacaggtggatagggatgggagggggaatggccaccgctgccagattcgcagggggagggcggctcctgctggatccatgctggggacgaccgccaccaccaaatccgtgcttgggatagccgccgtgcagccgagccctccaccaccggag

SEQ ID NO: 5060 - DNA, 48120 bp, Oryza sativa
ttatatttctcaacttgtataccaggtctatttacctatacaaatatgtaaagctaaatccatctacaaaggtacgaaaaaatctgtctctgaatgaagctcttttttgttactatatatctccgtcttataatggatcctaaaattttatacccactccgtcccaaaatataacaacttttagcacttacgatttgtcccaaatataacaacattaccaccaacattcccttcccaactaatcacaatcctccacctttcacttttctcacctacctctacttctcaacccaacataacatctccctatttaattctacctactttcttaataactgtgtccaactctaaaacttcttatattctgggacggagggagtagaaatcaaggaggaatgaaaaaaaatactaagatacccatcattaaataaggctcattaaataaggagatggttagtgtaaataaaaattaaaagaagaatggctggatgaaacgagtagtattaataattacttatattttaggatataaaatttaaatccttcgatttatggatggaggtagtagaagtaaatagaagtacatgagtatttgtttaattagataaagatgtcatattatcatatttttaatagaaaatttcttatattaatatatcgtaaaatctacgaagaaatatttagtatacaagaaaaaaataaagtttaaattaagatgctaaatatttttaaaaataaaaacatgtagtataaaaatgatattttcatatgaaccaacttcattattgtgacatatttttctcataaatttaagacgacatgatgcaagtaattttagtttacaatttgtaacaacccgtccttcagaagaaggcagcccagcctccatccaactggcacgcttacttataaatatcacctcacttacacttttattctcgcttcgcataaaatagtcaaaccaaaaataatatggttggagggacaatgcattacaggttggctacactcttgcttaaatagcaagatagtactactactcatgtgcacacaatgcttatagacaacacatgtcaaattctttaaataaaaaaatatagaccacatcctaattgcactaggatgtctaagacaccctctcaaaggatccgacgttcccgtcggtccaacttatctccatagtcacatatgcatatagacaaatatccaaaaacatgtcacctcttaatgcacgtccgtacgtctagtgatcgaaacaagcttccaaaacaatcccaaaaaatattgataaacacagatttagaagagtaaaaaaataatttttttttgaaaaaaaatcttatacataaatattcatcacaaaatttcaaacatcattaaataaggtgcccgcgcatttgcacgggctaccttcctagttgatttaaattccataactgggtaggcgttgtttagcataagtaacactcctcagtcaccaacccgctcctgttcccctcctaatttaagaaaaaaaaaactctcacctttgttctatcgctaggatcttcacctatcacccaccctcccccgcgtcctctctactgtctcactcgcctctcatcccctctactctcccacttccttgttagcctcacccttttctttttttactttgggagagcaagaaactagtgagagaaccaattttcgggtaaataaattgtcgagatatttttttcttgaggttaacttttttatcacgagagagcctaccaagataattgattgatgcttcatacgccaagaggggtgagagttttttttttctttattaggaagatgagagggattagggaagggagttaccaatataaaaaaatttaactagaagggtgtgagcaatttttcttcatcaggaggagaggaagtggggtagagtataaagataaatctcttaagccaaaaagggtgatagttttttttcccattagggtatgggtcgagagcttagaaatagaacatgtacatgtgagaggagaggagcaggataggtgtggctacgaggcgtgtagtttcgaacaaccattcaatttcaataatatttctaaaatccaactctatagttagtactatcttcgtccataaatctaactaattttcagcatttaaatttatctcacgatatacctacttctccacttatcttcttatctgaatcaattacaaccatgtaaatatagctacttccctacctattttctcatctcaactaatcagaactatctctaatttaatttattcatctactttctcatcccaaccaacctcaaccataccatttctcacttaaccttaattccacgaaatactgagggaactatgttattccattttcttatagtttaatagttttagaagtcctaactggcgacgggagttataagttacttttttataatttaatattttgaaattttgaaattaataaatacgagtattgagctgtacctgtctcaatgtctcaatctattattccttaatttaataatttttaaatttgatattaattatcacaaagttgtactccctccatccacaaaagttatatctatttcacatttgagtttttccaaataagttgttcctatctgtagtctttatgtatttaaaacttaaatgaagagataaattaaatgttttattagaacccaaggagtcatctaaatactcattggttgcatgcttgcattcactctttgattttataacatctaagatgatttaatttctccttggttttggtgtcagaagtaatatgtgtaacttttatagatgtagggagtaactgccttggacgtcaacaaattaaagaggcagaaactgtagcgtgtctcaggggtcaagatcgatggatcatcaagacgggaaaaatgtacaacccaaacgtgacagatcgatgcagatatctccttatccttttctttttcctttgtcttctttttttttcttcttctctttcagaagaagaagaagaagataatttgcatcgagatatttagcagcagctagctttacatcgaccctgacctgacgattctgctgctgagacggccagtcaaattattcctctcccatctctagctttttaaccacacaaattaaaagctggcgagacacaaagacatgacacacttaaagcaaagtaacagtactgaatcagatgtgtacgttaagaatagttatagactcgacaggagatctgctcatctccaaattaatccggcagctagtactagctgcgtactccctccgtactccgtactcataaaggtaatcgtttggaacaatgtttaaattaaatcttaggaatataaatcatgaataactctcaagttgttgggtttaaaatgtaaaaaatatatgaatagatgtgtcttaaaaaaatactatcatacacttttcaatatttttatagaaacaagaagtcaaagttgtgtttcagagaccgagtcagctgtccaaaattgacttcctttacgagtagggggagtagttaactaagctgtgttccctcctccgacacgtaaaatgaagctcgtattactgcatgattaattaagtattaactattttttaaaaaaataaattaatataattttttaaaacaatatttatatagaaagtttttttataaatcacaccatttagtaatttgaaaagcgtgcgcgcgaaaaacgagaaaggtgagttggaaaaatgggggaagaacacagccctagtgagttgaccgttgatttcccgtcaacagctactctccctccattaaaaggaaaaagaatttctatgtatttcgtaaataaatctggtcaaaagaatatccgacacctagaaattcatatattttaacggagagagtagaacataccactcacacgtactacctgcattttaaagtatagaacatattttattttattaagacaagactttaaataacaaatatttcactaatatatcgttcatatcacataatgatgtatattagtgaagtaattatttataaccttgttcgaattaccaaaaaaatatatttgaagatacaaccacttttgaagacaaacgctggtacgagaccctctatccgatttagcggcacatttggccaagtgccggctttaaatttatcgatattatcggatacgttaattttttttataaaccatatcataatagagtacctgttgatcaaaatgttatataagaaaataaaaatatgcaatatatattttaaaatggatggagtacgtacctaccggcatcctgttccgtgtacacgtacggtccgatcctcttgtgatctggtcggtcggtccacgcacggaatgattgggtcggtcacgtaagcaggatgagcttttgtgcggattccggctcgtacgtacggccgagagttatcgagatcgccagatcggtttatatagatatggcgtcgataaaaaggtaagtatacttaagtgccttttcgttgtatattgctaatcaaaccataattaattcgtattttgctggggtgggggggggggattttctagcgagtagccgatcgagtagtacctaacttggatgacacgcgtgatgcgtgatcgatgccatgcaaaagcgatgcaaagccatgcaggattgcagtgcacaactggcgtgatcagatgaactgcggcgtttggagctgtggcggcaggccggcatctgtggtgatattgattgaatatagtgacattaaaaatagttttgcaacactgtgacacagatatttctaaaagaaattgcaccgaaagagatttatcacatcttaattgcaaagggaactggaataatagtcttgtcctcgctggtggagaagtggtttttacttccgattgataacttttgtagtcctggtttttcaaccgggactacaaattgatctttagtcccgggtaaaataaccgggagtaaaaatcaaattttagtcacggttggtgttactaaccgggaataaagatagagccgggctaggtccggttgctcctttatttttttttcttcattgtttttaatatattgatttcactccatccctgtccccgaatcgtcaaatcccaaatcaatcatccctgaatcgtaaaatctcaaatcgatcatctccaaatacatcacaaaatcttaaaaaaaattacatcacaagttttgcaaaattcatcaaaaatacatcacatattcacatcacatacatatcaaatacatctcagatccaaaccacaaattctcaaaaaataacatatctagccgctgctgcgccgccgccggcggcaggcgagcagagcggccgccggtgcgccgcccgccgccgcgcaggccgccgccgagtaggccgcctccttccgcgagctgcccggccctccgccgccgcgtgcagagaagtggggtgtggggaggagggggaatgggaggagaaggagaaggaagagatagaggagttaaaggagaaatagatctttagttccaggactaaagaaaatataggggtctaacactgcctgccctcttttgaaccgggactaaaaatgttctttagtcccagttgatgttaccaaccgagactaaagatcaaaaagtacccctaagcttttaaaccggaactaaagatatttttagtcctggtttttaatacaaccgggactattatgaaatttggccaaccgatcaaagatggtttctctagccgtgcctgtttttgttgagactggataggacatccataagatagcttaactactaaattagggtaaaggaaaattttaaatgtgcataaattgtgcacactactgtttattaatgtttcctgagagtattcctataatactttagtactaattataattacttcacatatataataagcaaaacaaacactaatattcattaaaaaggctaattttctaaccaaagctaatttgactataaggagaatatttccctaaatgtgacaagccgctatcatgcatgctacgttattcttgttcgtcccaccaaccaaatatatggacaaaacctagtcatgagacgttcctttcctattcccttggtcgcactaaccaaagactagctataattgtgcaagtagtgattcgtgtacgtacacataagaacctcatggtgcttgattttgtctgttaacgtaacggtgtggtacgttaaatttttttttgccaagatttaattagtttatctaattaatgtatcgattactcttaaatttaaccatttcatcgacacctaacgatccatttttttaaaatttgtgtgaaacaaatattgttctaatttaaaacaaaattgtacgtactttcgtgaacccacagtccatatacgcaataatatcaaatatatattgaaaaaacatatctaagaaatttcagccgactaccaaaaatgctatttttcataggaatgttggaccaggaatcagccactgcaagttggattaatggcagccaacaagaagccaatcactaacgtagctgtttcccagaggatcaaggctccattttgtgctcggaatattaaacatatagctaggtaactggtaagcgcgcactgccaagtaaaaaatgtcgataaaaactgcaagcattctccacgtggaattaaccgtcaaaattgctagaaattaattaccaaaagttaagctggaaattgaccgtgcatttgtttgcttttatcaccgcgttagtccatgttgtcctcttcaggcgttctaatttgattgtttttttcaggagttctttaattaattatttccagttgcatgcattttttaataaaggaatatattattccggcctctacataagacatgcactcaaccattcattattacaaggatttccaatttcaaaataaataacactaacaaaatagcacgtttataaaatttgagcttgaatgagaatgcttaagcacaaaacctactagtaaacatccacccatgcttgcacatatttacagttgcatgtatatataaaattacaaattaaatttgcaatgttgcatgacacgtttttccaaggaccgttatttctccacatcattgcgataagaacaagcaaaaaactttcgcactaagtgttcatatgcatgatagtgggttagctgcaaagaatgatccgtttaaattctctttgatttcaaggttgatctggtcgctgccgtgacaatttgctgcatgactccatgaggattgaggatggtcgcaccgtcctttgatgttgcttttctctgtaccgggtatcgattccgtatagaccatcttgtcaattaaaattcggtggcaccacaaaaaactaccaacagcgataccttctgcatttgtcgtagtccaacttgtaaagtgtgttattggtcgtgattcgaatactgacagaacttggttcctccaaagcacatgaaagctctgaggaatttcccaatgcaagtttatatctcttccaatcagcggcggattgatagctcccgggcaggttgggcgcgcggccgcccgacctccgccgctgctatctccatcgccgttagccattgacgtgtataaaaatcagtcggtcaccgaaaaatcactattactcgtccgggtttcacggtggtgctggttccgccactgcttccaaacgtatacagcttgatcgattgtttcgaacatatccgctctacaatttatatgaacttctgtacgtatggataggccgttccaagtggtggaaaaaaaagaacaaacaattagttaaacacaagtacctttatgacagtctctattgagtacatagtattactagtaggtactttcaatattattacaagtatattatatcttaattgtttaatcatgaattctactactagtataaaaaaattattctactaccgtacaattagtatatatgtaaaacgtctatttgaaaaagtgaaagcaaataattagtatacatgtataaaagtattcggtgatcagaacattggatttgcccttcttttcctatacttacgagagtagaatgatacggggcgccatttggctcgagataaagttttgtttcgccagggcatccacaatgtggcgtaaaagtagtccataagcaatagaatattctattcagccacctattctcattgtgcaactagtccatataaaaaaaatagcaaaagacacccatatgcatatagactaccaatatggaataaattatattatctatctctactcctctctcttcttctaatgatatcttgtatctatatacattgtgaacattgtcatagggataaactatttatgtgggttccatctatatggattactttgccatatacattggtgatgccctaaagatgctttaacattttttttgttttagttagtgtttatccacctatatatatcatcctatctttattttttaataaataatgctgttaactttttatcacacatttgatcattcgtgttattaaaaaaaattacgtaattataatttgttttgttggatcgagttgtttcgttacttaaagtactttaatcatgatttatatctcacatattttcatagaatttttgaataagacgaatagttaaatatatgttaaaagtcaacggtattctctattaaaaaacagagggaatatatgactaaattttaatacttagtaaccttagctagctagttgacaaattaatcattctacatctccgtacgtgcatatatatatatatataacggaaatatcgcctagctagttccccctagtgtaggcaatcttgtctaagatccacatatctaactaaactcaattagattttagaacactggagaaacatggatcttgttcccactgtccatacataggaggaatataatctctctccttcttttcgggaagcctgtaaatggaacgcataggagcatgcggttctattcccacatatactactcttttattaaggattgacatccacatacagagatgtggcttactcctgcagataaataattagaccatgtggaggcctcctcctgcctagactttctttttgcctatccatcatattcatatactccttccgtttcaaaatgtttgataccgttgactttctagcacatgtttaaccgttcgtcttattcaaaaacttttgtgaaatatgtaaaattatatgcctacataaaaatatatttaacaatgaatcaaatgatagaaaaataattaataattacttaatttttttaataaaacgaatggtcaaacatgttttaaaaaatcaacggcgtcaatcattttaaaacggagggagtatattgaaccaaccttactaccaccttgcctcacctaggtcattcttttaaccaattatgtatatagtgtaatatatatagtccttttagtttagtttattaccacttaatcagttttggatatgaatgttctgtgacttatcgatcgcgattatatgcatttggataaaagttttagttagtgtaactggcaataattcaactaatttctcgactaaaacaaatgatccctaaagggaaaaaaaatactctgttgggtcaccattttcacgggagaaaaattcaatacaaatggaagaattgtggactatactactatttgaagtgaaaaaaaatgtgattagtatgaatattggctgattttggctacggtaactgagctgcataaaaaactcctatcttttaattgtccgatgaattatatataataaaaaatagacttaaccgggatattttataataatctttactggtagtagaaatcagtctaaaccgtttattgtttctaatccaatgtaccgtttctgtttttactaccatatcaactaccgatattacaatagatttttctattgttacaagtcataaataaattattggaacttgtactgtgataatgctaatagtacgttctactacttgtagagatcaacttccggttgttataacagattatttaatcttgtatggaatctaatctctgtcgtttataagagaatcttgtgttctgattcttatttggtcactatccatggggtcaccgtcttttcttgtttgttcaagtggaatatctcttatgaattattgtaagaatatattgctaatgccttttcttccactgatcgattcactttattttttgacatccttttaactgtcttgtggtcgaaaacttctacagactgcaggcaatttgaacttgaggtcgcttgtcgatcgtccataatttatagccgcattttaaccatgttaattagccaccagcaattgtcggggaattcttcaacacatcatttggatcactaatcttttatataactttgttttaacccattattaattgcaagcagcttgctagccacaacaatatgacacagtaggatagtacttcctaatttggtagcaggacagagcaaggatgaactagtgatagttttttgtcctacatctgaactgcgaattccctttggaataaacaaacgtaaaggctgttcttgggagaggcaggccaaccaagctacgattgttagtggcatccaatgtacacacaacaagatctctcctcgaattgctttcgtgagcattagaagtgtggagaagcattgctttttatgctattggctgcaagaacttaacgaagaagtttcagaaatcatgttgagatgttttctttctttatcttgaaagcaatggcgaggctttatcaaagatctcaatcggttgtggtgacaaaaactagtacagatgacagttgtttgtttctgtgcttaaaaaaaaattgtaccaaacatatgatttgttatgcgatgtgttcgaattatgtaactgaagaaagaagttgactgatgtatagtttaagtgacgagcttccatcatgtcgcaaaataaaatatgagaccttgtaaaaaaagtacaggtacgatgagatgatcctcctctcaaacttggttgtatatgtttcaatctgatcatgactttaaactatctgttaattttttattagtaattttataatgatcgatcatgttcaggacggctccagaaatttaggtcgcctgaactaactgcagcacatgatagtgattagtgtgtaacctacttcagagctgcatcatgtcaaggaaacataagaaaatcaaaggacaagactaatacctagagcatccaagagcacatcaagtggttgactttagatttaatgaacttattaatacgcttactttgtctatcaatgaagttagcagccacaataataaagacctggtcccagatcaggagtacgatgcatcagaagaaaatttgctctgctttgctggttcattctgattccaccagctgtttgctatgatgaaacctctctagtattttctgaaacttcacatgtcagaccgtttactttggagtaacataagaattaagaaacgcagagtatgaaattgaaagcgagattaaagaaaaggaagaaacaatataatacttttagtggtccaatcgtcggttaattaagttattatccatgttcagccatgttatgggcgaaattcagacgtttttaattaaccccataaaagttgatagattctgcaagagcgatatgacattacacgtatctttcacacgcaggcagggctgcgcacacgtgtgatcgctctctagcctattttgctgaattgaagaaagatagtactccctccgttacgaaatgtttgacgccgttgactttttaacacatgtttgaccgttcgtcttattcaaaaattttaagtaattattaattcttttcctatcatttgattcattgttaaatatatttttatgtaggcatataattttacatatttcacaaaaatttttgaataagacgaacggtcaaatgtgtgctaaaaagtcaacggtgtcaaatattttgaaacggagggagtacatagtcatgcttcgtcggcagggtagctcgatcgatgtctgcaggctgcaatgtcgtcagctagctcagcggctatatatgcgtctccttccttatctgatctacacaagatagcccaagattggaacgaaatgtcactcgatccatgcttatctttttcctgcatgcatggatgcgtatgcatctctgcctgccaagccaatgccacctctcacgcagacaacccgatgcatggccggccggctgctgctgatatatagctggagctagcgcgtcatcgctgctgatacagatatacttgctccgtgtcaaaatgttgctatctaatatatgatcggatattttctagtacaacaaatttaaactgaaacctattttgatttgttatactataaagtatctaatcattagctaggttagtagtaatatttcgggacgaatatagtacaatggatcagtgacgaaagcagcggtttcggatgcagataccttggccatcgcgacgagcaatcaatcgatcgatcgatcaaggcggatttttctgacggattgatggtgttgcggcggttgggtccatcactccgaggcgcgggcgtcgtacgtcagggcggctggcttggctgcggagattgggccgggtagccggccggccgaccaatttactgactctctccgccgtcgtctagccatttactgcagctgctgctgctgctgctgctgcggctgtcacggcgttgtgactgaacgccgaggcaaaaccgtcccggagctgacgaaatttgttcggtgatgagatgccagtggttcttgtctgcaaacgtcgtgacaatttacatcattgccggaggtctgcgagtcatttgatggaagagaagaaaaagatgtctcggctatgtttgaagcaaaggtttgagaaccgtttttcctcgacatgcaaaatggagggttgagttagcacatagttaattaagtattaacttaaaaaacttaaaaaataaattaatacgattctttaaagtaattttcctataatattttttttatttaaaaaaacaacagtttagtagtttgtggagaaagagtagtaaaagttaagggtggatcactgcctggtcttttaactgaccaagtggccatgtttggagagaaacattggagatgtataccttagtgaaattgtgaggttaattctatttggatttgaataattgggaatcatcacagtccgtatgcaaacaattaatccaaagttttctgtagggaaaaaaattcataaactgcaatattcattcagtgaactgaggccaaaatcagttggacatgatgtgtgttgccaaagaacaagattatatttctgatgatgggcccttaaacttcaatttaaagcaaaatgaagcctgcttcacagattgacccaatttgctttgggccttaaaaagaaaggcctaacggtaacttttaggtccaatcagatccagcccatagcctaaccagcccattgaacccgtctcttctacccttcgccgacatcgccggagccgcgcggcgcgcggcggccggcggcgagctcggatccccacctccacccctcccgactcccacgccttcctcctccactgcgacctacggtgtaggcgcattccgcctacgtggcctcgcctccgcctccggttcctccgccacgacgtgtccgcgtcccgtccactcgcccgatgaggaaatttcccttctgtactgtttcgcacgactcttccgccgacgaattcccccgcttccccatttcgtctcgcggtgagtttttggtagtttagtttgatacaccacttcgtttgataccctcggcgaccgcgcggcggccagcgggcgcatccatggcggcggcgggatccataggcgtgtacagggcggtgttcgcggcgctgggcgctctcatgctgggcaccctggtgtacacctgcgtcaccgacggctcgccgtttcgcctcgagctgctcaccccgtgagtgcgttgatacaccacttcgttttccttccccctccatggaagaggattgggtgctagttactgccgcgaattttggtagtgctggctaatttcagatgtgctagttactgattgttagtcagctattgctttttttactaaagtagaccatttcaagcttttggatttttgttttaaatttaggcgtaatgattagcaaatgttgggagtcactagtactattttaagtattattccaatgttattgtctgtgacctgcacaatggtgctgcagaaagacaggaagtataggtagttctcgatggatgcaactttggataattaagtgcaccaattatgctctagacctctaggtttgtagtttgtgcccaaggctttgagagagtttgtatgttcttaacgaatgaactatgtgttgcatcagagtagggaggtcagaactattgtccaaaagcgccttaacttgaagttgtaatttttctctgtgtaggtggttggtggcaacactgattgatttttatgtcaatgtgactgcgatttcggtaattcatttatctctgtgctgtactttgcgccctcttcaccaactagttattttgttacgaaggaagtgtttacaagcagtatgattagaaggaattattttctggagcgtgaagtgaaagcggcagcagtcaattgtttgcatgcattgtacaaaagtgcaatatgttctaccattttttaaatctgttatttacgaataaattcaatgttgccaaaacatatttcataggagatataatgcttggagttagaccttttttttttctgtgtgtactcaattgataaaatgtttgctaaatttgcgaatctggtgaaattttgatttccaccaaacatagttcctgatctgtatgagggaatggtatctaactggttgaagctttaactaaattgcatgacgattgatctcagatatgaaatgatagtagagaagttttgttgtattatctctcttaacatgtattttttttttgtgtgtgtgtgtgtgaagtttggagcttttgctgatatttctgctccaactccaatctgtgtaccactgaaaaactaacagagaattcttttgtgtgtcttatcctaattagctcctttcccctgattaagacaaacaatttctagattccaccttaaatatatacacaaactaaaggatatttggatctgcaagggttgaccactcaaatgctttgctctacatgatataaataatgtaaaagaaaatcattatttatttgtccgcttcatgtatggagatacaattttaaatattatttcatcttgatgtgagctagagatgttcttgcatgttgcagacttgggttatctacaaggaagtaaattggattagttctttcttttgggtagttctgttgtactgttttggcaggtactcatttccttcttgataatatttgtggcttgtcaaactttcataattctgtttgaatggagatattcattttacctaatgtgatcatccttttttcctgttatcttttcagtattgctacatgtgcttatgttgttgtgaagctttttgaaataaaaacttccggaccttcacaagatccacttgatcttttattcctcaggtacagattcaaatttttcctagcgtatgcaggatgaaaagattttagtttgatgcttttgacagcataatttggcaaatcaagtaaaaaaaagttttttttttacatgctgatattgaaaacagaaatggatttggcaattttgttctttttctgggctgggggcactgatggtctggtggacatggactataagaagcttatattggttcatggttacgctatgttctctttcaactttggggggacctgtgaaatgtgttatcctgtagatttcaacacctacaacaagaaacttttgctttcacagtttttgcatcttttgggtctagatccctcatatgttgagtaatatacctaacactccaaattccatagttccatagtgcatgctctcaccaatgtggtgaccttgtgtcacattctggatgtctaaggaatattgttgttcatatatcaattgttattcttatcttctgtgttttgaggtgtttctcaacttcttttcaggcaaggagatctatccgaaagaaagtcctcttttgtcataattgggagaattattttcagcattttgggggcaatgatggctgcagtcgtaatttatactgtcatcactgatggactacctttcaggaaggacttgttgaccccgtaagtgaaccatatttgctcagattatttaagaaaccttattttctttaagtacattctaagtccagttgaatgcagcaagcaaaatggataaatcccagtgattgaatgaaagatcacagaggcatagattgataatacagctaaaggaaattttgaaaataatatatttaataagcaagacaaatgtgtatttacaagtgctataagcaccctatgctgaatttacattcaagagttaaactagtaactgtcttgttaggagcacttagcacttaccatagttgtgtacaggcaaggagaacattttacttgtgttctggacttatcttctaaaaatttgactgcaaatagtcataaaaaattctgaaataacttagcagtatagatcattatctataaaaacaatgtgtaaaaattcaactgcaaatgtggcttgtattgggagaaacaaaaaaacaaatatcagtgaatagtagctttccctttttctttttgccattccactttccgttgaatttttcctttctatttcttcatgtccacatcaaatttagatttgaaattttctatcatgatagttgatagatttattttgtatcaccactaccaaattatttgagaaattttcatgactattttcaccataagagtaggaagcacaggaagtccatgcagagttaaaaaaagaattttggaggccagccctaagtaatgctctggaagtacattttcgattagtatagtgttgtatatgttttcacatgatttgttaaatttatcagtacatgcttcaaacatgctaactctgtagatgttgtctggcactttttattttcttttttccttattatacttgtgttatcaattagaaaaatatcaaatttaatattttcctttgcattcaggtggatggcggcaaccttaattgacttctatataaatgtcttcgcaatatcggtaaattacattctttggtttttagaaattgttccaagtaattttgtgcgacacactagtttgcctgcatgaatgcatctgcatcttggaaattgttgttcatatttttgtgcaaacggtgggaaacgatttttatttgctaaaactacttttgcatgactctattgttatttggaacagttgtcttaagctcagctctaatcatgccatggcacccacagttttctgctaatagttttttggtatttgttatgaaaatatattccattaaaatctacaacacattaatccttatgtccagtatattttatcatttttttctttcctctttgaaaatatgtgaagataatcttattttttaaaaataaaaacataagcgctaattagcaatgctagcacaacctcccacctactgaaaaggtgtttccatgaagtaattaatacgtcctgcaactataaaatggcagggcactgctggctggtagagtggtagcgtcctaggcactgcatgtagtggctatatcttctatcagtaaattaaaaagaaaaccatcatagtggctatatcttctatcagtaaatttttggtgatatgtctgcaggtatgggttgctcacaaggagtcaaactggatatctactgccatctggatatgcttgttaatatgctttggaaggtacacaattttttgttgaggattataaaggaaacatctcattggatatctactgccatctgggttgctttcgaaggattatattgctacattgcattggggttatatttgtccttgtgacttggattttactgcatgaactttgtagaatattttttgtttgcacttcttaatcataaggtgcaactagtagttactgccacctatcaaatactgtagataaaatattctacagattttggcaacaaattagtcaaattcccaagtatagataatatacaaaaattataccaatagattgacatttcaaagtgcgttcatacaatataagtttgataactactgatatatattttttgagaaatcaattatcgaagtttaatcttgaagacttttaaatcaagtatgccttataaaaatcaatgaaggttgtgccatgttagctgtatgatgcatacatttttcctgccacttgtattttctagtgcttctccttatgagtagtgtctagattatgtttatttgtatatgggaggcactttcctgctcaagaatagttagtcacgtaatatgaacatctatagtaaattcatcagtgagttatgcgcatcatgatgtatttatttgtaaggaacttattgaccctttccactttttttcatttgatctagcatcacgacatgtggctacattgtcatacaacttttccaagtgtcgtaccgagacccaatctatcatgtgctattgaactctcataacaagtatggcattgttccctcccactaatccctgatcttctccaagccttgttagcttgtggttgtctaaactttgcttgacatatggtcatttatctggtatttatatgtctgaaatgtaggaagatttgaaaatatcattgaagagttatgttattcttggtatacaataatattacctcaataaatggtgtatcgtctagacaaatagggaattctcggtgtaattacatatcattctcagtgtaatgacataactttggcaatttctctacaaaaggaccagactatatgcagtttgcagctcctttatctgtcgtgttttttaattaaccctttatttgtatatctgatttagtcgatttgcaaaagttttcttcattgtagttgttatcaaaattgtaaggtcatgtaacacaaagggttactaaagtgaagtaaagaaaatgtgactgtcttgtttaactgggaaattatttgaattgccaaataagtttgcagtcttgctgaaatcgggctcgcaagactcttttgatttgatacatctctatcttgagtgtgtgaaggagcctcaacgcagagcagggaagacttccaagcattataccccctagctctgccaaagtatgaagaatatgtaagccatcttttgccagttcttttgcagacagaattccaatatgcagggattcagatcattctcattttgttctttctgttggagttagaaaaatctttgcttcggcatactctcaaatataatagctttgaattctggacccctggaaccaattcttggtcacactgtcaatattttaacaaggtttcgatgtgtaacacttgtaaaactcacattctgtaggaaagctttgagatgcctattgttgatgtatcctgtaggttgaatagcttcacggcaaggttaccagaagcaaaccatgcttgccgtatgcgttgctgggccaatccatagtttcaactgatgcattcattcatgcgtgacaaagctcagcgtgatgtgctcgtgaaaagattttaggttgtttaaaatgcaaaaataacaaatatacctagttgaaagtaattaactagtgctccaaaatacaaaaataacgaatatatcagtagaaaccacatctcgccatcgtcttctcctgcttaaggcgcctgcgcgtgtcctgtcctcttaatcaagacgagaaagcgaaagcaaaaccaaattcgtaatcttagactacaaccagcctcaccagctgagctcaccatgaaatcacaccattgcttcctttcatctgtatctatccagcagccatgatgtcggatcgagtttggcctagacgatggcaagctaaagaacctcctctgggtagctcgagcgcacaccgccgctctcttccgctgccaagcccacaccaacaacatatctcgatcccattctccgttctcctgacttctcatcgcaacaactcgctggagcctatcatgaaagaagggaacgagaagatcgaattgatggctgggaagtgggaaccaatggatgagaaggataagaaaaacaatttggtagtagaacccaccaacggtcagtgattgaggaatgaaaaaagtattactccttcccaccgaaagtatgattctagatttaaattttatctcaaaataaatgtaattctaccatactatttgtaatatcaatcatatatactagccacccagtcacgcttcgcatgactctgagcgccggcataacttgtgtataggagttgacgacggatcttgataattacgggataatttttgtgagactattatctctattttttaaatataaggatttccatattgtttaacaaagattatgtttaatcatataaaatttttatatccctttacggaggaatgataggagttgagaaaatagttaagagtaagataaaataaattgaatgggaggtgagattgaagataaatccttatattttttaataaattttaaacatttgtgatgcttatatttgcagttagagagtctacctttatgtttttttgaagggattagggagagggcaataaaattaaatgggagggttgtgttttatttttgtttctgatagaaagtatatgaagaaattaaatagaaaatggttgtagttggttgagatgatggaatagaagtaggataagttttatatattaaaagtagctatatttttagatgaagggagtaatataattggcactatggtggatggatttctgtagttgtgggtcaatgaggcgagctgctgctgctctccatctatactaaactatctgtatatgcaccgatcgatgcacaggacctattcatctggaactctccctatgtgtgattggtatacacacaaatggatccaacggtccaattttgttcctactctcatcctaaggctattattattcacatgacgtggcttattagtttatgagaaagctggttgctttcacatatgtagatactagacaatcatactttaatggatctttgtaataatgtgccataggtcattgagcaaaagctgaaattttattttattatctaaaaaatcaatcacatattattcaaatttctcttaatcttatactctatcctccctctgctaaaatgagagagtacttgatcatattaaataaaagatattactactcataaaataattctttgttatcgcccaagagttctcccataaatttcctatattttcaaatcctgcaatcttattttaatcccaaaattttctactaatgtatctttttttttcaatcctataatccaaatatgtttttttccctcttctatctccatttattattaacatgtgtatgaatcgcaatataatcatttagtagtaatttatgattaaagtgagacgttgtaatcaacaataacagttattcgagaatggagtagtatttagctgctgtgaagagcccttgtgtgagagagttgtttttaaaagatcaaccttaaatatctcatagcattcaactacgattttttccctatccattttcgttttacgtgttttcttaattcaaaatacggccgcccctgttaattcgttcgatttttgagagatgacaaaatttattcacgcaagcattaatttggatgtaaatagattttacccgttgcaacaaacggatatttttctagtttagtccaaagtaaacagtttagataaaagatgatcaaaagtaaaactttaataataaaagatccaaagtacattcacactatatatttgcaacactaggcaacccacacgtcacggcctcagggcaagttttatgaaataggtggatcttgcatctaatcttgaccacatcatcaactaataaatgtagaggtaacatgtacaatactcacatctacactaattctaatatactagccccaatgtttgtttgtccaatctactcttcccctctttccttttgtcttgaattttgtgtagcggttatctcttgcatgagaggtggctgcttatctctctcatctcttctctcctccacttcactattttaacttatgtgacatctaggagattgtgcttggatgcccatagtacgtgccctcagggcagtcccaacccataacactagacatggtttctataaactccacgtcatcaagaaactagtactagacactattcttccaatgcaaacaccactattccatactccaatttaatgctacttatctcacatgatgtcttggatgttatgtaggaaccatgtctcatacaagacatggtttccttctctttcctcatttattcacttgccacatcattttttgtcttaagtggcaacttatttaatgctatggataccatcctagttattgggttgggaatgccctcacaaactcacagtaaataccggccttcattaatttttttcacaccggctagtctattcgaaccatcaagcgcaagcacattatctaacaaaaagctgcaaggagtagattggtatcttcatccgtgcaatttcattgttagtttgttggcttgtggcccatcacttttcaccatgaaacagccggtgcatggcatagttaactattattctctctaaaaaaataaaaaaaaaacttcttaaaacgaatctggagattatatacaattactcagctcgagaaaagctcaaagcttgaacgttctgagcccaaaataaagcttgagatctggtgaggctcgactcgagcttggctcattgacagctcaaatataggcaactatcaatctaattcgcaatactagtatcttcaaccctcaattattaaaactagtgcaaaataaccccttggtggttttaaggatgttcttttgctgacgtggcttgttaacttaatctaacctttgagtcatcatgttggacccacatgtcatcctccctctccttcccttctcactactttcctctccctcctctctttccccttctccacagaagcaagaaagtgggaggacgaggagagcgggagcggtgacggcggtggcgggaggacgaggagagcgcacgctgcccgcgagtgctaggagcacgttggagaggtcctcaaccagccgccggatactgacaaactagagaggtccttgaccggccgctggcaaccaaatctggaggtcaccacctcccatcgcccttcacccgccgtcctcaccactgcagcagccgtaggcgccgtcgcacgtcgctgccgccagcgctagggcagaaggggccgagaaccatcacccttcacccattgtctgcaccgcctcagtagccgcaagtgacgcccccgccgtcgggccctcgccgttggacgccgccgctccacgtcatcatcgttagccactgtgtgccgagaagaaaggaggagagagagagggagagagggggagaggttagtagaggaaggggatgacaagtaggaccaacttatttttttaatttatttgatgactagggtgtcacgtggataccacattagcgaaaaccgcttttaaaacaaccaaggtagttgttttaaacggttttaatagttggggaagtcattatatctggtcttgtggtttaggatatgaattagattcgatctttatttaagggagtcaaattggacttttttttacgtaggcgcatatgttatacttgtatgttaatggaccggtataagtccacctgccgtccctcaactttacatgagtttgattgacctttttaatttcaaataccataaatctttacctttagactgtataaaactgtgcaatatgtcccattttcactgtttttacttacgtgccaggtgtctgggccggtgggcccacttatcagcatcatcatgtgagttccgtgcttcggtgcttgtgcccgttggtgtgccagagcccgagtcggtggcacagggggtcacgggttgaacggcaacctgccgccgccgtcggtgaacgtggctcatctgagccagatgttcgatcggcgccaagcagggggtcacccaggcggagatggtggcgctgtcgggctcgcacaccatcggccggtgtgtcgccctccagctccttcagcaaccggctctagtagtcgtccggccccaacgccgggcaggaccccagctacgtggcagcgctggcgacgcagtggcgcagtgcccgcagcaggaggaggccgggagctggtgcccatggactggacgccgtcacgcccaataccttcgacaccaactaccatgccgccatcgtcgccaactggggattgccaatagtcccgactcgttccagaccgacttcgcggccgacaacgtcaagatgggctccatcggcgtgctcaccggcaacgccgccggcggcaccatcaggaccaactgcagggtggccagctgatcgatcgatctcattccataagcaatgtatagtataagcatgtgtgggttgggatcgtattgatatcaaattgagcttccggtccaaactattgggatccaagttgaggagaacgtgtagactatgcatattattggaccggaaaggtacgcagttaacgtgcggtccatgatagttagggcggcatggaaattgttcacgtgaggtccatttttttgggccgaggccggtagtaggagggcctggcgctcgattcctctgcttctgcttctgcgtggagagggaggaccaattcctcgcgccgccgccgccgccgtgacggacacatcttcgacggcccccgcgctccaccaggggggtagtttccgccaggtctgcttcactgtctcctctgcggcgtcgtttgttccatcgggcgattcgcgtcgtccgcgggctctgctctctcccggcctccccggaatcgctctctgcccccgtcatgcggtcgcagctcgagagtgatggggggggggggggggggggtctccctgctgctagcctgctagtgaagtgcctgctgtgatactactgatcatgcctaccggtaggtaccagaattggcagatttctcaatacttttttccttcaccagtttaaattgtgtggttaatactagatgacgaagtagtaccctatataataattcattgattcattccacacgacagaaaagtaaacgagacagatagaagagctcaatactgaattttaattatttgttacaaactggcatagttatcagacattattacacacataaatattcactagtaagactgaagaggagaaaatgacatatcacaagctcaaacaagaaaaatgtactagtagcatgtgcgacataaaagaaataatcctttggcttaaccatgcagtgctgaaaattcttctttgattgcagcgacttccttgtaaacgctttgcattgtcggccgatctttaggtgccactgcagagcacaagaggccaagcttaaccagcttcgtgacacagttcagcattccatccatcaaacaattatcatggtctagatcattgtttgcatcattgtcttcgttctcataatctggcatgatgctcggatctagaatttgaccaatcttcagaggaaatgcctccttggcaaattggtgaaggttcaagccatcattaaacatctcatctgttggacgcttccctgtcaacatttctaagatgataaccccatagctgtaaacatcaccctctgttgatattttactcccgaagccatattctgcaacgcagtttataattaatatgacaaaaaaaatgaactcataaaacttgaaagaaaggagtttataagagcaaatcagaataaaacacagtcagaagaaacatgcaaattattttacagaaaagacatatactatcttttttgtgcattaagaaattctcacctggtgcaatgtatccaatagaccctcttggccccagtaagcttgtagacctatcacttgtcgaagaaatattgctgtgaaggaacttagctaatccaaagtcgctaacacgtgcacccatggcattatccagaaggacattgcttggcttcagatcacaatggacaataggtggcatgcaacggttatggagataatccaaagcagcagccatgtccaatgctatttctattcttgtagataacctcactggattcctcggacgattcttgtaggatgttggatgcagccaacattctaggttgccattaaccatgtattcaagaacaagagctttgaactcatgtcctgtcggatcaaatgttgagcatgcggtgatcacccttacgagattgcgatggcgggtgttcctcaaggcctcacactctgctatgaagctttttggtgctccaagttgatcaagtttgaaaactttgatagcaactgcatgtgcttcggcgtcaaatttaccaacatatactgatccatatttccccgaaccaattaagttggttggagaaaagttgttcgttactttgactaaatcagcatatgtgagtttctccaatttcttatatgatgggtctgttggatttttagctttttttctcttcagaaaaaacactgctaaacatgacaaaaataccaaacagaaaacgctgagccctactacctttgcaatataggaagtgtggttgtttttagaagcagatatctgacaaagtggcaatttcagtagtggtgagatggcacacaactccttgttcccttggagaaaaaccttgcttgcattttggaagatcccattggatggtatgggtccctctaggttgttgaatgacaaattaagaagcaccatagagctcagagtctcaaaaaactctggaatttgaccagataagttgttccgagaaagatccatctgaatgatgcctctcagtgcagaaaaagatttaggaatttgcccattaagaacattcccctccatgttgagatactcaagacggacacaatcacctagagctgagggaatttctcctgacaatttgttgtttgaaatattgagggggccaagattaatcaaactaccaacttccactggtataggtccagagagtctgttgtgtgagaggtccagaccttcagaaagtgtggaaatagtaaataattcctttggtattgttccttccaaggagttacaagaaagatttagtatatctagtttttggcattgtcctaaggccttggggatgagtccactgaaagagttatcttgcaggtaaagctcagttaactgatttagtttaccaattgaaagtgggattttcccataaaaactgttttgtgctaagcttagaatgagtaagtttgaaagatttccaagtgagtcaggaaggttgcctgtcagcaaattatggtcaatttgaagcagtacgaggtttctgagttgttctatctcctgtggtatggtgccagagatgaaattggatgtcaaaactaatattttcatgctttgtggaagatcaccagtggaacttggcaggcttccttgaaggttatttgcatctaaatataattcggccagctgtgtatgtgctaatgctgggaggaaagtccaatctccagcttcaagctggttcttacctagatcgagaatggtcaagttgggtaaggacccaaaataaggaataatacctttgaatgcattttctctgagattaatcaattgaagatttgttgctttggccaatgatttgggaatttgaccatggaatttgtttccttgcagaatgaacatttcgatgcttttaagagtatacccaatattttgtggtaattctcctatcagattattttctgccatgccaaggaatgtgagtgttgacatattgtagagagggagtggaactgttcctgtcaagttgttcccagtgaattccagttcttctaagtacggaattctacttaaactcgatggaatacttccttgcaattcattccatgcaagcagaagtgagtaaagtgaagtggagttgcctagagaagatggtatgctacctgagagattattgtaggacagataaagaaattgaattgatgagaggtctgacaaaggtggaatggacccaaaaaagttgttttctgccaaatttatggcctgtagtgaggagctattgaatagagcgggtggtatctctccaccgatgtgattcttccttaagtcaagccactgaagtgatgaacaatttgctagcacagggggtatacctccagtaagactattgtttgcgagaacgacataggtgagtgacgagacgcttccaagtgaatgaggaatgttacctgacaagttgttgctatgggcaaacaaaaccgaaagtttgtcgagcgcggtgaacccatcaggaatgccaccgtgaagcatgttttcatggaggacgattcttttgagatttgaacagttgctcagaccaaggggtatctccccttggaggaagttgttcccaagattaagtatttcaaggctagagcaagaagatagagagtttggtatcacaccagtaagattgtttgaagaaaggtttatgtaaactagacggcgtaggtggcctacttcaattgggatctcaccattcaacctattattcgataggtgaattcgtgtgaggaaagtgagattgccaatacaggggggtaaatggccattgaggtctaaggactctaggtgcagtgctgtgacacgagattcatgtctctttccgcaggtgataccgggccaagtgcaaaattggagagactcgttccatgaggctagggatcttgcattgttagagagacgagacttgagacaaaggagggcctggagatccttgttggattcatcatcgagtgcggtgctacttagtgacggaattaatgggagggtcaagaaagcatacaggacagcaaaagtgagaagtgagggagtgagagttcctataggaatcatctatccgctactatggatgttgttgctgttatgtttgtggaagactagctgtagcttgggttgtgttttttttcagtagcagggttatgtgcatttataggttgccggaggatagcggctagccatttgttgaatttgttccaacctcacagatgcatatctacagtcaaagattcaaaagaaaaagaaagagttggttcgtagtccatctttgctgtcgtgcagactattcaaacaatggacagtcctctatatacggcaaagcattgtaccgagtacaaattttgtgcctgaactcagtttatccattttcctgagagtgctccccagttctacttgatagccattaatgcctttcatgttaaaacattctataacgttttatttggtttgaggaaagaggaacgactctcttttaaaaccgtttgaccctcatcctgtgcactcatacactccagcaatcaggtccttcgcatctcaatccgatggctaggatctggtagggtgggtaattttataaaaacccacccgcctcctatcttctacctttgcataaatcccctaaccagttcatcctcccattactctgtcagagcacaacgctgcgacaaatccaaagattccttctaaaccaccattccatatttccatatagcagagaggaattaaagatttctttttatttttttagagaaggataactttttctctgtctctacaatccaaccggatacccgtggattcgggtatccacggatacccggcccgatgggcacggcatggcgcgtgggcaccttttcttttttccgtgggcacgcccgagctgttaccgagtctctttaagttatttgctcctatgaagatttgaactcatatccatggagtgctactctggttactgcaaccactgaactacatgcccttttgcagagaggaattaaagatttaggttttggatagaacgaataggagaaagaagaattttaggaatctaagagtggatatctagcacttgattccttatatctatggcctaagtcatcgcttcgtatcagccttcttgtgggtgggtgctgccatcgccctcatcgagcagcttcacgtccccgtcattcgtgggagagacaaagtgatttgggggtagctacagccaaagaacaggaaacccatgccagggggatttttttttaacaaatatggcagattttattcatttaggatagttacatcgtttgctaacaaatcaagaataaagctagggggctcatcgtcccgagtacagttttgttttacctgcatcgctctctttgctaacttatacgccacttgattcgcttacaaaggtacaaggtgggaagtgggtggtttattttttctttttgtaaaattaccctaccaagatcctagctatccgattgagattggaaggaccttattttactactggatgagtacacgtgatgtgctgagtgcacctgatacattgccataatggaatagaagcatcagacatctggatctacttatctatcctacaaatagttggccttctatattagtgtacgccagaacttgtattgaagttcttaaaataaattgagtaaattttacaaacctacatatacttccatagatttaaggtgttctacaataaatttagtgatgccgtatctgtaattttgttatacgcatccttaaatttatagtcttgcaataagttggtcaaagtacatgtcgttttgtgaaatttatttaaataaataacatgtgataaagtttaaaaagacaataacgttatattatttgtttctgttttttttttcatttgtgtgcttatttcagttttggagacacgtgtaggcatttgattttaactaagtattttttaattgattgcataaagaacaaaaggtgtattagagaaaagtgtctaaaattgtcttccttgtttaatgcattgtctagagttcgaagaatctctctaggatgaaaacttaaaagtgtctaaaagtgacttatggtctagtctttgctgattggatcatggcaagttgataacaacggggtgtacatatgcattgttcaccttttggaggcgttattttacgagtctttatcatagttgaggcgtcgctcgctttggtggagcatgagaatgaagtttgtttgtggctgtagcttgttgtggcatgatatttgttttttcttaaataatgctaggctgtgtggttcttcttcttcttcttcttcttcttctttttttgtgagtggaggttgtgtgcatcttaggtaatggcaggagtcgtattagagtggttgtatccttaaaacagaacttaattatgtcacaccatatctattttttttcggggaaagggagatatattacgaagctatagagtcagcaccgacaaggtgtgagatgaaattacaagaatcatcaggccaaaaggccgttaaggactcacacctccctctattagctaagatatggctaatgcgattctgatcacgatagattttcgacaccaccacctccctatttccagccatgaggcatttaacctccttgactagaaatgtaagctcagacctgatctctattaacagttcatggtctctagtgatattctaaatatagctgctgggtcatattgaatcgccgtacggatatacgactatagttatagataggttatcttgttaattagattctcatgaacaacgtgcttccaagaacaatgttttgtttatgcaaactactgcaaatctaaataagtgaaaggtggaaactttcttgcaagattacatgtccatgtcatctttaaaatacggaccatttgatttttcctccagacattgctagccattagatccttagattggcgaaatatcttcgttccccttcaagaaacttcttttgtaaagaggtcctcccacgtccctaaccaaaaaaataaattgtttctcctcgttgtctccactcccaaatcgtgaaaacgtgcactcttcgctgccgtcagctcctcctccatgccaccaccacctcctcctcctcctcctcctacctaccccatctgccgttgctcctccactccatcctcatgcgcggtcgccaggcaacacctccaatccctccacctcccaggtgaccacgcagcggagcttggctgtgtgtcccctcaacatccacaaactcagaggcgatggattttgattggccggcgacgaagaaggggattcgacaacgagccgcttcttcgtccctacgagttcacatgcctccgcatactaatgatcccacaccgcttctgccatcggcgtcgtcctccccaattttcctccggggcaactggtgtgtaatactgaaacacaactgaatgcaaattcttgaagatctggaaatttgatatggaggaaagagttgaagccccggaagtaaaagatggatctttaatcccggttattttaaccgattcgtagggggttcccaattgggagtacaaagcctttctccagcagtgtttctgagccactacagaaattctatttgtattaactttagtgaaaattttgaaactgacattaagtaaataaataggcctatattgttgaattttcaaagcctgtttgcgcttgggcagtaaaataaaaataccaaagttaagagagtaattaaagaggtaaattaccactataaaaattattaaataaatcaactaaattgggcctaataacattccagaaaacctaataaaactcataagtgaatacatcccgacccagagctttattatattccgtttaaaaaatagcatcttgaatttccttctactaaattttctaattgagaaacctagagaatattacttatttggctttgatctaacgtgtggcatctggctggggtgcttttacgaaacaccaaccccataatttgtcgagccaaacgagcttcttgccagtctgcttatactcggctcgtttcactcacgagctgtattgtaggcttgggctcgctcgttccatacatgccgagctaagcctatgcaaagactgagtgaaacgagcgagcccacattacttggttaatatgttcaggaatgttttctactctattttgaatttcgtctcagttgtctagttagggcgggttaattagtcaggtactagatcctggtccaaatgttcatccctctctcaaccatgaacaaacaatttcgagttcgaacaaggcagcagccacgtacaagcattgctgaagaaaccatctttagtcccggttggtaacccttttagtcttgggttttcaaccgggagatgaaattcgggaccccggttaaaataatcgggactaaagatggacctttagtcccggttgataacatgaaccgggactaaaaatgtggtcccggttgttattaccaaccggaactaaagatttgtttttctattcctttcatccggttggtctttttccttttttattgttcttttgctctatgcatatcacccaaatcgtcatggatcggatcgaaggaataaaatcaacaacaaagcccaaatcatagatcgaatgaataaaatcaacaacaaagcatccatattctttacacttattcacatatacaacatcttcagaacaacaagcattcatcacagagaatagagaaaagaaaaaaaagttcacatctacaacatcttcagcattcatcaaagagcacagataagagaagaaaaaaaaatgttcgtccgccagccgccgcctcccgaccggcgtcggccgcccccgacgtagccggccgccgccttcccgaccagcgccagccacccctgacgcagctggctgccgccctctcgcgtccgccgcctgcgctgcccgccgttgctcgcctgtgtcggaggggaggaggaggagagaggggaggagcagagaaatgtggagaagatgagaggtgaggatgagatggagaagataagatgtggagaaaaaactgagaggggaggaggagatgtggagatcgaggactttatcgcgcgggaggacgaggcggtagggcatgtgacgcgagggattttttttcccggttgttgtaatcaaccgggactaaaaatagatctttagtcccaccaacgggactaaaaataacattggtctgacaacgtctgccatttattgaaccgggactaataatgatctttagtcccggttggtgccaaaaacttttaaaccgggatttttagtcttagtttgttagactattgtaaaatttttaatcgggactattgtaaaatttgatcgaccgataaagatggtttctccataagcgaagtttggcttcatggcgcgtgcaaaccacctttagctatgccgtgtatccaaaaggtactaatttgtatagtttcatacgcagaaattgagttttttttttctaaaacagagtagtcgtagccaccggttttctcctttagttacctcgctcattgtctgagattaagcggaccaattaaaggtactggaagttgtactggaattgacaatgtgttgtgaattgacaagacagcctgagattaagcagaccatgccatgtgcaaaatatcaatgtcgggcaaatgataggccattaggaaggtctaaatgcaaaatagtactccctccattccaaaaaacaagggattttaacattttatttgtactatttgaccattcgtattatttaaaaaattttagaattattatttattttatttgtgacttactttattatccaaaatactttaagcataacttttcgttttttatatttgcataaattttttgaataacacgaatagttaaacagtgcaaacaaaatgttaaaatcccttatagtagagggcgaaggcagtattacctccatcataaaatataatatttttttgaatgaaatatatctaactactataaatttgaatgattctttgtctagatttatatagtataatatgttccacctatctaaaaattgttctactttaggataaaaaaagtatggatgttagaatttatggctatggtgagaaaggaaaatttccgaggtgtgtgtgtgcgcgtgttggggcttgggagagggaaatatatatattatatgcacacaaattttccgtgcatactccatatacatcaactagcaaatgttattaaaaattctagaaaaaaatggacacatagttccaataatattacacttacctgtgaaatcttatcttcaaaatcattatattttagcccgtaacaaaaaagacaaaattctgatacatttttatccttaaaactgtcagatttttcattttttgttatggctaaaatataatgattttgaatatgacactttgtaaatatgtgtaatactgttatgagtaaatgttcaatttttgtggaatttttgtgatattttgtagttagtgtgtacgccgtacggtagaccagaagcttgtttgtataggagagagataacatacatgacaattcggacataattattacaacgatggtcgtagattcccggaaagaaaagaacaaacaagtatgacttaatgtttgtcttttccaatcatacatgttttaccgcgtccggaattgtgccagattacaaaagatttatatttaatgaaatgcttggatgagcgacgcgccatggatatgctttggtatatcttgagttcttgggtcagtcgtccctcgctcttcgacgtgcttaggagggcaagttttcatttagagctcgtgtacaattcttctttttttttttttgaagaaaagggttgtggacaattctaggtatagcgataatatagtagtgtaattgcgcagataatattgtagagaaagtgcttttttttccagaatataataatttttaggattgaacatgaatgttaatttaataagtaggtagaatttaatgggagaaaactgttattggttgggaagtaaaggcaagtagaaaatttaatggtggatgattataattgattagcaagaatatattgatggattaaattttaggacaaatttgaagtctagaagttattatattttggaacggagagattacatcctatatgactaagtaggtgaaatagcaaaagaaatcttgccatggatttaagcattaacaaagttcttaacgtaagactccaagaacaaactaataatacttaaagtttgattttgaagaataatttaggtagatttcttttacttttctggttagaatttattaaaaaagatcaggcaacaaaggtgaaaagaaagcacttaagtcaaatttatagtgtgttaaaatctgctctagattaatttttttttaagaattacacagtacaacgcagacactcacccctataaacgcacacacgcaaaccctaccccaaaccctaaccctatgagcatatttaaagacttgggtggcaaatccttgagaaagtcaccacagacgcctcgctgtcgaggggtacgtcgcctaccactgaaagcacgaagccgttaaatcctgaaaaatttgctcccgtgaggagtcgaacccaagacctaaggttctactcaccactaggctagaggccctttcgcaaatctgctctagattatgactcaatgagaaacatagttggttcgtagttctactaatgaaattttgtcttactttttttaaaaaaaatacataaaacttcaaacaaatttaaatgcaaaacaaatagctagttaagtaacttattcgaatgaatatgttaccgtgctcagcctgtccagtcttgatgaacccatcccagccctcccaggccccagccgttgataccttatctatcacgggaggtttgtgaccgcacgagctgtttctctccgtatctatttttctttattttcttttaacctttttgattgttattttcgaagataaactctctcctaaaccgatttccaagtcattcttttagccttaacactactacacaaaagctaatatgtgctggttgggagccggcactaggtgctggttttcccaacggacaccaccgagaccgcactaatcactgaaagtcataaaccggcacatttaaggctgcaggaacgaaaaaaaagccggcttgatgcatcgagcaatttcacttcaagaacatcaagaacatgagatgaacacacaagatgaacacaataacacacatgaacactcctgagtccccctcccgccgggccatcgccttccctcccgccatcgcccaccgctgccatccccgcctcccctcctgccaggtcatcgctcccagccagatctggcagaggggaggcgccgccgctacctctgctgtcgggccgccgtcttccctccaaccatcgcccgccaccgccatccccgcctcccctcttgccaggtcatcgctcccagccagatctggcagaggggaggcgccgccgctacctatgctgtcgggccgccgccttccctccaaccatcgcccgccaccgccgccgcccctgcctcccctcctgttgggctgccgctcccggtcagatctcgtgaaggggaggcaccgcgccgcagccgccaccgcctcccctctcgtcaccgcccgcagccgccacccccacctcccctcctaccgggctgccgctgtcttccctccgacgacgcgagactgtgagagaggcgaggtgagagctgagggaaaagagataaggagagagagagagcgtggtggggatggatggataagaatgggtgggtggtgacttggtggataagaatgagaagcggtgactcggctcacagctcggtttttaaaggtgtcgattttaaaaaaaaaacgatatctttaatttattatactatcagttctttaaaaaaccgacacctataattaatttaaggtgtcggtttttatttaaaaactgacacctgtagtattagtatcgtttttttttttacagaaccgacacctataataaggtgtcggtttttcctgttttgggccatggaggtggggaaatgtattataggtgccggttttagctgttccggcacctatagtggtgatacctgttttgtctttttttagtggtgtaagcttgcatggttacaaataagatattaattatgacatgtataaatatagagtctgatatataagccccttgttccttgtataatgatcagagtcaatataggctagctttgttccttgtgtcgtggttgctaaccaacctttatcacgtactgccagctccttgctcatacttcctccaggtcaggctaaggaccacatcaaataaatactaaaaattacttaaactatctcatttaaaaatattacccggaatttatacatgggtcagtgactaatctagcttaatttgggaataaaaacaaaacaaaggtctatttaatttagattactgagcgaatcattggcatgattatcaattcaactatctaaatctgatttgtatttttctattcgtcacctcactttcggattattttcgttcgttttccgatcgagatttcgtccggattaatttttatccgtctacgtatcgagggttcgtctgatcgctttcatcattcaatcatatccgcttccccgcgctgatacaggcctgcacatgcgtgttactggcccgtgtccgtgtgataaggaaaacggaccgggcccatgtaagattttttctaactgtaaaaaatatcacgtgtcttccctactgttgtacgaagaaaagtgacattaccgtattaattagcataagtgaactaatccaatcgcaatatcgattgtggatcccctcaaatgatccaagtgtggttctaagtacagtatagcaaattacaaattcatccctagatagaatttagtaaaaaaaaacctgaaaatacacatgatattgctaaatgaatacagtgtttatgatattgctaaacagacgcatgatattttacctgtttgattaaaaatctatatctatatctatacctatataataaaaaaaaatatgtaaggtttccggcatattttttcgtccgtctctttttttttcctttttttttttgctattttcacctttttttctttcttttttctgttgtccactttttttttcaccgccttttttctgtccgccttttttttctccgttttccgttattttttttcttttttttgaccacctatacatttgtcgacaaattttcttataaaaatttgacacatgtaattatagtacaatcgtagtgtaattacactgtaacttgtatataattacactgtaacttgcatgtaactacagtgtaacttgtatataagtttcacgtaattttgaatcgttagatctattacaaaatttgttctggtgaggaagaaaaaattcacatcatacacatatgtgaaagaatttgttctcacaacctccattttaccgaaataaatgttatggagatatttttgaaagttacatacatgttatattataagttacagtgtaattacactacgattgtactataattacatctgtcaaatttttggtggaaaatttgtcgacaaatatatagcaaattcgtctttttttgtccgtctcttttttcgccccccccccccttttcttttcttttttccctttttttctttttgtccgttccttttttttttttttttgccaggccgaaccctagcgccgctgccataacgatcacctcccatgcgttctcttctacaattgattgtaaaagttgattacccactactctctcattattttcccatgatttttcctttcaattctgctctaatttaccggatctaatacacatttaaaaatcaccgtatctgagttttatgtattcgctcatattttggtaaaaacggaaagagtagatcgagtgtatcaaaagccctcaaccaactttgggagtatgggctaggtcaaagagaggcaagcaaaacagaggaagataacgggttgggctaagactgaaaaggaaggaataaatgaggttttggccgcaaaacagaggaagataacgggttgggctaagactgaaaaggaaggaataaatgaggttttggcccaaaaccaaagagtatctctactattataaaaattgaaaatgtttttgtcggtactttcgtagatcatctgtatttgagtcggtttctaagttcgttcgcttttggaaatatagatccatgtttgagtcttattttaagtctgatcacttttagaaatacagaaagagtcatataataaatctctttaaaaaaaactcgcacgctaactagggatgcttttggaaatacagaaggagtcgtataagaaatactttaaaaaaactcgcatgctaatttaagatgagagttagactcctaatagtagcttataattttctaaaagaaatatccaagcaaatttctacagtaattttcaccctaactgaaccgtataacaacaacaataataataataataagtctaaaatagccttcacccattgcaacgcacgggtattttttctagttattgaaaagatacatagtgcttccatcgtccgtcgctaatcgatcaaaagtgatatgttgtccaaatatattcaactaataaaagtcgtaatggtttatttcattcatcatcccgatccaacgaccttgattattcggtggtcatgctcatagtttgtatttccgaattgtgacaaaaattacccatatgccacgaacaaaaccccaacacaccctaaagctcgatctaatcgttccctcacatcgcaattctcgttccctcacatcgcaattctctcctactcccttgctccctataattacaagtgtctagtcgagctagcacctgagctggccaggatttgggcggccacccaacctccatcattagaaccaccactgttgaatgactttggtgtaagtggcccatcaccggaaaaacctactctctccgtttcacaatgtaagactttctaacattgctcacatatatatagatattaatgaatataaacacatgcatatgtctagattcattaacatttaaatgaatgtgagcaatgctagaaagtcttacattttgaaacggagggagtattagatggtgactttggaaccgtcacttcctaccatcgcggttctcttcttccatgtctgctcctctcctctcctctcactctttctggttagggtttagcatgttgttttttttccctctactgtctttcaacgacctcaactgtccttccacttcatcttctcacccaactatttataaaccgtactttctctttcttttcttaacttctttaacatgatgagatctctgtgaatggagctaaggtgccaaaacagtcccaacaataaataggggtaaatatgtacaataaatattatcctactagacccttttcccgttgcaacgcacgggcaattcttctagtatataattagatataataaaaataaatttaacaaataacatacaatctaaacaatgatgtagaaacggaatagaataatcttttaaaaaatatatattttaaaaaaaacatggaggaaataatccgttccaatacttcggcgaataagaaaaaaaaaaaagaacagggcaggtcccgctaagaacgtttgataggtactccacgaccgtaggagtgcagagcgcagaagaattcaaacatgtccacatttgacatcttgtctggtgttattggaagatgaaaccatttttaagtggcgagtgttgcttcccggcacggacggtaaaacagacaggttgtatcgtttgttcgtgagctcacaaagcagctagctggcctgctgaacaaagcatgtcgcccactctgagcagcttccgtcttcttctgattcgacttgttttgctggctctcctgataggcagcggcgtccccatgccctcggctcagcaaggcagcgcacgagtccgtgagtatcatctgtatatatttgcaacagatttagctttggcaatcactagagtctagagctacggcgcgcagtactgtttttgttcccccgcccttggattgctgctaatattttctttttgacgcatcgttgcagataatccgcatggtccaccgcagacccatggtactggttttagctacgacattattcgtgctaatggtgcaataggctaacccacgaaactcacctataagccaaataagtagcgaacctatttattttgatctatatggattagcggcttactcacttatacccttgattcgtgctggataaatatgtagatcgtgttgttaccgctctatattatactcctactccctccgttgaaattgtaatgcctggtttttattgattatttcggaaaatcgctccttggctatataatagcaatgcctccaactctgttttaccacaaagttaagtgtaattacaaatttagtatataattgagcagtatgtacatttagtttgccacttatctcatcgtatcccttctattttcgtttccactttcttttccttctgaacttacatatctattactccctccgtcccataatataagggattttgagtttttgcttacagtgtttgaccactcgtcttattcaaaaagttttgtaattattatttacttttttttacttactttactatccaaaatactttacacacaactattcgttttttatatttgcataaattttttaaataagatgagtggtcaaacactacaagcaaaaacttaaaatcccttatattatgggacggagggagtatctattatatattaaaaatcaattaaactttctcaaattaaatgctctcagaccatcacgtggtgctctaataagttagagaaaaataatagaaattatgagaacaaaaagtaaaacatccatccattaatttttatttaaattggtaggtccacgaaaaaaagggcgcggcaaaaaaaagtgataaaaaaagctccctgataaaaaagaaggatgaaaaaaaccggtttcgattctaaacatcgcctgcaaaaagaaaatcgaaaaaaaaaaagaaaacgccgtccctgatatagagccataaggcctgaggcccgaaggcccggcccacggcacggctttttggcccggcccaagcacggcacggaccgacttgggtcgggcccgtgccggcccggcctgaccgccgggctgtgcctgggcctctccaccggcacgctgggttggcccggcacgatgggccggtaggccaggcccggcacacaaagtatagagactaaaaatagacatataaatgttactgtccaaataatagggaccttaaatagacttatttcagctattcatataccacagcccaaagataagggacgtaaaatagactttttagctatatatatgtcacagcccaataggagggagggaaattagacttattctgaggaaatgcacaatggcccatcgtgccttcggaccggcccggcacggcccgagacgtgttgggccgtgcctgggccgtgagtacgacacggcccggtgcgtcggtcgggccgtgccggcccaacatgcctcggcccaggcacggccgggcctaggccgtaccgtgccgggcagtccacatggccatctatagtccctgagaaaacggccaaaaaaaaacaaaaaagacgccggaaaaaaaaaagaggcaaaactccgttcaaagaaaatggctaaaaaaacgcgtctattaaaaagcccacaaatagggcgaaaaaccaaaaaaaaaaagccaaaacaccgtgagaaagaaaagacagctaaaaacgcaaaaagggaaaaaacgccatcccatgaaagcccccaaaagggaaaaaaactgtccgactactatatgttttatagattactagcaaaagtgcccgtgcgttgcaacgggaattgtaaagactaaaaaattgaggaaaagttgagaaatatttacattatgtaattcattgaaatacaaatttcgatattttttaagtaggtaggtgtataattaaattagtttacaagtaaagtaagtgcgagaaataaaatggtatagttaaaattaattttattaaattctccgtgattaattatgctagttggaattttattggaatttgcgtagcttaattgctaattttcataatactaacatccttgcaatatttatttgaatagaaatcttccactctctcgttggggcattttcagcccatttttatacagcccgcagccaagctggcccgctttcctcccttctcctctcctccgcctcaaccgcacacttgtccggcccaaaaataagtctaatgaactccccctacttcatctctcactgccgcgtgggccctaaccgaaagtctaagttaaatttttttgttcgaccggtcgacctgctgcggcccatgaagcgcacgcgacccaatagtgattcggcctaacgcgggatcgatctgagccattcgtttagagaattttttttatttataattttttttattaaaagttttacaaaaataattttccattttgaaaattgacggaaatagtcgcctaccgccctctgggagggcgatttttaaaaatcgccctcccagagggcggcgaaaatgacgtggcagccggccgttcgctctcgggcgacggccgtcaacgaaatttgcaggtggcccccttgccgccctccgctagggcgattttatactgtgcggggggccgcctgcaaatgggcggcgagggggggcatggaattttgcaggcggaccccttgccgccctccgctagggcgattttctactgtggggggccgcctgcaaatgggcggcgagggggcatggaattttgcaggcggcccccttgccgccctgggggagggcgattttgtactgtgctctatattttttttatataaatatcaatagttatcaaatctttttatattgaaaactatacaagattaaaatctccaagactggtaaaatacaattttattattttttagggcatatttggattgttaccgtacaaatattttgttagtgccaaaatataagcaagttttggcactaccaaatatttggtaaggtaaaattgcatttgatcatatttggtttgctgccaaaatgtaaaattgtagtgaagaatgttgtacataatctcaattctagattacgtattaccaattaataggcttccattttcgtgtgtggtgtgctagtgggaaagaagatatgaagaggttgccttcagattgtcaattatatagcgtcgttttcactgcaatatatgtgaactcaatgagatacattattcattagatgtgacaagacgatcacgcgtgggcgtgattcactttatgtcaacaggcagcgccgaaagttgatagtgataacttgagctgccgcttttcatgtgtgctgttgtggactgtgcgcgctactggatatggcactaccgtgaagcgccgaaagtgtgttgttgtgagcataagttgttcaagcaccatatgaatgaaaagaactacgtagacgagacaaacacaagtagtactgcagtagtaatagcaaaagtagtactgctttacaagtttgtaagccaaaagaaacggtcacataaggactgaagaggtagaacactactgacgaggcctcttacccctgtccctcctaccctgcgccctaatgtgcccctgggagtacgtgagtcggtccgggggtacggcacggccaacccgacctgcctgtactggtgtgacctctggctgctcctgagtgtgcgcctctggagctcctccaagctgagaggagcctagtacgtcctggtggtctgcaccgtgcaagtcgtcgtcatagaactggctagtaggaccagtcctaccggcgtgagacgaagaggccccagtaccgaagatcccggctgcatatcctgctggacaaggaccatcagttttgtacaagtatttaacagtagtaataaaaagtaaagtaccgtgtgggcgagggatcgacgctccgtgagaggaagagctggcgaacgcgcccgaagaggtggcgaacgcccctgcggagctcgcggaagtgccggtcgtgcctgcgaacgcgctcgaaggcagacgaggtcctgcgatgaggaaacgtgcagttaaaacatggtgacacattcgtgcaaaagctgaaacaaaaatgaactaatatctgggctgaattgtaccgtgcgaaaccggtgctgtaggtcgcactgctccgaagctaggggcgctcgaaggcaaacgaggtcctgctccgacggtaggcgcgcgaggccgtgggtgtaccggaccagctggaggtacgacgtccacggcgctgcgacaggagaagacgcgcatgaccgcacgcatcttctcctgcatccggtcgaaggtcgccctctgctcaacgtcagtcaagtgcaaacctctgttcaacctcacctggactgcggtgatatcggcactgatatcccgtgcggcatcagcctatgcaagatggaaataaaaaattcagtagttgtcctatattatgcaagataaatgaaataattgttggaagtaatacaaattggacgtaccgccacgaagtagtctcggtcacggtgcgtgggatacgcgtccgtgacagcggcaacgtgcggctctggggcgtctggagtgaaggtcacacgcgcacgagtgcgaggaaggtaccagcgaaggtagtcacggtagttctcctccgtgtgtgggaagagctcgttgatcacctcctctgtagctaacacccagtcgtcaacgtactgctgtacacgtagagcccaaagtgcgcctgctagctgtccccgtcgagtcaacctgtgaagagaggtaaattatatggctcgatgatgtaattatcataaaaatttagaaatgaacaatccgaactcacgagtggtcggcaggggggacggtcggctgcacgttgcccggaaacacctgcctaagtccgaactgtctcatcacacgctgcgggcagtgaggctcaacgaaaatgtgaccttacttgacattgtgcctgatgaaaacattaactgcgttaacctcgcatttctgtactacgccctaagttacattctctacaatattgtcctctaaatttctaaaagtacgttacattctccagatcaaactaaactacatcttacaattaacactactgtctatgtctcaattcatactattatattctatgctctggatctacacatatgtgctgtgtgctacagatgtgctaaaatatatggaactaaaactaaaacgcaacatatatactcaaacataacatattagtacaaatgcaaaagatgtatgggagcatacctgtgatgaagtgagcgaaccagcagggcttcgccgctccccttttgctgccctcccctctctctcttttgttttttttggatttttagtgaatataatgaaatttcacagaggagggactgggttttatagggggggcaaaaatcgccctcccccagggcggcaagggggccgcctgcaaaattccatgccccctcgccgcccatttgcaggcggccccccgcacagtgcaaaatcgccctagcagagggcggcaagggggccgcctgcaaaattccatgccccccctcgccgcccatttgcaggcggccccccgcacagtacaaaatcgccctcgcggagggcggcaagggggccgactgcaaatttcgttgacggccgtcgcccgaaagcgaacggccgtctgccacgttattttcgccgccctctgggagggcgatttttaaaaatcgccctcccagagggcggtaggcgactatttccgtcaattttcaaaatggaaaattatttttgtaaaacttttaataaaaaaaattataaataaaaaaaattcttcgtttagatggactgctcagatcggctcctaatccattaaaactccggaccgaaccctaatccctaa

SEQ ID NO: 5061 - DNA, 1327 bp, Oryza sativa
gaaaataggtacgataaattgtatataaaatattgcgtacctttgtagatacatgccgaatatatctacggaattagtagatcaatttaattaatctactaattaccttaattagccttggtagccgatctgaattgtcttctgtgcatgtacatgtcgtcaaatcaatgcacacctaggcatgtattgagtccatgcatatgtaggtgcacatgtcaggagcaaatagtacgtgatggtcttgaataatgatgtattcggtctcctcgccacgacttgtcgggatggacgttctcactatgtgttaggggtgaggataatccaggtcccaacagaatcaaaattaattgacgatgtcacttcccgggcagtcgactcgaacggaggcttcctggtcaagtcattgatctctgcgggggacatactccggtcgggttagatcttcctatagccgaagtcatcgagtattttgttgtcggagaatccatccctcgaacccatctcgtcaaaaccttgaagcaccaaaatccccctacctagcacgccactgttaacgtttgatattgcgactacgttatttagatggtatggggatcgttggtaccagggtatatgccagattgaggtaaaagagatggagacagggatttttatacaggtttgggccccttatctgacaggtaatagccctacatcctgttggccgcagctggtgttgctcctttattcatctgaatcacaccagtacaatatttagggtagcctatctaactattgtagacttggcggtctgaaattctaactcgtatcgacaacagggtagtcttcctcctcgaatccgtgcccggcgagatcagagatagcgctttcgtctctcctgacagtatccggagacaccgtaggggactagccgtgcttatccctgaagccgctttcgtctctcctgacagtatccggagacaccgtaggggactagccgtgcttatccctgaagccgctttcgtctctcctgacagtatccggagacaccgtaggggactagccgtgcttatccctgaagtcgatatccggcgtcttgtcttggcttatgttggcttgtatgttgtggcttctgttgttccgtctccactctcctcttaggaggtcttatatttatacccataggtgtccccttgtccaagtagaactagggaaaccaatatggatacaatccgagtagtccttgtcgttttcatgtggaactctattcatccttccttatgcggaactcctcttatatatgaaggttgtttccgtataagagtatgtggtgggtcctgtcgagatt

SEQ ID NO: 5062 - DNA, 15657 bp, Oryza sativa
cttgccgccgaatcttccgatcaaccttaagtgtaggatctttcaaatatctaaccaaagaatactccaatcctcttctgtttcctgggcaaaaatgtccgaatttacaattaattcggcctttgaatcaattgcggcgtgcccctagctctctgtccagaaacggtcagaccggctgtgcaaggccagtcagatcgcccctagtctgtgattttgccaatttcgctcaaagatctaaaatcaagcaccagctcttctaatatcaaaaatactccctcttcacattatagccagatgcttgctgtgctaaatcatttgccctaggattatcatgcctaccaatatgtctaatagcaaaattatcaaaactggcaataatatccaagcattgatcaagataactatttagtgatccgtccaaacagtaagctccggcaacttgttgcaccaccaattccgaatcaccaaacgcttccacgtgtttagcgccaaccatctccatcacttgtaaaccaaataataaagcattgtattcggcttgattatttgtacaataatattccaaatgaaccgatgcctcataacacatgccattaggtgaaaataaaactaccccgatgccttgaccctctttgcaagaagaaccataaaaataaatcttccaaggtataacttcaattaagattcctcataagcaatatccacatgatggtctactataaaatcaactacaatttggcctttcaaagatttcaatggtacaagttggtatcagagccgaccttgaccgtaggacaagccaactggaaaacctaagagccctctgaaccctttttcatatgcacatgcctttttcacttggatttgtttcgggaaactttggggtttgatcttttgattttgggagaaaatcttggtcgcctatttaatcggatctcttgactagggacagtccagggttttagcaaaactttatttggaatttatttggcagccagtcgggaattgttaggtggtatgcattaagttgtgtctagattcgatgggatgcagtctttatgcgcatcattattatcatgcatttatttcatgcattaagttattgtttagtcagttgcattagtgtcttttgtctgggttcatgaaaaatgttccatgcataaaaatcatcatgcttggctagttgcttgggccatttgttgctttgtttaaatttggatttgagcatgcattgattcctatcccttgtctaccttagaagtcaaacctgttcttcgatcgcaagcgccgctccgagcttcagagtcgccgcccttagctttatcgtcttcttagtctgtttgcgtgctagtttttgtgtttaggtttgttgcttgtgggttagtcggcggtcgatatcatgtgtgagtggtatgacacccttaattaggaattgcgtgcctctttttcagtgttttaatcaagattaagataactgcacttaattttataagaaagattagtttccgagccatctgttttcttcctttctcttatttctacctatcctcatccagatggtgaagacaaggaatgatccccgtgactccaacgacgccagtggcagcgaagagcagacagatgaagctcataccagtggtgcacctggcagcagttcatctccgccgcccgagaacccaacagtcactcagatgatgacaatgatgatgcaacagatgcagcaacattaccatcagatgttgcagcaggcgcaacagaaccagcagtttggtcctccaccatcacacgtgtccaaactgttagactttctccgtatccagccacccactttctcaagcaccaccaacccaatggaggccaacgactggctccgtgctattgagaagaagctgaccctactgcaatgcaacgaccaagagaaagttgcttttgctacacaccagttgcaaggtcccgcttctgcctggtgggataactacgtggtgacccgtccagatgcaacgaaggttacttgggtagagttttgtcaaaactttaggaaggcatagattcctgaagggattatggcacaacagaagagagagttccgtgcattgcaacaaggaaccagaacggttacagagtacctgcacgagttcaaccgcctcgcgcgctacgctcctgaggacgtgcgcaccgatgctgagaagcaggagaagtttttgtttgggctcgacgatgaattgaccaaccagctaatctccggagtctatgaggactttgagaagcttgtggacaaggctatccgccaggaagatctgacttatgtggagaagccgatttgtatccttgagaccagtgagagaaggaccagaaacaaggtgatcaggttttgcaaagttcagtggagccaccactcagaagaagaggccacctcggaaagagaagatgaattgaaggccgctcatccgcacctcttcgccagctcttccgaatctcggggtcgagattccgtttaaggggggtaggtttgtcacgccctgaagttcccctcccttgctctaaattcataaaataaatcgtccgaagaaattgtttaatttaacctagagttgaatccttaattaataaatgcaaataatcatcggaatcggcatgtggaatttttcttggattctacatgtcaaaatatgctaacaggatttttagtggaattttcagagccttggaaataattttaaccaattaaaataagcaaaatgcaatattaaatccctggaaaaatcctttcttctttttctttttctttcctccttttttctctcttcttgggacgtcggcccggcccatttcttcccgcgccagcccgctcctccgtcccactcccgaagttcacccggcctccctctccctctcgggcgctgacaggtggggcccacctatcagtcctttccctaacctccggctgcccacgcccgctccaaccgccgccgaaaccaccgcccacgccgccgcgtatcccgctactcccgcgcccactccgcgccccgcgcccacgtcgctgcgacgccgcccacgccttcccgcccgcgccgcgagcccacaaggggtggattcaaattttgaatcccctcccactctctctccacctcccacgtcgccggcgaaatcgggagcaccccggccacgtccgtctctcccgagccccaataaagcttccccgcactcccctccacctttttcctctttccgccgctctctcccgtgccctccatcactcccgcgccgctacacccatcaccgccgccctcctgccgtgctccggccgccgctagccgtcgctagccaccgcgccgagcctcaccgtcgacgccgccgcgttcaccatcccgtgagccgtcgcgtccgccatccgcccggccaaatccaccgtcggggcccgcttctccccgcgcgccggtgagtaccaccattgccgccgccttcggccatggtttccgcccgtcgtggacaacccctctccctctaatccttcccattttgatccctaggaggtcccggagatcgtccgcccgtcaccgtcgtcctcccgtcgctcgtcgtcgtcgttcgccgtcgtctccactcgcgccggccaacctcggtgaaaaactccccctccccccctctttccctctctcccgtgtgcgccgccgtcctccgcgcgcgcaccgtcgtcttcggccgccgccgccgctttttgcgccgtctgccgtcgccgtccgcgccaccggttgccgtcgccagcgaccgcgcgtgccgccgtcgctcgccacgcttggcctgccggctttgaagccgagccgagccaccagacgcgcccctcccgccttgtgccactgccagtggggcccacatgccggcgcccctccctctctctcttgagccgctgactcatggggcccgcatgccggcgcctccccttccttgctgacgtcagccctggggcaatattgcgcaataaatacattaaggcttttctttaatagtaaaaacacaaagaatcttctaaaaatcataactaattcatccgagctccgtttaagcccattcaagtctcagtaaattcataaaaatgtatagaatccattaaaaatggttttgtttcctgtttcagtagtcttatagcatgttttgcttgtgtgctttgtttgtcgcgtagatttcgcccgtttcgtcgattcgtggtttctcgaagacgttgctgtggttccatcagtgcgagagcaaggcaagtcatacattgcaattgatcatattgtacccaatttacaaatgtcccgcatttctattaaatattgcactgttttacaatatcatgtgggatgggtcctattactcagctatatgttgtttcccttacgccattgataacttgggtatcaaaatgactagatgttggtttaggagatgcttagccatgcttagttcaactaatgcacaaaaggggatcacactaaagcatagactttgattattggcaatagctttggattagtgccaccgcaatggtgttggttaattaaagtacactacatggtgggctgtgggtgcatggttttgctggtcgcacccatggcagttaaggaccggttcgcgggatgccctggaagaacttatcgtacttaccacaagccagcgtgggcaacggctgggcttgtagtgtagcttttctctagccgacgtacccaggcgagggtgggcgtgatggagttgggtcggccggggtgtccggttgatcggcttccggattcaccgcggcaccaaagggggggctgcccgttgcctgctggggacgggggcgaaccctaaggtgtggtgcgatcggttagagagggttatgcgaagggtcctgtcacagcctctttccggtatgtcgtggtggcatgtcggcgcacgggaacgtgtcgtggggctgtgtcttgtgggtatagttgtacacctctgatcagagtaaaactattcgaatagccgtgcccgcggttatgggcggtcgaccagattcaccgtaattagtctcacccctagtttagcttaatgaactggtgtagttcaggtggttggttgggcctgttgcaatgtggcgtagcgttggacagtgactggttaatattgcttaattactacaactgtttttactgttttcaactactggttttaaatgcctgctctatgcaaatgaaccccgtagcctcttttggttatatcctgcatcatacctcctcatccggtatgacttgctgagtacagtgggtagtactcagtcttgctcttttcccccacaccagagttgaagttcttctcagttgaagatgtctcgaagaggttggtttcgtcgctgccgtcaaggatgcctgtggaatggagtcgcccgctgcaggagtcaagtcttcaggcttagctcgcttttacctttttcgctgcatttgtaatctttcatatttttgtaagacgtggatctgtatgtcaacaattgtcgtttgtgtaccctggctggtcctggacaggggtttaatacacattcagcttagaaattctggttcgtgaatttctgggcgtgacaataagccaaatcatattcaatcaaagcatatgcccacttgccaattctcccacttagaattggcctttgcatcatatgtttaataacatcggcttgccaattctcccacttagaattggcctttgcatcatatgtttaataacatcggcttgacaagcaactatgcatctactagataacaagtaatgccgcaatttggtacaagcatagtaaaggcataaacaaagtctctctatgaagacatacctcgtttcagcatccaaaagacggcgggtcaaatatgtaatgatatactccttgccatcttcctcttgtgtcaaaacggcaccaatgaccttgtcttcggaggcaatatctaaccgaaacggcattccggctttaggcgctcgcaccacgggtggagtatacaaatactacttcaacccctcaaacgcctcttgttgttttgccccccaagtaaaatcggcttcttttttcaagcgaagtataggaacaaaagcatcgatttttacccgctaggttagaaataaatctactcaaataattcaccatacctaacaacttttgaacttctttcttgcatgtcggtgctttgaaatcacgaatcttttctatcttcttaggatcaatctcaactcctctttcatgcaccataaaccctaagaacttccccaccgacacaccaaaagcacacttgagtggattcatcttcaaaccataccggcgcatcctctcaaaagctaacctcaaatcggctatatgtccctccataccatctgatttgacaacaatatcatcaacatagatttctaagataatacctagcaaatcatggaagatcaaattcattgtcctttgatatgttgcaccggcgttcttcaatccaaaagtcatgacaacccactgaaataaaccaataaatcccgggcacctaaacgccgtcttgtacatatcctcctccgccataaagatttgattgtagccggcattaccatccaagaaacaaatcactttatgacccgaggcatcattaatcatcatgtcggctataggcataggatattcatcttttggagtagctttatttaaatctctaaagtctatgcaaactctaatcttaccactcctcttcttctccaccgggacaatactagatacccactctgcataacgacataacctaataaaccccgccttcaataaccgatcaatctcctctttgacccggtcatatagcaaaggattaaaacgacgaggtagctatttataaggcctaaaacccggtttaattagaaaccgatgtataacaagttcacggctaagatctggcatctcatgatactctcatgcgaagcaatcaacatactccttaagtagctcgattattttaaccttataatcggctctcatttttttgtttacaaaagtcggccttggtttagttccatcacctatgtctacttcctccaacggatcggccgatgtaaacccttgaccaagcttttctactttatcaaaatcttcaatagtttcaccaatatcgttttttgtagaccgatatttttgcaccctcttttgcaaccactctaaattagcttatttactcattgcacaaagtgatatggcctagccgtgtgtaacaacccaaaaattagccgtctgctaattttgcatcatgctgattcttatgttcttaataaccttctaaacctaggaaaatataattagcgggacctcctaaaaatgacttgtacgaaagcctctatggtatttaatctcttttgtgtttttcatttaaaaatatgttttggttaaattgaggtatttcttgatttcgttcaaaaccttcttttgactaaaattccttttagtcaattttgcttgaaaacccctttttattatttttatgaattgtggtccaagaaaccttcccaattttgcccttgaacctaaaccaaaataattccaatctcattagaattatttgttaatccatcctttgattttaaacctatcctttgattctcaatccaaatatccaaattcctcctttttgatctagccactaatttaatttctgtggtttgatttccttctcggcacaagaataaaattattacgaatattgtgaataattgctcttgtgctaagaaaatagattatatctttgtcatccaaatttactattagcctcaaacaattctctgaaacccatgccatatattttgaggctaaaaccctatttatccttctccaattatctttttcccaccttcctatttacatattaaattttattcatatatctctcaccctttcatttgagtgcaccaaataaattccattatatactacttctaaaatattgcactcaaataattaggaaatctctctttgaaattatctccaaaataaattcatctcaaaggttagccacttaaatttcttccaaatattaatttggattcaaactccatccgtcaattccctacacaaattagaaagcctttctattcatttgggccgaattctccctctcttccttcggcccagaccggcccaattcagccgagccgccttcctccaggtgcgcgtgccgtgcacggcgcacgccgccgccaaccgtcgtcgctaagaaatcggcgacgtgcttgtcttctccacgtcgccgcagccgtgtcttcgtcgaccttctcctccgaaccgcctctctccaccgccttcgatccctataaatagacggcaaacctttccttttctcccccacaaaccaagctctctctctcttctaccatggcagccaccaccggctattgccgatctccctcaccggagcattgccggacaaaccctcgcgccaccgggcttgccttgatgaggtgaacccatttttctagtttcccctctcccttagccgtcctataagccactatagccacttcttttaccggccggagcaagcttttgccgccgccgttccggcttcatatctcacttccactgccgacctctgccgtccccggatgcgcgtcgacggggaacatgttatgttgccgacgtcgccgcgtttcggccaccggagggccggcgccccgctcgtcctctcttctccctctctcgctgccaacggaagaggagaagaaagaagacgggaggaaggagaagaaaaagaaaaagaaacactgacaggtgggcccctgcacagttcactttcataattttcctatttaattcaaaacccaatctttagaagctcatatctcctaaaccgtagatccgaatctagtgaaacttggacctaaattcatctaaattcaaaccctatattttgataccaaatttgctattttataattttatttgaatttattcaaataccgtttgaatttataattgccttttcaaatatttccttttaatccaaaataccctttagccactaaaaagccgctggttgaaactttacgcctttcatggagacgtttgcggtcacctaggccccgacgtcgaaccattggctgtaaagcccggcaaaactcaaacccaaggtcgaagtgctgctcctagcaccctacgccttgatgcgtataatgatcggagcttcactatcccctcgacctccacagcacgccgcacagttagctctctggctctgtgtgatcctagccgctccgccgccactcacggttgtcggagtaacacttccaccccactaaacctacacaaatctcctattcctctagtcgttatcctttttgttgacaccggctagaaaagataccaaatctagctgttatactgcccgactctagcaatgactagcaaacaaccaaaccctagccgatgccttcctaattaaattccagtcatcatccaaattccatacccacccatcgagcatactctctgcctaccagaacctatacataaactatagagcctagttgatacgctatcctattccataatcaacttaactataaccaaaccctagatattatactacctaaacctaccaccagccaatactagccacatactcacttaaccagttatatcctttattctccaagcaaccaaaacccacacatgaaatatagcgacattagttgcttgatcccttctctaccttagcctccaaccctcgagaacctccacacaaaatattagcccaataatccctatacccaataaaaaggagatatttacacccccaaacccagcctttctcgctctttattgttttcttgctatttcatgatttttattgaatttggttcttcgtctttcttagtagagtctattttattttggatggcaacctgtattatttcgaggatcggataatcaggttgcctatcacggatttatttgcattggagcaaggcaagttattattcctctcctttgaacataaatgccctatattctatacctttattctatgcattagtcattcatgatttcgaatgcataaactgaatatagcaaaccagatatgctagcttttgcttagccatgccagttagactgcataaaatataatgaacttagattggaacagtacggtaaaaaatggttgatttccgggtggctagtactattccaaccgacataagactgcccaagtacttgtgaagaacgaacgagtacgaccgcagcttctagaatggggacagacctagatattatgttaattaacaatgtggtacctctgtacagtggttccttttgtaagtcctcgcgcaggaggcaaatttacgccgcgaagggcgattgtaatatttactgaggcgcaggtaaatatttgagataaattatgatgactagtctgtttgtgaaccctgattgcgatgacatggtgtcatacgatcagttctctctaaagaccccgggaacgccagaactcctctcgctgctgataacgttacgttcagagcgcatggggactagagttcatggaacaagtgccacaattgttaataacctaataataggccatgactaacctaatgaattggcaagtcgtggactgcgggtaaagcgtacatctactgcagtagaatattcatgaaactattcgaatagtcgtgctcacggaattgagtaccgggactcatatggtatttgattagaaacctaattcaagattttactaaatactgttgcattaaagtcattacaggctttcttcttctacatcctctgctttctgcaattaaatctagccctacttaaatgctactatttcatacattcatattgaatataatagcttgctgagtacgttgtactcacccttgcttcaaccccacctttttcagagtcattttggagttcttgccaaagctgggagttcaatcacataagttagtttcattctaacttaattctcaagtctagattagatagatggtttaggtctatagccaaacattagagttaagtcattctatagcttttgctgtattagttagccacaagtttttaaatacccatatattttgtaataatatatcctttggagtcttattcaaacgtatgcaatgaagatccagattgttgaacatgtaccaatttactaatccagggcttgatacagtttaaacatgtcggtttccgaatcattagtttcaggacctgacaccgtgctacactagctggctttacagagataggtacaaatttgccatcgaaaatactaataaaatcatagctagaaagatccatccccgataagcattgaatattcccatgacgccactctaatgtcgcattggccattgcaactttggccgacatatccgcttgaacaatttcaatatcatcaccgtcccatcgaattaaacattgatgcaaggtagaaggcacacaacaattggcatggatccaacaatgacccaaaataacattgtagttaccttgcacatcgacgatgaagaaagcggttggcaacgtcttgtttcacacggtaagctccatcaaaaagatacctttcgcctccgtaggttcaccattgaaaccattgagaatcatgttagtcttcttcaactcatcatctccatgtcccaacttcttgaacaatgagtacggcatcaaattcacggcggcacctccatccaccaacatcctagagaccggcttcccatcaatatgatctttgagataaagaggcttcatatgacgatttgattcatcgggcttctcaaaaaccgcatctttaggacctactaaaaattgagcaacttcggctttatccatagcacaaaactccatatgcaacatacacaccatgtcaacgtccatgtcgtcctttggagatgattcgtccttagtaaccggttgttcttccttccccatttgcacaacaaccaattcttctccccctatggatttacgcctccacacctttgtaggcggtggtcgcaactcattgaatcttctatctctttgctcttcggcctctctctctctctcttttaattcttgggcccaaagacattgcaaccttcttttttgagtagccgttaaatccttaggcatctaccttggtttcggctttgttccaggagagaaataatgccccctgttgattctacctgaagacgatgaagcccccgagctatcctttgtaaacctctcatcaaaccggcgctggagcccggtcagaccggacgtaggccgtcagtcagaccagccagagacgccaatcaaaccggcatgtggccggcggtcagaccggccgtagggctgtggtcaaaccggccgactgcgatgaactgatcccggcttcggatttgttacttgaagactcccaacctcatctccagaacgtattggcacattatgagaccctactttgatagtaatcacctccgaagtccttgtctccaccttaacatgctttcattccctctttccttcatcaacgaggtttttagcacaaaaccggccattatttggtgaagacaaatgctcatgagctggcctccttggtcctccctatccttgattgtattgcattggaggcatatgattgaacattagtggtgttgcccccatggcatgtaataaggaaagggataacccggcggtggcattggataagaccctcatgacatgtcttgagaacaatgatatgtaggtgatcccgactgtcttggtgaatgaccaaatcgctccctaggaggtgatcttggtctttttcctttattgcgagctttctcaccaccttgcttctcatgcttatccaaaagcatatcgaaggtcaccgccgctgtaggtgccgccgatgcagctcgttgcctgctgcctcccatcttgccaccgctgactgtgcctctgccaggacgccgcccaaccgccgagacgagagagagagagagacgagacgagaagcaagagagaggaggcgagaaaagacgagaggcaagagagagagatagagataaagactcggcgatattgactcatataggctgacgcgtcagcctggatcggctcggctcggcttggataggtgctggtttttttaaaaaaaaacgatacctatagtttattattggtgccggttctaaagaagaaccgacacctataatatcgttgtcggtttttctttagaaaactggtacctatattatattataggtgtcggttcttctttagaatcagcacctatagttgtttaaaggtgtcggttttatgtgttttcagtccacggaggagataaaagcattataggtgccggctttagctgatccggcacctatagtgccgatctctatgagcttttttgtagtagtgcattctcattggtgtgggttcgtcacttaatgtgcaattgaatgctctagtactaggactctagataatgaaggaagttcatgcgtaaggctagagtagtaactaataacttagacgtagtgtctaggttagaaattaccttcgtttgttgtgtgctccatggaaagtgaggtaggcagcaggtggtgacagctctatttgtccttcgtattcctccacattcgggtacatcatagagcttaaggcaggacacaacttggcagaccagggaagagtcggttcctgaagcattcgaatagaacaatatgtgttacccaaaagtttcgcaacgtgactaacagtactgaagtacagtacgcatctgaaagttttacattttggtcctttttgaaaacttattttataaatagacccctagaaaaacttaatccaggaatagtcctttttggtgcaccagagaggctggcgccgttaccgtgccacctcgggagaagggcaaacctggctgggctgacgtggcgaaggggggcgtcagccacactggcgtcgtcccacataccatggcgccagcatggttggtgcactctccctgggtgggccgcgcctttaacccgcgcggggcctacccctttctcctcccccactcattttcgcccagtgctagccccaagcccgagtgcagttcttctccctctctctctctctctctctgccccctcacctctccatctcaaatccactcaatttgaaggtgtttttcacgggatttttttggaaatcaacgagaaaggtatactcctccatcccccccctctttttttggttttaatcagttgaatttgtagatcgaagggtaatcccagaacccctttttaaccaaatttgtgattttcaatattttttcttgggatttgcttattatagtgatacatgtgtgcaatgtattcggtagtgccatgattttttgaattatatatgtggtaatgtgaatttttagatggtttggttggacagatggatgaaaaaataaacttgaggcaacgttgaattattaatttgatggaccagaggctttaggttaaatttgtaggtatgaattatatgaatgggagccgaattcggtagcattatagaaatttattattgttaattagaagttggttgggttgtatgacggagtatttgtaatattttgatgtttaatgcactagttaacttgttggtacttttggatgtggattaaatacttttcgtgaagtagtagctttgggacaatttaagttatgcattggttataatatgtcagtttggactacgtttaggaaggaagatgtgattttagttataaagtcacaattttttttggtgtagatggatagacttgttcgtgtttagtacagtggtagagtggtggaaccttacgttggtgcacatgttgagtttgagatatgtcattcaagaccattttgtttcccgcccgcccaactctagatgaactaaggtcacaagtgaaagaagctcttgaatggaccgaggataatgtggagattcgtttttatgggcgatacgatgttggtaaagggcataagtatatattgaatgtgctaggtcagttggaatgggaaatttactttgatttggtaaaagagtctcagtttggatccctataggtgctatttgatttccctcgcttcgttttgtaattgttttgttaattggtttttcaaatgtatgtacactctaggctggcaggctcttcggtgtcaatgcaagaagtaatttctacgaagttcaactatttctcatgtgttaacttgtttaatggacctgtggacttgtgaacttatggactatgtgatggacttgtggacttatttgtcaacttagttaacttgtggactacgtgatgtttgatgtggaacttgttttgttttgtatgtttactgtgaaatggtccaaatatttgcattgtatgtttactgtgaattgtcaacgcttgccacctaggcgccgtgttggaaggggcggcgccaaccagcaggcagagacagaaggaccaggaggtcgaggggttgggggggttagcgccagccaccctagcgcggcggttgagtgggtggcgccagatggcggcccgaggcattaggtcttggggggagggggtggcaccaccaccgtgcttgggggggtggcgccagtcggtagcccgatgcataaggttctagggagtgaagggtagcgccagccaccctggcaccgtggtttgggggggc

SEQ ID NO: 5063 - DNA, 19976 bp, Oryza sativa
gcacgcgcgggcgtggtctacgtggcccggaggaggcgaaggcgtggacgcgacggcggttgcgggcgaggcggttgcgggcgcggcgtcggctggaggagggagacgggcccgacaggtgggccccacctgtcggcgaccccgagagaggagggaggcgggacggcctggatgggcctcggcctgcggccggcccaacagggaggagggggaggaaaggagagaatgggccgacggcccattcgaaaaaaaaggaaaaagagagggaaaaaaaaagaaaaaggaaaaaggattttccctggaattaaaatattgcttgctcaattttaattggttaaaattatttttaaagctctgaaaattccactaaaaatcctgttagtgaatttcgacatgtagaactcaagaaaaattccacatgccaaatccgattattatttgcattactttcttagggtttactcttgctttgcacctgtattttcttggggtcatttataaattaaatttaggcttgggaggagaacttcggggtgtgacaggacactacacaagtcggcccataggtcccatatttcctttcggcccaataacgcccaaaagttactgttcttcttttccacacactttttttttgcgaggattcttctccatgcacttgcattcacgaagaaaaatttgcgtcgttctgctgctgctcggggaggaagaatgatgcctcaggaaaatagggatggggatatttgtgatgccgcgcagctatggcaaccacctcatgcgaggcccacatgtcggtctctcttctctcccttcttcttcctcccttctttctctcatccgtggcaccgtagagcttgaagcggtaggtacatggcagttacggatgactttctgactttccagagaatatgaagaacgatgtggtagcagaatgaggaggtcccatttttgccactttcggcggagaactgcatggttgagggctttctatgaggtgggaagcgaggaaatggggaaggagtaggcggcctatatgcaagggcaaggggcagatgacgggatgaggagcggcaccgcacgactaaggtcgcagtggctggcggaggaggtcgatcacgatagatgaaagagagcatgcgacgtgaatgaggatgagcgatgcgctacttgagctgagcaacgatctgtacattatgggtgggcattgtttgtggggtggggggggggcggatctggggcgcggggttggcatgagattagcaagagaggcgcgcaacaccgagtccggaccaaaattgttgtgcgctggcggaattgatttgatggcgggacgaggcggacgaaacctagatccgacgaacagaaaattacagattttttaagtaggttagatttgtaacaagtgcagagtttaaaagaggcgtcatagtggaacagtcgtactctgcggtttttcctttctcttcgggggcgcaggtcccggctagcgtccctctcgacagtataatgtcgatcgtgtaaaagttgtaataccctctttcttcttaataaaatttggcgactcatccttcggccgtcctggcaaaaataaaggaattaatgcaagtgctaccaggaagaggcatcgatgataaacagattgaaggctgcagcctacttctccctactccgacctcttcctccttcctgctgatttcttctctccaactatgttctttgatttcccgttctctacttctcttcctaatctacttgcttgttccccttaattgtattcaatacttgagcagtactctctggatcggttattggtgcttctccttctggtgttgattttttgaggatgaattgagaacataacactaggcagctgacgtgttagatccacgtgggtttcatgctgactcaatcgattcaacctcatcacattagttgaaaccgggcatagtagtgcactagtgcttagatcttcgtgcatcttttggtattgtaagttgatggacgcgttatatctggtaatacgttttaagaaactcaacgttcaaatggcggacctaaagtgaacttattcctgtgtaatactctgtagcaagaattgggcccgatttgattgtgcaagtagaagggaaggcccaaagatagttggctttgtgatatatgaagtgacgacgctaagattgggatggttgttgttgtgatgtgcatgggatggaatctgctagcgtggctgtggatgcgtgcgatatgatgcagcagggagggaaggagggagcgagcattggtggaggcagctgagccaagcgcagcccatccatattcctgctttttcccctatcgatgacacacatacatgtccatctaacaagtagacgtactagctagtagtaggaacgtgaggaacgtagccgtcgtcccagtcacacgaacacgcacacgcacactttcattcgtgtgtgtgtgtggctctgcttgcttctcgttagtattgtccatcggatcggtatatatatataagttgctgaggaagaagctagctagtaattaagaagaggcggagctggatcgatctatcgttgagttgttattgccacacaaacacaaacactgacgcccatggcctccgacggcaccgatgtcgtggcgctctacggcggcgccaatggcctctcgcacaagtccggtagcttctccgtcaaggtgggcctcgcccagatgctgcggggcggcgtcatcatggacgtggtcacccccgaacaggcgcgcatcgccgaggaggccggcgcctgcgctgtgatggcgctggagcgcgtccccgccgacatccgcgcccagggcggcgtcgcccgcatgtccgaccctggcctcatccgcgacatcaagcgctccgtcaccatcccggtcatggccaaggcccgcatcgggcacttggtggaggcccagatcctggaggccatcggcgtggactacgtggacgagagcgaggtgctcaccctcgccgacgacgcccaccacatcaacaagaacaacttccgcgtccccttcgtgtgcggctgtcgcgacctcggcgaggcgctccgccgcatccgggagggcgccgccatgatccgcaccaagggcgaggccggcacgggcaacgtcgtggaggccgtccgccacgtgcgctccgtgatgggcgacatccgcgcgctccgcagcatggacgacgacgaggtcttctcctacgccaagcgcatcgcggcgccctacgacctggtcatgcagaccaagcagctggggcgtctccccgtcgtgcagttcgcggcaggtggggtggccacccccgccgacgctgccctcatgatgcagctcggctgcgacggcgtcttcgtcggctccggcatcttcaagagcggcgaccccgcgctgcgcgcccgtgccatcgtgcaggctgtcacccactacagcgatcccaagattctggcggaggtcagcagtgggctcggcgaggccatggttggcatcaacctctccgaccccaagatacatgtcgagcgcttcgccgcccgctccgactagctagcaacgtagagtgccatccttcctttccgtcccctgccaccactgccaccaattccttcctcataattactgccatatctgtgatcgatggttgtcatatattgaaaataaacaacaaacatagtgtatatatagtactatatactccctcctttccacaatgtaaacggctgtaattaatatgcccctaacatcactaaaggaccatgcacatctatctatctatttatctattatattattaaaacagccttaaaagaagacaccacgtttactgtggggattagaaattcccacattaatcggataaaaggataaatatttacaccgttagatcgtagttgtactagattttagtggtatagattattcatgacaatattgagtctaaatagaaagcaactttgatctaataggaaatatgggagtcggacatgttgaatgaatagaagtcggacatgttgattgattaggagtcggacaggttgtctgagtatggatgctatggtcttatggacagtaatcagacaaattacattaatctatgtttagatggtaattagagtgcaaattgaactatagtgatctacgtttcatatgtggctggaaaatatacgtgccatacatacatggccattgatagtaaagagggagaacactgcatgcatgtcatgccgtatgcacatgccaagatagcagagacattgggcggagatagcccacaatcgatctagaagcaaaacaagtatgctacgaagaaatcaacatagatatacattattttataggacgagactaccgatcgggcgccccatccaagcatgaaaaaatcggacgctaacgtcagcataacgtcagagccatgcatgcgtgcaaaaccactttaaactattttttctcttaaattatttatccaaatcatgatccgattacatcattaaattcgttgcaattaaatattcaaaacaagaccacacatggatatattccggcgaaatttttttagcttattattaaatcgggcgttatttcaccttatataaaaataatactttagcaaatagcggaagaatgtttcagttcactgcaacattagatctatacatagtaaaacattgtgagtacacttggtggaacattttttgtggaacataaaaacgaattcccttaatagagaattttcaaaatatgtgggtgatttgttgcaaaagaagtttcgtttactgcaacattagatctatacgtagtgaaacattgtgagtacactaggtgaaacatttttagtggaacaaaaaaataaaacgactttccttaatagagggtttttaaaatatgtaggtgatttattgtaaaataatattttaattcactgcaacattagatctgtgaaatattatgagtacattaagtgaaatattttttgagacacgtggtggggccaggggaacgtgcgcacggggagggggggagcgctcgatcctgctccacccccgtcggtcgccctggcctaagcatatttgtattttataagacatggcaaataaaatttaaggtacaatatcttcgccagtatgatctatgcatgtacaagaccatctaaaacatttgacgagataaattaagtagcaggcctacaaaggagtagagtggtggcagttaatacgacatataaaaactgttaataaaacaccaaatcgaatcctaatgacgattaaaaggagggacgacaggcaggccgtgaagcaaataggcaaagcggttgccgggacttatagaaagtaaaaaaataaaccccattgataaccatattcgttttttaaattttcaatgataataaaaagtagaagcagcggacagggtgtatatgagtatagttacagagctgccaacggttggtgggacttctagaaaataaaaagtaaattctaacgatagttttgttcgatttttagaatcccaatgacaataaatagtaggtggcaaataggccttagaggagtatagtggcatcgtttgatgggacttctaaaaactataaaaaatgaaacccaataagacaataagctctaaaaactaccaatttttaaggttcgtaacttctaaaaagtaaaaaaaacaatgataatcatggtcgattttaaaatctcaatgacaataaagaagggaggcagcggacgagccatagaggagtacaatagcaaagcccctgacggtttggtaggacttctagaaagtaaaaaaatgaacccgaacggtaattatgttcaatttttaaaattccaatgacattaaagagaaaagacagtggacgggccgtagaagagcataatgacaacgtttgacgggacttctagaaattataaaaacgaaactataagatccaatttttaaaggtttcaaggagaatgaatagaaatagtggtagatcgagcaagcaaataaagaagtatatgacagaagtaagaggtagcagctggtctgacttttaagaactatatagttggaaatacggagatgataagatttggtcttttaaagtcttatgataacaagatagctatttaataaattttaatatatagttggaaatacggagatgataagatttggtcttttaaagtcttacgacaacaagatagctatttaataaattttaagcaaaattataccgaaaaatttataattgtgtttaggtgctaagcgcgcaattgcgtggtccacccagctagttatagaaatgctatactgtttatcccgcccgaccacacgcccacgggttgccattttcatcaatgtgcctcaaaggtgatggtttttaatgggaaccagcaccaataataaaagtgccgaatattttaacaaaccaacacctgtgcatgagataaaagtgttggttttataaaaaactgacacctcatcggagctgagccgagccgtgctgagcgcttggaccgccaggttttttaagtccggcactcccttgtttccttcacactatcattcttctctcgtctctctcccgccggcatatctaaggctggcagtggtgcggctgcggcgtgcccgccccgtggccgctatgcccgcaacaagttagtggtgccgagcagcccacatgcaagcccgcaaacttctggcggccttgcccacctgttcactggttctactttgtccagattaaaagaacatgcatgatcagataatcagcttactatttgtgtgctagtgtttgtaagtagtagtaaaccacagtggcatcaattacaagaaatgtttgagaagaattcagactaagcactcaatcccaaacaacgatatttcctccaagattttgaagatggcaaatagaatgacagaagtcacagaaccgttgcattgctcactgaatttacaatattgatatgagtggaataataggacattatgaatatcctaatgaagatcaaactaacgattgtatcaataacacaagactgtgctctacttcaatgcctgatggtgttgaagcttgcaaatcttcagattctggatattgacaaatcatgattatatatgagtttttcatcaggaagcactacttcgtgaatatttgaaagaacaaaggatgcatgttgcttgcactagttcagtcgaaaatatggccagcaaaaaaaacaagatcccaggatattagcaagcaacctactaaccataaagaatcagaagaatctgcaggcaccaaagagagaaaacaacctgcaatttctacataattgagttctgcataggaagtttagaatggtataatcaaaacttggtaaaaaaatgtgggcaattcatggcaaagaatataattttcttacgctggcaaagaatataaaataaatcaacattcagacaatttggaggctgcattcagcacataacctcaatgttcagactttctccaggaacttctcaggaacccctgcatatactgacagaattgcataacatcgaattccatgaaaatataatccacttaacgcaaagaaagaaatacaccaccatctgtctgtcagtaaaggtgtgaatacatcaccatctgtctgtcagtaaaggtgtgctcccgtctaagcaaaatgtaagcacacagtcatatgcacatctccaaactgtcttctgtcataaaaaggaatttgacagccaagcgactgcattatataattgacatagcttaaaatctagggggctctaaaactcatgaacaaaacagataattattttagtgctgaaacttagttatccaaggctaatcttgtgtgttcaaagtgagcgccgaaagtagttacacagtcaaaaaaaaaaagaagaagcagttacatgtaaattatttttttaacttgttttcatgtgtgaaaaaaaagcagtgtgtaagtaacgagtttatacataataatgctgaacaggaatcgaacagcaaatagaacagtctattcatataactcaaaacaaagtcagaaagatataagattaatgtacaagattcaatgatgtttctcaaacaggcatatcacatatttacatcccaggtgaccatcaagcatgttatgtaaaggcaagccatcaaaactgcacattgttatgcacgaaagcaactaatcacaaacaagcaggagctaaataatcttctttttttagtgaagtgatgcgtacatccttacaaaattaaatatggtttgaatctgaaaattacatccttgctttctggattcatcctactcagattcactgcatctgcatctccctttcactgcatccacatcagggaaaaaaaattcaagaactcacatgcatagaggtcgacaggattgaagcagaagctggtctagcaccacccacagaaattgacaaaacaggtggagtgggtgcgatgagctacgatgagtgcgccgccatgagcccatgaccggcgatgaccacgaaggtcccttggaggacgcattggaagcggcggtgctggaggaagtctgcaagatcactaggaatggcggcggaggtggagatggcagcaaaggcggcggaggaggaggcggtggaggcgtcatcaaatccatggcggcagcggctagggttcaagccgcaacagcgacgaacttgttcgttcccctcctctttctgatgctccctcgatgtgggttgtggtggcgccgccggacgtggtgggcttgccgcatcagcccacttactcctaagtggttaggcctaagtgggtaagtggtgcgggcctgcccagcagctgcatcagcccacgcacgccactgccagccttaggcatatctccccagcgcagcagcgggtcagcagctcctcgagaccttgacatggcggcggcggccaacggcacagcggggccgtgtctcaccggcgcagcagcggtcactggcacgatgggggactgggggctgtgcctccccagcgtgacggcggagacggccgtgtcttcctcctccgtcctactcgcccctccctctcctctcatgtcctatgaaaatgcgtggaattcatattttttttaaaaaaaagttatatcccaataggtcctaccaatatcatactatttataggattttttattatttatctattgaaatttaaattaggatgaaacttatcgaatttctagacagcaacaacatttgagcaacgtccgaacattggtttttttttttttggaatctaaccgtatttcatgaaccctagtcctgtcccgtgaggcggacaagaaggcgtgggggcctgatctggcccctgagcttgggacctccatagcggcgaggaggaggtctggtgaggagtagcggcggcctcctgctcgcccctccctctcctcttaaattagagaaaaatcttaaaaatttcgggaaaaaaattcctaccattggttttgacttaaattggacacgttattttcaatctattttttcttaaaaagaacacccaagtcctccttccctccctccttctcctcccctttgtggtatatgatgcatctgacacattattttaggtcgttagattagttatttagaaaaaaaacatcccaaacctccctccctccctgccccgtgtgcaacgtgtgtcattcttttctctctatgttttatctccttgataattaaaattaaaattatctatatgggaaaataacagaaacatacctccatctattacttatatcacattaggcatttaacgactttctaccaacctaattaatttctcttaacatgcatattggcgctatgtacctatacaaattgttcttgatacttttaaaatgatctttttaggagataaataaatgttcttgagaaagatgatcatagcatccaaattacacatatgatccatgaagtcactaataaattagagaaaaaatgtaagtgatatatcattttcttaataataacatgtactcatgtagcattatagacaacatattgaaaataaaggtgtggtctgttaaacatcataccgataagcatatgggttgcacctagaaatcttaacaatgaaacaaccttagtaatatatcaagtcgattccatataggaattaaagaccatatcctttctttttaaaacttgctaacgtacattgtaaattctttgatgtggaacaatctagaaatgtatatttgttataagacaatccagtttagtgataattagctaaaaacacaatgaccattacttcaatatttcatgagagaaaagttagaacgtattgcaaatatcaaagcatttcatggatgattcatagaatagaaatcttcaaaaagaattaaaaaatggacttgaaataaattgaaaattgaacaaatgttgatgtatttaaaacccattcaaaatagaaaaaatcaaacaatttacaaggacttttagaatgaatatatatatatatatatatatatatatatataaataatagaatagaataaaattttaatattattggatttgttttggggttgtaaaatatccttatggggagtcaaaatactctaaattttttcagaggaatttcatttcgatacaatattttgttttagaatttatatattgcaaaggtaattatcagaaaataaactagctttcaaaggacacaaaataagtttaattttagtttagaatatagtaaaaaaatattttaatgaaaattcacctgtacataaatatttataataaaaattcacacacattatataaggtgtgcatattatctttgtgctttatacatcggctctggcttacaacattgatggagtctttgtgctttatacatcggctctgtcttacaacattggtggatcacttgttttgaattggcactgtggccgagatcaagaacttatcttgccttaagagcagtacaatagcagactataagacagctataaacatatttcgagaatataaaacaggagagagaagagtagcgggctacaaatttatagccagctgcggcacagacttcaagatgcaaatgtaaatgacaggtgggaccaactatgacttgtgtagtatatatttataggtaactattatataaatcagcattaaattgactatagataatttggagcccgtaattggctatactattaaacttgctctaaccctccaccagttcactgatcccttggaaagtcactgaacgtcgtaccttctttcatcttctcaagaagacacaaggtaatgatcaatgacgtttttagtgacgtagtgtgcacaaaggtcaatgagatgagaccacaaagaaattatcaaccagtgcataagagcagttaaagattttcaagacgtactcagtccacatctccatgttgaccgtggaagattatcagaaaagctctcatgcgagcacacatttccttttcgtttaacccggacatcatcttaggaaaatacaatttaatttatctgcgacgttttaggcaatggccagtctagacaaaaacgaacattgccataataaaactcataattaaagtactcttaggatcctaccagaccagacctcaggtatgatctccaaatatgactttcattatgttgggcgtggtttctattgtttttcttttcatatatccctgatttgggaaagattgttgtgcatgcacttgtcagatatgttttcattcagtaacatacagtaatcaacatttatagaaaaaattagtatcatctacaacaccaaaatgtcttgttaatctaacattgaatatatttgttttgtgttaaaaatgtaactatgttttctataaatttgattgaactttaactgataaaaaaatcaaagcatcttacataagtaaagaaacggagggggtagtttgtcaaccccatgacaactgctacttagaccaaacgggcaactagcaagatactccgactgccctgaacatagctcctaactcactctatatgtacagtgacatttgctcgatacatgaaacttgaaatatttactctattattatttcgttacatcatgcatgtgctactaacaaacagactgactatgaaataaacaatgtgtacatacaaaatccagatccttggggaaaatcagaaaggagttgatctctgagagagccagtcatggatggcaaaacgaagggcgtggttgggggtgattggagggccattgtccatcaactcggaaatggcgcgcccttcgtacgtcaacccgtccgcccccacctggggatcatgcatcacttcctgcacaaattagaatgaaaaaaaaaacacattactaccgcattattattagtagatattttgggttacttatgggcttctgccctatcgatgttcttaggtttcgttcttgccttgaggatcgggcacaggaagaaggagggcacttgtctattatccctcatcaggtggagctgttccagatctcgcacagtttctggagtcagcagctctggacttgctgcctcactgcacttgagccccaactctgctaaccttcgagccacctccagaggccactctccagctgttggatctaacaatgaccatagctttccactggacattgcacgccttacttcgctgggaaggcctgcagcctgcttcccagttagtaactggagtatcacaatcccaaaggagtatatgtcagatttgggtgtcaatggtttgcttctccggtattccgggtctgcgtccttggcatcttccatgaataattgagaaataccacaatcagctatcttgcagtgcaggttggcatctaaaaggatgttttcaagcttcaagtcaccgtggacaatcatctgaggtttacaggaatgcaagaagaatagagcacttgagatttcagcaacaatacgtgcacggattttccatggcaactgaggaatgccgcacttgctccaaaggcggtcgtgaaggctcccgtttggcacgtattcatagacaagacacaatgcatccgggcatgccccaatcaaagtcaccaggtgagggtgcctcaccttgctaatgaggtggacctgccaaaaacaatgtgaaataactaccttctgctaaataactgctattgctatatgctcctaggtttttataaacacttagcacgataagttatgtgataaacaagacaagcaagcatatacttggaatgattggcccacatcatctcctgcttggtcatagtgcaaagagataatttttggtttttattatgacaaatgacacaacaagtaatctatctagataaatagaagaaaaaaaacaaatcctacataattcaacaagccccatagagtttcaagtgatatgtggagctgcaaaataacttttagcagtttcattgagctatgtatcactaatatatcaaccagcatgataaacagggtaacagagagtacctcttgctggaactgcatcgaactctgaatgatacacgagtgcaacttataaatcattacacttctgttcataatctctcctttataaacacatccaagacctcgtggcagtacttttaagctgtctgagaacttgcatgttgcagctttaatatctgacaaagtcaattctctaaagttgtacaagtcatcagcacaaacagttgaactgcaatttggtaacataatgtggttatatgcacacctttcaacctggtcagtatgtacaagttctagcttctctcttttgggaatttcctgattgagtgttcctatggaagattgaatcaatttcagctctgccacagcttcattcatccgaaaagctatgcttttagcacgtgcatctaggatggctagttttctcatcgaagagtccaacccttctgtagccttttctttattttctgcaagatcttcatgctgcttttttgtggctgtcaacaaagcttcaagttcctcccgcattttcatttcttgtttttgagcgaactcagaagcttttgcctgctcaagaagcacaagccagatcaacaaaggaatgcatatgtaattttcaccacattattcaaaatcaatgttaaagaatctaaaacttccgtttggtttcccaataatgttatactgcagaggaaccgtgcagtttaaaatacaagataggataagtggtttgcataccctggcaataacaccggctactcttgactctgtatctttgcgcttgagaagctcaacaaaagcatccttccttgatctctctgcttctagaatgacctgcttgaaatttttatccaagatttcctgacagataataccatcagtatttaaattgaaaaaaaggatcatcctttaattacaaaattatcaatgaacatgtcaatgtagcaggagagcacctgaggatataacactaatgattccatgtctacagaagaaccaggctggaatgttgagttaaatgcagactgtgcattttgcaaatttggtacaataatattgcagaaatggttggcatcaacaagagattcataatcattcggttgaccattatctgaaatggtgatttcataacgatcagcaggtgtttgtgcctcgtatgaaatgtatccttcatcaagtatggattcagcattgttactagtagagctgaacctgattcttttcctgatcataacatcatcttcattgtaaactgagatattgttgccaatggctgcagctgcttctctggtccaaatgtgtcttcctctccaaacaaaccagatttcacaaaatgatggggcattccttgccataaaagatgctttgccatagctcgctttcaacttgaagcaactgcattacaggtagagagagttcaaattttcagggacacccaccccgaaataaaacaaaagaaagggaatatagtggtcactatgggatgtcaatatcctagtacatatcataggatcccacaaacactacggaaccatctgcatacatatcattacagttagatgatctatttcttgggatcattataaccatacattccgaacaaaattgtaagattacgttagatgatactcatatcaacaagttgatgtgacatgtaattgacaatgggtttaattgtattcaagtttgctcactttttactgaaattatgtggattcatgaggcatggttaaacaaataatgatggatctaggtgagtgagcacgggaatacttgacataaggtggttgaggacagggttttcaattttgatttcatccgaaatttcgctcattttggttctaccgaaattcctgaaaatcaggatttttggcactttttggaccgatttttttttaaattttagcataatttaactgaatttgattaaattttgaccaaattcacagaaatttgagaaaaacaaaaaaaaaacggccgatataatcacttgccgcgtgggggggggtccggaattaccaaaatttcgatccgaaattgcaatcctaggtgaggagcatgtggtgcattgtccagttgatgttggttgcaagattttggtgctacatcaagttggggcagacaatgttaacatcaagttgggagatcaaagtttcaaaaccatcgaggtgctgttggaagatgccagtgctggaaattgttactaagaatggttacgagcaatgaagggtgtagaatacacacaaaaaatatctagtctatcgagcacctgagatcaagtttttttgtttcttgttttccttcatgctccataagttgataaagagagtattagattaatttgagttattagtattatttccaatttctgttatgttcttgggctgaacttttctagcttgaagtagatacttggggactagactacctagttttccaatactgatagctgctttgttcagtattgaaattttgatgaagaatacacatgacaaccacaagaacagcaagttagaacgggtattagtaacaacgtaattggacccagaggcggattcacctcccgggcagcaggggcggatgcccaggcttcacagcgatgaacccatattatctagcgctaatccttggctgaaacagattaattcctgggaaagatttgcatgttattaattaaatacggcaagccatgctgcaggaggcgattgggccttgggcctcagctgcctatggcctgcctgcccccacaagtactagactcactgtcgttatcaaatcacacggacatttacttgtattgaacatgtccatgtagacacaatataggtgtattagtgggtacgtttctctgaatatgaatagtatttgttattttcttccatgttccattgatattgataaaagcttttacctagtaaatttatatttcagcgtattagtgaatcatcgaattaagcttggacgttctcgtcgtagtatcctttcatccataaacatatttacaagtattttgggtcacatttctataaaaaaaaatggtagaaaattttaatggtgatatatggaaaatgaacatgttttgagtgtaatagtttcagttagacccgccttggcttcacaaaactcttggcgccgccactgattggaccatcagctaggggccaaagatgaaacttcaaatcatggtagtaggacctgctgttagccatatgcccgtgaccattaataaagaatgcataacatgacagcatgtggggactgaaaacggctggtttgaagcaggtttgtaagaacaggatacacgaattttagcagcgatatatttgaactaacagtagaattccttgtgtagaacagagagtttgaattgttttatagagatggcactatcaagaagggtgttttgttagcacgcaattgatgaaaattgaagtagtacatacgtatcaggtgtagaacccatgacaagctttgtaatcccatgatctttgaccaaagtgataataccatcatggatttgttcattctccgtgacaagaagacttgcctgaacctgtggcagagcaaaagcccgattaattagcgtcgcacacccataaaaattgaatctgtgatgtttctcctagataaaaaaaaggttggagaagaaggtgagtagcacttacctgtgccctgtgacagaaagtgaggtaggtgaggaggatcttgttcatttcgtccttctcggatttgcgatgcgacagcacgagctcttcggtggcttgagcggcaggaatcttgcctactgaagaagaagaagaagaagaagaagaagaagaagaagaagatgtgatgggtgagccgtgagcggcggagaaggaagaatcgagaaattaactcataaataaataaatactccaagaaagaaagaaagaaagaaggaattgaaacactagaatcgtacagagggtagggatgagcggagaaggttggtggacgtgcacgaggacgacttgggcgcaggcgaagcggcggaaggcccatcgcagcaggcccaacgtcttctccggcgacctcccgacggcgacatggacccgcgcgtcgacgttgtcgcggcgggggaaatgccagccggcacctctgtggatgaaggaatccatggcggagccggaggcggaggcggaggcggaggcggggccggggctgggcggcggcgacgggctaagtatctccatggatggatggatcgattggctgggcaatttgggtcaattttctcggtggggattgcaattgctaatgggagctttcctcctcaattaattgcagcatgtcaaagacttgcgcgccggcaaggcacgcaaatggcataaacacatggatattccacagcatccacagtgcttgccgttgactagttcatggtcaactcctgctctttcctctccactctgacacgactctcagattcagatgagtcatttcttcctctattttccctttttaatcccgatcgatcttttttttctttatgcgacgctatgcaaagttgcaaacccaaccccaacccaaccaatctactggtggagtaaagttctccctaaatttaacatctacacacgaaatagaaaactatgatcgattttaaaaaagatctgaattgccaacacgagaccgatctgaccgtcgccatagggctggtctaatcagcagcatgtggctggtcaaaccgactgactccaactctaaatctaattttaaccagtctcaggttttcttatttgggttaagtttttcgaattctaattgatttctatccgagtaatccatgaaagggttttatagaagacaagatcaacctctttataagattcatgactggttcaattgaggcaacaatagacttcaacacaattaaccaattgaatcgctcttttgatttcgcatctactttttgtctagtttttagctagtttgttcatcttcatcagtttgtgctataagccgtgcgtactcgttgcgagaacgcgaatgttcatcaaactagctcagtgccacttgtattttgtaaaatttagactggccattatatacggctaggatgttcttggactagtatctttttgcatactatatagcttaaagaggcatagttctgccaaaagtaaaccttatcttcctcttcccccgccccctacccaaatgcccctagcccttatcttcatctgtccatctacttgcaacacaatcactttcatcagaggcaatcttgcaagtgaagaaggaaaaggaaactttgctaatctttggcacgatggagtagagcctggagaggcatagctccgccaccaggttcttggacaacatctcctccaccctcttctgcttccatggcgtcatcattgtccaacgctgaacctaaaacctaaacccactgtcgctgccctccaccagcctagttccactttgcacactccaagcccgtcctccacttccgacgagaaaaggtcccccatgacaacctgttcagatgcacacaacccaatgttggtatcttcaaggcggtgagacccctccccctctagccacctagtcctccacgatgccatgtttcctcaggcatatggaaaaggagagaccacgagagaggtaacgagagaaagaaagaggtaggggatgatgtgtggggcccaaatgtcagtgaggtgggagagaagagatgtagaatgggtattttgggcaatttgaaatacaatagcttgcatttggatacaatggtgtccagggtgtagaaaatgatatatgtatgtaagagagaattgtaatggtatgatccaaataagtgaatagtaatgttccaaataggtgaatagtaatggtagatctttaaattgtggaattcgtagtggcaccgattaaattaaccatagataatacttgggagaagtttagtggcaaggaataatctccttagagaagatgccaaattagaatccttccttagagaagcatgtaaaattggaatccggatccagaggttacccatcaactcatcaccgatcatacagaacttgatcgaattaatgtttgatggcgacaattcaatctccttggtggtggaaagagaaaagtacatatacttaaaattattcacttctcaactatcaggtttgtctaaaatttacccctcaactataaattcgggataggaaacactcctcaactattataattatccactttatcctccctaatatccaagctgggagagttttcacttatgtgcacctacatgacaatctagtcggtgaaaagattaataaaatagtggccctgtatgtcgtcatcctcccgctctcccttgccctactctctctcattacttaccctctgttgtcactgcgagctcaacctcctaggggatatatacctctgcagcctcgaccaagatctccacctctatgagatcttcgcgtccgctagtgtcctcctctaccacaatctccaagattcattgtggtggtggctccagtcaagcttaggagaaaat

SEQ ID NO: 5064 - DNA, 33111 bp, Oryza sativa
cccttctgccgaggtggcatggtgacggcgctaggttagctggcgccaccatcactactagaaaaacaatttttcctggcgttaccctttaattttcgctggcagccatatgcaaaaaccgccagcacaaatataatgaggggagggggttacggaccgccagcgaaaactgattttcgctggcggccaagctaggtaaaggggaccattgcgaaaaaagttttgaggcgaatatataaacccaccacactagccacctaccgcccccacctcagtctctcctcctctccttctctctctccttcctccaccgccgcgggctgccatcgccaccaccgccgagggctgccatcgccaccaccgccgcgtcgatgggggaggccggatctgccgctgcgatgacaggggtggctggatccgccgccgcgacgacgtgggtagccagatccgtagccacgatgacgggggaggctggagccgccgctaccacgacggggggtggccggatccgccgccacgacgacgggggagcccgatagggtagggaggccgctgcgacgacgacataatcactactgggccgcgggcagccgatccggccacgggagagccgtgacgggctcctccccgctgttgcgacgagctcctccccactccatgtggcggcgacgtcgagctccatgcggcggggtccggcggctgcggtggagtgcagcaatgacctcagcggcggcggcagctagtggcgataggtgcggtggccgttgtggagtgcagcgacaacgacaatttttttttactttttgtgatttgtgaatgaatgtgagtttaatttgtgatttgtgaatggtttggaatgtttgtgaatgaatttgttcaattgattatgagatttgtgatgaatttgtgattttgtgaatggattagggcgtccaaggattttggatttggggtgggggatttttgggtaggggatttgagatttggggtgggggattttggatttgctggtgtgattttcactggcggttctctttaggtagccgccagtgaaaatatattttcactggcggctaattcccgcttgcgaaaatacgctattttcactgggttttcttactggcgactgcactggccgacagcaaaaatataaaatagccaccagcgaaaagctttttcattgtagtgcatgttggagggtggcgctatcccctccggcgcaaccaaaaaagagcattgttaggttaagttttttgggatctatttgtaaaataagattttgaaaagtacacaaatgtaaaaattcagcatcgaattcagatgcatcgatccgtctccacacctaacagagttaataagctagcaattaattaaggtgagtagcaaaagtatagctagctagctatctgccaaaggaacgtgacgaatgagatgaagtagccgacacagaaataacaagcggctacgagatgactttattagctagacttttgtcatgttgtaggtactcaccgatatgtgtttcttccttgttgaattgtctatgtctagctcgtgggagaatttgaatgtgctcgtgttttacttttacaatcttcattccaaaataaaatatgaaatattttaattaagtataagtacaggtattaagaaaagagataagattaaataagagaggattttcattgctcgagaaaacaaaatagatgaaaaatttaaatagcgatgaaactgttatatatattatgagataaatttttaatattaaatgttgttatattttggaaagagttgagaagcatgctgggcatgtgtcccgatcgagaggagatatagttgtacagtagctaatagcttacagtaggtaggtagattcgtgtacgtgtggtgcagctagctagggtgaagttagatgacggcaatgcgtcgcagcctctcatatgatatcgatcagctggagagctggcctggtactcttgcgcagtagggaaaggaaacggacggagtagctcacgcaatcgctgaccgcatatatgcaccccgggtcactagctacctttacctttttcgatctcttctcttcatctccagtgtaaagcttttttgactgcttttttttttgtgtgtggggggagtgcttgtaaacaagtccatcgatctcgttaataaaattcgtgaagaaatcaattaatttaattattgtcccacagggccgggcggcatgcacagtaaataaattaaattaagaaatggacaagagcatggtagccagacaaagacggacggacggacggacggaggacctttatttaagaaagaaaagggggcccctgctgccctggctcatgcatttgctagctagctcatcgtcgataccaatggcgactaccagggccacatcgacgctgctgctgctgctgctgctggtttcggcaacatgggcggcatcggcgccgacgacgagtcgggcgaggaacgtgataacacacgtgaaggggttccaagggaggctgccgttccacctggagacggggtatgtggaggtggacaacaccaataccgttgagctcttctactacttcatccagtcggagcgcagccccgccgatgaccccctcatcctctggatcaccggcggccccggctgctccgccctctccggcctcctcttcgagattggtacccagctctatcttaattatttcttcattcattttcgatcgcccaataaattaaccactgatataggagttttcatcaatctactctagctagctagcttgtcacacgtacgattaactatgcaaagcatcattgattaaagcaccccgcccggtatatgcatggtggtgaagcgccgtacatataattaattaattccacccttgcactaggattcaatcccaatatatactatcaacgaatatttcatacatatcaactagctaggatattcattttagtgagactaagtattggccgttagtcttcgtttctctctctaaatacgtacgtattaatcaggagactgttaatttctcaggtgtgtgtacctatggtggcatgcatgtcttcagtgtaataaaagaactactaatatatatatatccaactatatatatctaacaagcttatctgcgaacagcaaaaggttaattaagtatatatgtaagacttggcctttatataattatatatacatatatatctgccggccagtactgccaccatgcaacatagtagtttacaaaagttcaaattaacttgcaatataatattgctggtctacggaaatgacaaagcaattgagttagaataatactacataatataattaatcgatcttctcaatacaacttggggctcgcggcgttatcaacaacggcttttctttcgttggaaatatctcccctgtccacatcatacaagcatggcacattgtatatagatggttgccgaagaaaaactgacgatgagtcaagtctttatttggcctcaaatttgttgaatgctccttccactattaattaaagttgaaacctgccaagttaatagactccttccactgtatatatctatccgttctgagaggtctttcacaatattgtggatattttgccgtgtaggtattcccttgctgtattgccagtgacctatcttcttagaaaaattctactccctccttttcacactataattcactttgtttttatcctaagtcaaccctctttaagttaaccaagtttaataaaaagatatggcaacatctataataccaaataagtttcattaaatccaacatttaatactttatagtataattatttggtattggtaatattatcctattttcctatacacttagtcaaacttgaagagatttgacatggaacaaactaaagtaacttataatatgaaacagaggaagtacaccttaggctgcactcgaacgagtagtttcggaactcatctcttatgcacggaaaacaaggtaatttattagtgcatgattaattaaatattagctaaaagaacttgaaaagtgaattaatatgtttttaaagaaattttcctatagtatttttttaaaaaaacatcgtttaaccgtttggaaaatgcacttacgaaaaacgagggaacattgaacacaaccttagtattcacactcctatatacttctataaaagttggagcattcccaattaggctgtgttcaggaggtgaggttggaaactcacctcccgcgcacgcaaaacggagcaatgtattttcttatgattaattatttttttgaaaaatggattggtatggtttttaaagcaacttttgtatagaaacattttgcaaaaaaaacatatcgtttagcagtttgaaaagcgtgcgcggaacacgatagagatgagttaggaaaggtgggggaagaacacagccttaatatattccccctacccaccctggccccaataaaataattaattcctatatatgagtctctgtgtcctaaacagaatcgatttctggctatgaacattttttaggtgaaggaaatataccagaagttagagtagcttgtcaatgacattcaagaagggatttggttttcctgaatggttttatttaaattaatacagaacgaatatgcccaagattgggaacatcctgaaattaaggccgtgtttagtttccctccaccaacttcaaacttccaacttcccatcacatcaaaaacttttctacacacataaacttttaatttttttcaaattaccaactttcttcaaacttcccactctttccaccaactaaacacagcctaaattgaattgactaagcctcatttaactttccaattgctcaaaataaagtagagcagaagccattagctagctgggctagctgctaatacatcacaactatttgtctacgttcatttcagcttatggactatacatatataattacaagcggtaaagcgatatagcattttacaatataaaattcgagggttggtttaaaacgggtggaataaaattttattcacttttgactttaaaatatttaagggcttaggtaaggttatgaaagaacctatgtgccttagacctattaccacccatatgtactatgcatggttcttaagtactaatataattgctcgaaaagcattacatatataacaataattgattacatgggcttgtcttagctgagctatttttagttttatattatactatgtctagatttaaatgttgctatattttagaacgaaggtatatagtatgatattaatttcatactatgaacttggccactctcgaaacatgaacaacacctatccattgagtggcctgctatactgacttagaccgatcagccggtcttggtgataggtggataaaaagagagagaaaagaggtgattgtatgataatttaatttgaagacaccattcattgaatatatagtttctacacatagtgtctatatgacatggcaagtatggaaactacttgataatttctgggttgggaatggccttaatgcatgacgcactagtgtgataacactagtaagtactctgtctaagactaaatccaacaattaataaatcctttggaaaatgcagatctagggaagataaaatgaaattaatgcttttgcaaggtcactcagagctcgtacgtgatcgctcggccccagctaggatagcacaagcggcaaccagcactatcgccatccctagccgtcgtcccctccgcctcgccaccgccgcctgagctatcgtgggcaaagccgggggagggggcacaaggacaacggcagcaagctctcttattcttctcacggttgcgatagtccgaggcactgccaagatcgaagggaaggctgtcagtggcggtatcagcggccaaaccggcatcgttgggtctcggctctagtcctcttctgatctgccgccccagcagtcggtgatggggaggatgcacgacgaaccagcaaggaggagaggagaaactagattgcgcaagggtggaggcacgacttacaagggcgaggcctaggtggtagcgcctgcaggtggccagtgcggcaagcacacaacgaggaggctgacaaagcgtgaggaggtggccagcgactcgtgaggaggaggctggcagcacgcagacccacgacacgtgtggccatggccgggaagatagcagagcaaggcggttgttggtgctatgaggaggtggcagggggcgtgcgaggagatcggcgatgcgtgatgggagcatgaggtgaaggccggtggtgcacaaggccatggccgaggaggaggccgacaccatgacgaggtggttggcagaactggtagcgttgaatgtggctggccagcaaaggattgctagcgtggcggagaccggttgagtggtggagtgctaggttgctggtgacaaatttggagagggatctacatgcaaaagccatgcttggagttctctgggccaacaaccacgtctagggttgttcccccctttagggcattttcgagctaacgcctcctcccctggtaagattattcgggtgaaaatgaagcccttttgacagatgatagtggtattttcagcatcatgacctcgttggaggcatcatcctcaagatctcgtcttcctattgacgcggacttctctcagtttggttttcaatgttttctcagttgtcatcgccgggtaggtgtgaggaacaagcggatcttcttttgtctcgccctttccctctccaacccttctccatgaggatgactgggagcccgctgatgatgttttgttttggagaaggtgttcggtggcgcatttccagcccatgtagactagcagcaatcggtcctgcatatcggcgctggcttcgtcctagttcttttttccaggagtgtatttggaattgttagcacggggtggtggtgtgtttttgtttaactttttccttattatagcctgtatattttttctgctatatccaatgaaattggcacaatcatgtgccggttcgtttgaagaaaaaaagaattgcttttacaagtgaattagtgaaaaggatttcaattagctagccagacaaaaaggccagtgcgtatatatgcctaccacagatggttgctgaaattagctcgtgatcctgtcggttatataattaataggagtataattttttttgttaggaaaatgattttcaaaggtaatgagtacacgtgcatatatacaggccctctcaagtttgacgtagctgggtacacggaagggttccctcaattgttctacttccaagattcctggaccaaggtactagctaatgaatcaagtatgtggaatatattttgcctaaaaaaataaattgcatgaataatgaagagtgatatatgtttgatgttaggtgagcaacgtgatatttctggacgcgccggtggggacggggttctcctacgcccgtgaggaacaagggtacaacgtcaccctcacacagacgggacagcagctggtggtgttcctcaccaaatggctgggcgatcacccagagttcgcctcgaaccctctctacatcggcggcgactcctactccggctacaccgtcccagtgacggcgctccagatcgccaacgacgacgacgcccgggcgcggctgaacctcaagggctacctggtgggcaacgctgccacggacgtcaagtacgacagtgggggcaaggtgcccttcatgcacggcatggggctcatctccgacgagatgtacgaggccgcgcggagcagctgccgtggcgactacgtgtccaccccgaccaacgccgactgcgccaacgcgctgcaggccatcagcatggcaaccttcgccatcaacccggtgcacatcctggagcccatatgcggattcgcgctgcgcgggcgcgcgatgcctgagacgacgatggaccagcgcctgcgcctgggcctccccgtggagtgcagggacaacggctaccggctgtcgtacctgtgggcggacgacccggaggtgcgcgccacgctgggcatccacgagggctccatcgcctcctggagccgctgcacggcgctgccgctcttccggcacgacgtggacagcgccatcccctaccacgcggagctcacgcagcgcggctacagggcgctggtgtacaacggcgaccacgacctggacatgacgttcgttggcacgcagcagtggatccggacgctgggctacaacgtggtgaccgcctggaggccgtggtactccaaccgccaggttgccggcttcaccaccgtctacgaccacaacctcaccttcgccaccgtcaagggcggtggccacaccgccccggagtaccgccccaaggagtgcctcgacatgctcgacagatggacctctccggccggcgagctctgaattactttactatactaattcatcaccgtccgtatatatgtccgtttatgggaaatcttacccccttcataatttatctacttatcttttatcatgtcttatctttctcttttcttagcctatactacacacacttacttacaaaattcggagcatttgtgtggtctgtcgttcttttcccactcggtttccatttcgagagtgacgaggccctcctttttttcctgcacggcaaatttcttggatttgtccctcacgcacgtgtagctcttcacgcgtctgattccattctatttccatacggaaccaaactcattgtgatggacgcgcgtcttcttaatccctagaacatgcacccactttccatgtttcattttctccccaatttactgttaaaaacttgaatgggccttatagggacgattcggtccagaccaggttgcaagctcaagcctcatttttttctcaaacaaaccaagaaaggatataaaaagaggaggagctcgttccaagcaaatcgaacataatctttaggctgtaacagcagtggcgagctggtggtcacttggtaccttgtcaatcttattcctacctacctactctttccgtcctgaaaagagatgatttctagcgagaagagtttgtcccgtaaaaaggcgacttctacacaaaaacaagaagcattcaaccgctgctgattacgaagtgactgctcaatcggctcattaattagcatcgatgggtgagaaaaaaataaagacaactacgttcacacttgttcacacttgctggatgctagtactactccagagcactagtactactttgcagagaatcttggtttgattttacataactgtcaattaatggcagtactttacgagggtatttgggtctttagctacttgtgctaattttgccttggccttccaggagtcgcttctttctgagacggagggagtacttgttgatatgcgggcgtagtataagatctattatgtagtagatgagttcttagatgatcagaacatgagatggaccgataggcacatgggttgatgagatcaatcggtatatgtgctggtgacttcactggaatgtctggtactcaccatggccgagcgcgattgtgttcatcggatagtccgatgtccattggaaccgcacgccaatgagaaaagacaagccaatgagattgcctcggtttcggcataatttgattacgctgttaaggttttcacatggcgaatcgtagataagatctatgtaccccgtgacctttttagggcgctgccctaaaaaccgcggggggcggctccccctcgacccttagatgagatctattctggttgatcgccataaccacgggcacgactattcgaatagttttactctgatcataaataatcgtgcccgcgattatgggcgatcaaacagattcaccatgattagactcgtctataataatttgacttaatggaactggtttaatttaggtggttggttgggccttatcgcaacgtggtgtagcgttggacagtgatgattaatattgcttaattaactacaaaagttttacttaactacaaaagttttactgctttcaacttatgcttttaaatgctagctttatgcaaatgaacccctctagctctccttggttatatcctgcatcatactctcttccggtatgacttgctgagtacagtgggtagtagtcagtcttgctctgtctcccatcccatagttggagtatgcgtcagatggtggctactcggaggagcaggctttgtccgttccatcaaggatgcgtgtggaatggtgttgccccgctgttagcatcaagatctagaataagctcgcttttattttccgttgcatttatgtaagacttttatatgtgtgtaagacgtggatctgtatatcaactttgtcgtttgtgtaccctggctggtcctggacaggggtttaatgcacatcttactcggaattatattcgggaatttctggacgtagcatatgtgtaagtaggcttgcccgtcggatgggctggctatgcggttctgtagggaggactgttacaaatggtatcagagctgaccctcgtggttgcacatacgggtcaatgtgtgggcatatgaagcatggcacctgtgggctctgtgtgaggcacatggcatggcgtatggcgccggcactagacatacagacatgcgctaaagagggggtgtgttcctggacatttgcctatatacctgtgtagctacatgggtaagttgggccatggggacgtcgggtcctttgagggagggtgtatgtgacatcctggcccaattaggatttggcctgtgtggcccatgaatttagcaaggttgaaaccaatttataaggcatcttccctccaaccatgtcactctcaggttaacccttttacaggaagcgagaacgcaagtgtaagtggagtggtatatctgtcggatgaactgactacgtggttctggaggaagggctgttacaattgggccttcaatatactgtgtatcttgtagggagggattttacaattggggtttcaatatactgggtatcctgcgatacttgagagatacagtgattctaattggatctctaatgtggatgggatcaaaatcactagtggatatgtcttcaaaaaagctagtgctgttgtttcatagtggtcttgcaaacaaactattttgacgaggtcaaccatggaagcagagctgacagcactagatactgctactgttgaggtagaatggctgcgtgatctattgatggatctgcctatggttgaaaaagtgatgtattaattgatctgtctgtggttgaaaaaccgtgccagctattcttatgaactgtgacaatcaaacggtaattgtgaaagtgaacagttataaggataacatgaaatcatctaaacatgtgaaaagacaattgtagtctgtcaggaatttgagaaactccggggttataacattgaattacactgaaatagctagaaacctggcaaatccatctacgaagtaactatcacgaaatgtgatagacaatgcatcgaaggagatgagtttgaaacccatgtgagttatactatggcggtaacccaatctatatgatcggagatcccgtgaattagaacctgtgaagaacaagccattagtcaactggaggagagtaccaatctaaatcctctttaagtgaagatgcatgtactctcatgagctgcaaggcaggttggctatatgccttaatgagttctattagctttaattagcaaagatgctatcctgtagagcattcttaaaagaacacacctttgtgagcttgactattggttgtactcttgatattttaggtgaatcttctaggaagcttactaagagaccaatgagtatgacttatacactctacccgaggagcagtctactgacggtctagtaccagataagactctgtgtgaaacttgcttgcacaagacttgcaattcaaggcatagtccattgttcaagttgtgagtaagtgtagcttgaagttctaggtggatgttcaatcttaatcggtctccatcaacagttggtatataaacagtacattggaaaaaggcaaatctcagtaggattttgagatttggtggggaattattagaattaatagatgggtcttaacccattcgaagattaattctttggaaaatcacaaaagcccacctgggatggcatgcacggggactttagtaccacctttcatattctagaagaggaagacctccttataagggaggatactcgcctagccacttgaggcatgtgaggtggagagaacggggggaacacacacgcgctcgctcgcctggcctagcatggcggcacccgtgcacaacgtacgcgtcgaatggtccccaaaattggttcctcacccttgcacagatacgatctcctttcgcagttttgttttgctgcagaaatttcgaattcgttttttggaaacccttcgaataatccgatgcgtgaaacgacgtggagtccggataagttacacgagacttatccggttcggttacgcggagtgaagattgtgcaggtgccctgatcaagcgtcctaatatttctatataagttgagcggctgcctccacgcaatatacgtgaaatcaatctagggtttgcctcctcctctgtactgcgccgtcgctcatagtctactccatcctgctcgctgacgtgcaccggcaatcgggagagcaggtctccggaaccttcgccttcgatgtcttgcactgggagaaggcggcaataaggtttttggaaaatgctttgcgcgactgctccctgtttgtccacaatggctcatcttcctcttcgctggcgtgttgcgcgccatcgtcaatgcacggtaccctgagtccttcctgctgagcagccagttttccaaaaccctcggtatgcattcgacatattccgcatattcaatctgttcatactttactgtctagtttacatgtgtagatcgtatgatgtgattatgtcatttgcaatgtcatgatttatttatggaataaatgaaataattatgtgctaatattttcaacaatccaaaaaccttattataggcattgtggttttactatgactagtttttcccatgctctaaggccggataaattcatcggtgtgcacttcaagagatggaagatcagggttactctgtggttgatggctatgaaatgcttctagattaataatggcaaacctgaaggagttctcattgctgaaaagcagaaagaattcgagaagaccactactctctttgtgggatggattcgtagcgttcttatcgatcgtctagtcgaggtgtatatgcacatgactgacgctaaggagttgtgggatgcactgccaaattcggtgctactgatgctagcaatgatctgtacgtcatggagcagtttcatgactacaggatggttgacaaacgttttgtacttgagcaggctcatgaaatacatgccatggctaaggaactcgaactccttaagtgtgtcttactcgataaaattgtggccgggtgcattattgataaactacctccatcttagagaagttttggtactgcacttaaacacaagagacaggaatactccgttgagggatttatagcgtctcttgatgttgaggagaaagctcaggaaaaagacgtcgcgtctaagggcaatgatgggcagtctaatgccaatgttgtgcacaaggcccaaaacaagaacaaagagaaatataaacctcagcagaccatcaacttcaagcatcagaagaagaagaatataacaacaatctgaactagcatgagagaacttattttgtgctttttttacttcaaacattaacaacatgacctaaatactaacctacctatgccttaacctgctccaaccgagcacaagcccagctggtctaaccccatactcagagctatcgggttgcagcaaaagcagagccactagctttcactgattaccctaagtagttttgaacagtaacatggtcttcaaaacacaactttaacttcttgtttttataaaaatatttattaaaaagtaatatatgtatacttttataaaagtatttttcaagacaaatctatttatataacttttacattttcaaactcaacaacttgagagttattcatgatttatattcccaaggtttgaattaaacattgtcctaaacgacttcctttacgagtacggagcgagaactaaccaatatgcatatgacaaggaaaaatattatctgctcggtttcaaaaaaatatattatctgctatatgaaaaatataaatcaatatattatacgctatattgtttaaatgatttttttaaaaaagagttaaataaatatttttagacttcgatacggtcttcaacatgctactttgaccatttttcctgaaaagttataaaaaatgtctgcgtttagtttgttgctaaatttggtaaatatataaaaaaaatcctgtcaaaattttggtaatattactgacttactaaaattttggttttatccaaatttaatgaggtttattttgactgtctgaacagacctttaattataagagtgcgggctgcggcgtctactgtgctgggcaagcttaattaattagtggcatcgaacgatgctacgtcacgttcccactcccaccaagtcaaggatatatactctttttctcgtttcttttagaaacatgcaagggaggaaaagacaaataaatttctgagattcagaatttttattaattttgtaccttaaaaaattgataaaaagttaaatagcaaaacccaaaaaaataataatgccctcgtgatcgtacacatcccatccatctacccacggcctgtttagttggagggagtttttagaagggattgggagtttagagggatgagactattaagtgttttgtttggttgggagatatgggaactttggtgggatggggatgaggaattgaggaaggaactccctcctttttaatacctgggtaggggcaggtaattgggagggaattcctcctctattttatctaagcaaatctcagccatccgtttttattaatgatataatctctaactaaactccctatcaattttcatcacctctaccaaacaatgtattggaattaaaaatcgaattcctatcttaatctcatcatcaatttcctcgtataaacttccaatcccttttcatcaagttaccaaacaagccgccatatcaatctgatttgggtcaacgatgcaacaataattagcaagtggaagacaagtaattaaggaggcaggagcagcatggaaaaagaagaatagaagattactagatattgtactgctgagcgaagaggacagacaggtaagctagctaggcaatcaatcatattcgctctccaaaatgaagggatcgatcatctcacaaacaaaaacgtgagggatgaaggacaaggacaagaaataggtgaagctatctacttctcgatgcatctatgtacggaggcggcggtaacacggcggcggctgctgctgcttcttcttctcctggtcacctgcagctgcctgtctgcgagagagagaagcaatagcagcagcagcagcagcaggagagtggtgaggcatctcccggggttcgatggggcgctccccttcgagctggagaccgggtacgtggaggtggaccgcatcgccggcgtgcgcctcttctactacttcatccgctcggagagcagcccggccgacgatcccctcttgctctggctcaccggcgggccaggctgctcggccttctccggcctcgtctacgaggtcggacccctcaccttcgatgtccatggccatggacatggacaactgccaaggctcttgtacaagccggagtcgtggaccaaacgtaccaacgtcatcttcctcgactcccctgtcggaactggcttttcctacgctgacaccgacgccggattccgcaccggcgataccattgctgtccaccacattctcgtcttcctcaacaactggtttcaggaggtgcaccccgatttcctctccaatcctctatacatcgccggcgactcctactctgggatgattgtgccggctgtcaccttcggaatcgccacttcatcacccaaaccatctctcaatctcaaggtactagctacttttaaagatacaaataggagtacaacttactgaaactgataccctgccacatcgtcatcttcagggctaccttttgggcaatccagtcactgatcacaacttcgatgctccatccaaaattccatttgcccatgggatgggtctcatatctgaccaactgtatcaggtaattggcatccatatatcctacttcacgacggatttttaccagcatcttactatatactacgtacgtatataatcatgtatgatttctaggcatacaagaagagctgcagtgtcaagcacaacacccagcagcaaagcgttcagtgcacaaatactcttgatgccatagatgaggcatgtacttagtaggattacttactctgctttgttgttcagtttcagtgatgctgaccactaataatcaatggtctgtctcttgaattaattgtgcagtgtgtcaaggacatatacggaaatcacattctggagccttactgcacttttgcaagcccgcataatccgcgcatcgataagccattcacttcaggggtacggcagatactccaactccaagactttcacttgtctgagatttcttcagaatgcagagtcagtggaccctaattattttctttatcaaatcttcttcgagtactagctacccctcccgtcccaaaaaatctgaacagccttgtactaatatatcctatctaattaaaatatatcctccgtcccataatatacactcaaaatatcttataatatgggactgtgagagtatatgttagtgggtagtattggttagccgaccaaatcttaccatttggtatttcttcatgtcatgcagacggcagaatatacaatgtccagaatatgggccaacaatgatacagtaagagaggcccttggaattcaccaggtatatacacatctcttcatcatcattcaattgaacagtaatttgcatgcaggttcgatcattctgtcacacagcataacacaacacaatgcaatgatccactgtattcattctgcaatgcagggaacagttccttcgtggcaaagatgcaactacgacattctgtacacttatgacatcaaaagttcagtaagataccatctggatttgacaactagaggctacagaagcctaatttacagtggtgatcatgacatgattatccctttcatcggcacgcaagcctggattagatctctgaatttctctgtcgtggatgagtggagaccatggtttgtggatggacaagttgcagggtgaggacacacagtattcatcgataccatcaaattaattgagtacgtgtgcgagtactgtgtctgtctctgaccagatatattatccgtctgtcttatgtgcagatatataaggtcatactccaataacctcacattcgcaactgtcaaggtatgtgccagcgttttagcttccttcaagggatgcaacacattaatatcttggtacgcatgatctagggtctgtttagattgtagccaaaataaatattatcaagttttggcaatactaaaattctggtaagatggcaatattgtcaaaattttggcagaatttcttatgtattgaccaaatttggcaacaaactaaacgtagatattttttttataactttaaaaaaataatatggttgaaaatggcatcaaagtgaacaggccctcagtaactaaaaagagtattttggtgttaatttgtgtagggtggtggacatactgctccagaatacatgccaaagcaatgccttgctatgcttgcaaggtgggtttctggcaatcctctttgacgatggtgcatatatgtgtaagagaaaattccaggatggagatattacatcacaagaaatttatgattttgctaaaattgtggcgacatttttttccccatcacggttgaatgcttttctcttgggttgcggcggagactatactcgcgcgtgtattatatatgtctgtttcttcacgaagtgcatgaagatttgtcccatgtgtaagatctggagagtgagaacaaaacatggttcaatacagtgcaaatgatggatcgaagagcatactcctacacgtcaatgtaaatagacatgtaacattttattacgccgtcagtgtggcccccagttttgtacaccggaaatccaatgtgttttacgatatcattctctgaatcatcagtacttatttgtataaagctagatttcataattcattttacaaccctatgacttagcagttttaactgaaaacaatgttaagttgaaatcctcgattatcaacgagggttcatccaccttccctaagcttcacttcatccggtttacccttgcatccagttttccgtattcttcaccattccaaccttcccgcacattaggcagggtcacacaatccctcccaacactattcaaagcaagattaaaatttataaggctattcaagagtaatacaagtcccgacgcttaatcgcgagcatgactattcgaatatatttgtttactcacattgcaagggatgtacgcttttaatcccgcactccgtgacgcacacaacacatgagacttgtcacaaccctatttttcagtcacccttgcattgcgacacccactgcaaggactcctggtatttcgaggtactaggaggattacacaatatatatacttaggtgccttttagatttttgtcatggcatttgatcaatcgaacacatcttccatcacaaacagtaacaactgcagaactaccatgacaggtgctgccccactcaggttacctaatgcatcaggtctatacccactcaagcaatggaatcatactctgattgtttcctgcgtagcttcttgactcggtcctttacttactacaatcgatggcttgttgtttcatagaaccacacatattgtatccatgtcgtcccagtcgaaattattttgttttattaagtttttggtatttgcaaaagtcttatgttgcgggtgatgctcatgtctccacccgtctttcaacaatcactcacatcgactgaccaacacattcacatccatataccaaacatggagtgtaaaattgtctaaacaagcaatactaagttatgttaataattgaccatgtaataataaatagactaagacagcaaggaatatgaataataattttaaggtggctcagaatcaagtttaggtacgaactttataactactccctccgttgcatgttataagactttctagcattgcctatattcatatatatgctaatgaatctagacacacatatatgtctagattcattagcatatatatgatgtgggaaatcctagaaagtcttataatatgaaacagatgaagtagcatgcaactttatttgcaatcaatacatctattaacttattaaaggaatagaaaaaggagcctccacgttcgctctcacgatctagaaattctcatattaatcggagaaaaagaaaaatagagttcatatagaaatacaatttagaaataattgaaattcgaaggaatattggaagagaagactagagtccatatagaaatacaattaagaaataatggaaatttggaattaaaaataaggaatattagaagtagagtatagagtccatatagaaatacaattaagaaataatagaaattcggaattaaaaatgcggaatattaaaagtagagtatagagtccatgtagaaagccattaagaaataatagaaattcggaattaaagataaggaatattagaagtagagtatagagtccatatagaaatttaaaactaactcaaattccaaataaacataataaaattaacgtagagtttagagttcatataaaactacaatttgcaaataaccaaaattcgaaattaaaagaaaatatgggaagaagagtctaaagtcaatataggaatacaatttagaaataactgaaattcgaaattaaaaattaaagaatattgaaagatgagtttagagttcacatagaaatacaattagaaataataaaaattcagaattaaaaataaataatataggaagaagagcctagagtctatatagaaatacaattgacaaataacgaaaatttggaattcaaaaaagaaatattgaaagacgagtctagagtcgaatataatttacaaataactaaaatttaatattaaaaataattaataactaacacgtatataaaatacaatataaaaattacacattagtagtttcataaagttaatacaaaatttaaaattatgttgtcattttaatatatttgaataatacattgagaaaacatgtatgttattatatgagagaaaatataatgattttagctgcacaatctgcgcaggtcaacatactagtttataaaaatatgatcaacatgctaaatgaggggagcgtagagactttgaagtttgaacagctcttcgtcgattactgcggcttcgtctacgcaaacgtaaaacctgtttggcgaacaacgggtcaaaacccggttttcctattttaaagcaaaggggcaaaatcctagaaaaaggagtaaattttacaaaattacaaatactttgatcaaattatcgcaaaactacagatttaacaagatgtatcacaagactacagatttaacactaattttatcacaaaactacagatttaaggtaaaatatcacaaaactacagatttagtaataaagttatcacaaacatatatgtttaatgtcaatttaatcacaaaacttggatatttataactcaaacattacattagtgcaaaggatttaaatcctaaaatttatagttttgtgataattttattctaaattatgtagttttgtgataaatttgttgctaaatatgtagttctatgatatatgaccttaaatatgtagttttatgataatttagtcaaagtatatgtagttttatgaaatttactaataaaaaaaaggtaaatatatgtcatgatatctgcgctgagcctacgagagagatgccgacgaatttgatggtgcgtatcattttgaagcgtaatccactcatcatgtacatttgccttgctcagttgctgtcgtgagcccagcaggcaaatcagacaacgcaggatatgcagtgctctgctctgatctgatctgaactagtactagtataataaataagaaagataatttgtgtgtctctcgtggcaagaagtggagtactcctaggagagatcagtcgtcctggacgcagaagatggtgggcttgacgggctcggtgatctcgacggtgccctcgagcatcttggcgaccttgcccatggagggcctcatgtcggcgcggtcctgaaggcaccacatggccgtcttgaccatgcgctcgacggtggcgaggctggcggggtcgtcgtcgtaggcctcggcctggacgatgcgagggtcgatgatgtcgtcgatgcggcgctcgacgtagaccttctcgaaggcccacttggggaagtaccagtcctcgctgccgacggagtcctggcggaagccgtagttgcggcggccggagacgatctcaagcagaaccatgccgaagctgtagacgtcggccttggcggtgatgggctcgcggtggatgacccactcgggggccatgtacccgcgggtgccacggatgcgggacatggtcaccttctccttcttgctggtgagcttggacagcccgaagtcggacaccttggggcagaagtcgtcctccagaaggatgttctcaggcttgatgtcgcagtgcagaacccactcgaggcactcctcgtgaaggtacgcgatggcgcgcgccacgcccagagcgatgcggtagcgggtgtgcaggtcaagcagaggccgcttgttgctctcttcttcgtctccttgggtgccggtgcctggagcgaacaggtacttgtccagcgatccgtttggcacatactcgtacaccagcatcctctgctccttgtccgcgcagaacccccacatccgcaccaggttgaggtggtgcatccgcgcgatgatggtcacctccgcccagaactccgcctctcccccgcccaccccgtccagctgcttcactgccaccgcccgccggtccggcagctccccgcggtacaccttcccgtacgccccgcgccccaccaagtccgagaactccttggtcgccgccttcagctccgcgtacgagaaccgccgcggcccgccggcggggaggtactccagccccagcgtccgcgccatctccctgtactgcgagtacttgcgcaggaacgcccagaacgacagcacccccgccagcagctccaccgcgaacagcgccgtgatgatggcgatgttccggatcgtcgtccgcccctgcttcggcggcaccggcagcgccagccgcaccgggcacaccgtgtcgatcatcgtcgtcatccccgtgaagttgttcgggtcgttgttcgactccaccacccgcaggtaggtcgacatctccgtcgccggcgaccaatagccgtccaccagccgcgtgtagtgcaggcacgtccggtccccgcccaacttgtagccgaaggccacgcaagaggcgttggcccggcacttgctctggcagtccgccaggttctgcggcgtcaggctggtcatgtacttgccggggacggacactccggtgtcggcgccaccggagaaggaaacgaaatccatccgcacgaacttgtcgtcgttgcccttgccgctgtagttaagcttgggggcgcagcccaggccctgcgggcggtaccccggcgggcagacgcaggtggtgttgtcggcgccttgggggacgcagatgttggcctccccttggcaggcgccccggatggtgcagagctcctgcaccagctgccataccacccgccactgccctttcttggactgcaggctgtagaggcgcaggttgccgtcgtcgtcgagggtgaggcggcgcaggcggcgagtggagccctggtcggaggcgatgagctgggagggattgccaccagcgagttgcagcgtgccgtcggcggtgaggttgcgcagggcggtgttgccggtgatgttggcgtaggcggaggagccgtgctgcagggtgagggcgttgaacagctggaatctgccgttctgggactgcagggtgatgctggtggtggtggtggtgccgttgctaatgctggggatggcctgcgacgccatcagcgtgtccgtcggctccccgaagctggaccaggcgccgtggtcgaggctccccgagtcgttcagagacaaaggggcactcgtggagttgaagttgcgggaccaaagggtggtgctgttgccgttgtcgctccacgacagcttccccgccgcgtcgatggagagcacggaattggcgtcgccctccacggcggagtggtcgtcgttgtgggcgtaccatatgacgaccggcctggactcgttggcgttggcgctcacccagacggcgaaccagaacttggctggggaggagggggagggccggaatccggcggcgaagtccccgttgttggagacgagggtgcggttgctctcggcggggctccaattggtgtcgttggcggagaaggtccgcatctgctgggcctgggcctgggcggcggcgagggccggtaggaggaggaggaggaggacagcggccgccatggttgtgcttgctggattggggaagggaattggatttcttgcttttggatttgggatcgaaccgacgactctcctcacctcgagtctagtcaacaacactgtagccaatttgcccatcatgtaaattgaatattcattgccttgactgtggactggaatttcttcttcaatcgcgcgcgtaatccatgtgcctttcctgttgcccacggcggctaatcacaatcaatattaacgctttctcaaatactccctccgtttcaacatatttgacaccgttgactttttaatatatgtttaactatatgtatacataaaagtatatttagcaatgaatcacatgatacgaaaagaataactaattactttaatttttttttgaataagacgaatggtcaaacacgtactaaaaagtcaacggtgttaaatattttgaaacggagggaatataattactggagtactactaaacatttgtaatacaggtaaacagcgatatagtaatatattaactgcatctgcatgctttcgtccatccgtctgacttgcttccaaattcatgctactataactaacttaaacctctgttactctccatttttactgcaaaataattgccactcgctactccggtttggtggttacattattgagagagatgctctccgtggacttgtcatatagtactagtatgtgtgctgtgctgtgctgtgctgtgcgtggtctggtggtggcgatgaggacaatgctgcaggaagctagatttagacttggacacgaaaccgttgactttgatcggaccagtcagcattgctaagagcacccgcaatggtaaagtaaggtgctatctataaaacatgtacatctcagcaatagactagattaataagtaaaccatctcaatagtatgtctacataggtatctatagctctctaatacattgtctcgtttttctctatagactatctccaggttagtagatagctttgctctctctcttcatttaatctcttccaagtaggaaaatatgctgacatggatatcttatagagagcctatagataaccattgtgggtgccctaagcagccaacctgaccgctgtttcctgcctccttgcgtgatctcaatcatttcccctttgttaacactacatgtacgcttacattttacggttacccaaatttaccggtgaaataaaatcccaacaattctgaatgtttgggataggaagattagacagcatacgctcagagaaattagatgggtggtccgcgcaattacgctgctagcatatatataaaattatatatttttaatatgattttacttaaaatttattaaatagttgtctcattgtcttaagattttgaaagaccaaaacttagcatacttgtgtttctaattttatagtttttaaaagtcacaccagttactagcccttacttctgttatattattatttatttacttgctcgatcaaccactgtttctattcattctccttgaaacctttaaaatttggatataaaaacttatagtttttagagtttattgtcatgttgggcttcttttttataatttctagaagtttcgtcaaacgctaccattataatcctctacgaccgtccactgcatcttctctttattgtcattactattttaatagtctaacataattatcgtttacgttcatttttttactttctataagttccgccaaaacgtcagcgactttgttattgtcctcccctacgattcacacgttgccgcccttctttaatgtcattgagattttaaaattaaacatgattatcattggtttttttttactttttagaagcccaaacctttaaaaatggaccttatagtttttacagttttttgtctcgttgggtttctttttttttacaatatttagaagcccgaacctttaaaaaatcctatcaaacgctaccactatactcttctacgacccgttcgccgcatactctttattatcattgggattataaaaatcgaacataactattgttggaattcatattttaatttcaagaagacccaccaactattggtggctctgccattgtactcctatacgacccgcccgctgcctcatattttaattgagattttaaaaataaaatatgattatcattggggtttattttttttactttctagaagtcccgccaaccgccttgaccgattgcttcatgacctgtccatcgtccttccttttaatcgtcatttggaatttctatttggtgttttattaatagtttttagatgtcccatcaaccgccaccactctgctcctgtataggcttgctacttaattaatctcatcatgtgtttcagatggtcttttctttcaataatctttattttttatcactaattttagttataaattgtatccctagttgaaatctttttttctttttctcattttagaatttagtttatttacatattgtgttcttttgatatttttatttttttatttttaatttcagttgttttaaaattgtattcctactttaactctctttttaatttgcctaattttggatttcattttatttttttattccgaattttaattaatctactattgggttcttatacatactcttattttaatattgcttatatttaattccgaatttcagctaattttaaattgtactcctactttaactcttcttttcttttccttttttctaattttgattttttttatttttatttcgaattttaattaatctcgtattggattcttttatggactcttctttcaatatttcttttttaattccaaattttagttatttttaaattgtattcctacttggactctttttttttctaatttcggattttattttatttttattgctaattttgattaatctcgtattactttcctatttagactttttattcaatattgcttacttttaatttcgaatctcagctacttttagattatatttctacttggactcttcttttctttttctcgaattaatgttggaatttctagcctccacagcgaacgttgtgcctcctttcaaggtttgctaatttcagattttattttatttttattccgaattttgattaatctcgtattactttcctatttggactcttttttcaatattgcttacttttaattccgaatttcagctatttttagattatatttttacttggacttttcttttctttttctccaattaacatgggaatttctagcccgcacagcgaacttagtgcctcctttcaaggctgttttaataatataatagatagataaaaatagagagcagaccaaatgagcctaaatcgaattgcgtgaaaaaaacgaagaggaagtccaactcagcagataaggcctggcttagtttcctaaaaatatcacaacgaatctttgacacatgcatagagcattaaatatagattaaaaaactaattgtatagttagaggggaaatcatgagacgaattttttttatcctaattagtccataattagccataagtgctacagtaacccacatatgctaatgacggattaattaggctaaaaagattcgtctcgcggtttccagacgagttatgaaattagtttttttaatcgtgtccaaaaaccccttctaatatccggtcaaacatgtgtgtaacacaaaagtattcttttcgtgaactaaatgggccctaaaaacatcatttcttgtatatggcccaaaaaaagatgattaagagtttttcttacaacgcacgggtaaatataatttgtagcatgcatcgaagtataaccaatcaatcgaccacggcagcgtaaggatacacagaagaaaaaggtaagccgatggatcgagataattaataaagaaaggctaataatgactattttcagtttttccaccacacaaaagcgttgttacgggtgaaatcaattttaatctttcctattaatccactcaaatgtgtcattaggagaaatgtgtgggccccatcgggagaagaaatatctcctccggctcggctcggctcgattctaaaggtgccggtttttctgaaaaccagcccctttaattaatataggtgtcatttcattaaaaaaccgacatctataattaattaatggtgtcgttttactttaaaaaatcgacacctttagtataggtggttttttttacagaatcgacacctataataaaggtgtcggttttttatattttcggaccgtagaggtgggaaaatgcttataggtaccggttttaacacttccggtatctattgtgctaacatctatttgatattttgtagcaatggtacaaagagccatagaatgagtggggcctaacaattgtagcccacagtcatataacagagcaatcaaagatttcaagacacgtacgcacgtagttagtaattagtagttggacgataagttagaataaaagaaagccaaatctatatctctactattataaaaattaaagatgtttttgccggcactttggtacgttatccgtgtaagagtcggtttttaagttcgttcgcttttggaaatacggatatctatttgagtcaggtttctagattgttcgctttgggaaatacataaggagtcgtataagaaatctctttaaaaaaaactcgtatactaacttgagatgattggactcctaattgtagttcatgattttctagaaaaatacatatccaagcgaattctcacagtaaatttcacattaactaaaccgtataacaataataaaatttaaataaccttcacccgttgcaacgcatgggtattctttatagtctatctaactaaaaaatacgtaaggtttccataaaaaaatttccgtctgttttttttccgattcagtttttcccgtgatttttcgctgttttcttttttttccgattctttttttcgtgttttttgtccgcctcttttttttctgtccctttttttttatttcttcgtttcttttttccatccggctttttttctgcctcattttcatccgctcttttttcgttcgttttttatctaacccctagcgtcgctgccacgttaatctgggttcagggtttaggttcctccccatacattccctcctccaattgactgaaaaaagattcttcactactccctcattattttccccactattgtttctttcaattccgctttaatttaccagatctaatctccatttaaaagtcaccatgtaatctccattaaaagttcatttttatcctgaattttatggattcgtttcgattttgataaaaacgaaaatagtacgagtgtatcataagtccacaatcaattttgggagatcgagaaaaattcaatctggggaggatcggttctaacattgtatggtgacgaaaatatctttctagagattgaagacggcagtcgcatattgatggggaggatctgtctttcagagattgaagacgacagtcacatattgatggggaggatcggttctaggatggtttggacacgagattgtcttccagagattgaagacatcagtcgattaggcgagctaggcttacggctttacttgtaggctagccaaagagaggcaagccaaacagacggaggtaacaggttagactgggactgaaaaggaaatgagtttttcctcagaataaaaagtataatgtaaaaaatgtttttacccgttgcaacaaatggacattttttctaggtacttactaattaagcattgatttttcttttgatttttcgcaattttgttttctaatttttcaagccttgacgaggcattgaacctcccggtcccagcccgacgccagggctaccggccgctcccagatctcatttgaagcattgagcagttaggtctaaccacacggaactttccccgatgtgaagaggattggaaaaataggaagagggcagcctccagcgacaggaagttcactttagatctcttaaatcgtcgcctggtttttgtccttattcgaaaaaccagatacaactcatcacttaacttacaaaaccgtgcaaacgagattcctcgatattattgtctctggttttgactaacgtggcgtctttaaccatgtcttcatcacacgtggtattgacgtggcgcttacgtggctatttgatgaaaaaaaaataaaaggaacaaaataaaaatttggaaataaaacaaaatatacggacgcacatgtcagaataaaaaatagtgagacccacctcctacacctcaccctcttcccctctcttccaatcctctgcctccatcctccatcctcccggcgacaagcacggcggtacctagctgtcgtccgcgctgagatcgtgcatgagctctcctcctccgcttcgtcctctcccccgttactccaatcctaggtaccaactccaccgccacatctcgccgccgcttgcagcctcgcccccaaatccagcgccactcactccccactcacacgctcctcatgttcttcttctatcgctagagagcaacagcaaggacctctccatccatcggtggctttttacccataggaggggagaggggaggcctggccattgacgctgtcgcgatggagcgcatggccaagcactgctgggatctgtgggacgcaggcagcgacgccggcgttagatccagctggccggtagctcatgccagtggcggaggggtcaagccgtcgtgggaggaacaggtgttctcgcaggacgcagcggagcacctcggcggctgcttgtggccgccgtgctcctacatgtgcagcttctgccggtgggagttccggttagcaggcgcttggtaggcacatgaacgtgcattgctatgaccgtgctcccctccggcagtgcgacgacgacatcgacccgattcaaccaccaatcggcagcatctgcgagccgcctactcttttaccgtcaacggtagtagcagcagcagagtatcctttttagataatggaagtttttatttaactcagtcaattacatcgagatgatacaattatcctaagaacactctcggcctatgcatatctcctgctacaaatatccagccctaaatccacaactgctcatcatcatcatcataatcagcagctgcagggcactaattcttcgtctctgaattcctgcataacaaccatcatcaagaagagcaggaacaagacaagatgaagagaggggagattggaagagctgaggaagatgaggaggggagtaagaatgacatgtggccccaccattttaaattactatctttttgtaactaacgtgtgggtccatgactattatttttcaaatcgaattgtcatgtaagcgccacgtcaatgccacatgggacgaagatctagtcaaattagtcacataggcgccacatcagccaaaaccgccgtccaaaccaccgagggacctcatctgcactggttttgatagttgagggacccgttatatctggttttgcggttgaaggacgaaaatcggattcgttgacaagttaagggacctcaaatgaacttattccctagggacatgtcacgcccagaaattcccgaatagaatttcaagcagaatgtgcattaaaatccccgtccaggaccagccggggtacacaaacgacaatgttgacattcagatccacgtcttacaaacatcataaaagtcttacataaatgcagcggaaagaaagagagacaacaggagctaagccttgactagaaccgcagcgggatcaccactccacaggcatcctcgacggcacggacgaagcctactcctcggagaaaccttcatctgacacatactcgaactctggggttgggaaaagtagagcaagactgagtactacccactgtactcagcaagtcataccggaatagaggcatgatgcagggaatcatcaaagaagagctaaagtggttcatttgcataaagcgagcatttataaacagaagttgaaagattaaacagttgtaataattaattaatattaactatccactgtccaacgctatcccacgttgcaacaggcccaaccatccacctaaactatccagtttcaaaagattacactagggtgagactaatcacggtgaatctggttgaccgcccataaccgcgggcacggctattcgaatagttttactctgatcagaggtgtacaactgtacccacaagacacagccccacaacacgtttccgtgcgccgacatgccaccacggcatatcagaaagaggccgtgacaggacccttcgcataaccccctctagccaagcacaccacacctcaggtttcacacccactcctcgcaaggcagcgggcagtcccctctcgtgcctaggtgaatccggaagcgacagaggccgtcgcagggcccgccccgctccatcacgcccacccttgcctggatgcgtcgactagaggaaagctatactacaagcccagccgttgcccacgctggcttgtggtaagtacgataagttcttccagggcatcccgcgaaccggtccttaactgccatgggtgcgaccagcaaaaccatgcacccacagcccaccatgtggtttattttaattaaccaacaccaaagcggtgtcactaatccaacaaaaccattagaaccaacagtctaaacgttaataggattttccccaatgtgaactagttgaactaagcatggctaagcaatccctagtcctaactctaatcatgttagaaccccaagttgacaaagaaacaaggtacaacaatagcatggctacgacaataggtaaacaacccatagtaacattataaaacaatgcaatatttgacagaaagcaatagagcatttgcaatataggatcaacatattcaagtgacaagcatgacttgccttgctctgctgctggaggaacctcggcgactatttcgaagtacaccggagcgtcggaggaaccggaatgtagcgacatacaaagcaaacattgcaaacaggctataagactactgaaacagagaacgaaaccatttttaatggactctacacatttttcttgatttactgagacttgaatgggcttaaacggagctcggatgaattagttatgaattttagaagattcactgtgtttattactatacaagaaaaaccttaaattattcattgggcaatatattccagggctgacgtcatcaaggcggggcggcgccggcaagcggggcccactggtcagcggctcaggggagagcggttcaccgtgg

SEQ ID NO: 5065 - DNA, 43621 bp, Oryza sativa
taaaagcttagttgggcataaatgacgaaggaaatataaacgtataaataacaacatgaaactataaataactttgccgggaatgataattcaatatcaggaaaattatataacttaatcatattttcaaatttagctataaataatttaatatagagaaaactatatgttacaataatttttagtggatcaaatagtgctaaatctaataatataaatgaaaaaaacaacttaaattagttagaaattgaaaaaaaacttattttagcccacgtatgaaaatctgattcattaattctgaacgggtgcttctttcattgatataaaatagaatttttcatgttctattcatactccatttgtcttaatatgatgtgagtggtccaggagcatggttgggtagactaagaaggaataatgcccaacagacgttgttcattgttttccctagctcaaggcgagaaacaaaagaggagggaaggtgagcgtcggtgctccggcgaccaaacgacagtaaggaaagtggtagtacgtatcccacgatgtgactcgttcataaatggtggaggttggcaatgaaaaaaccggaacaagagggatgtaggggggcaacgaggtagtcccgtgatagattgagaaatgacaatgatgagctctagtggtgaacacgaccaggtgagtgtgtcaaaactcgttcctaaacgagaggattatgttttccttgaacaagcaggagaaaccgactaatattatctatcgtcttccctaaccaacacaataaacaaaagagaaagggagatggacgacggtgctccagtgatcaaacagtggtgagtaaggtggtcgagtgtgtttgacaatatgactcatccatagatggtggcggttggcaacgaagaaaaccagaacaatgggaatgaggtcgacaacaacatggtcctgatagagagaaacaacaacggtgatctcttgtggtaaacatgaccgagtgagtacttcaaaacgtgctcccgaacgaggaggttctgtttttcttaaatgcgtaagagatagggaatgcaggagagaggagggacaccagggagaagagatgtcgagggggagggggagcatgtgtagcgaggaaaagatgtgggggtgtgccgggagggaaggagggaggcgggagaggaggggcaacgccaggaaaagagggtctgcgggggagagggagagatgggggcgccaagagggagggagagaggcggaaggaggaggggcaagggagggaggggggagcggacggatttgggggagggggagagatgggggcgccgggtgggaggagggggggcaagggagggaggggggagcggacggatttgggggagggggagagatgggggtgccgggtgggaggaggggggcgacggaaggaaaaaaaggcggaagccttaagtattttttaattaggtatagataggccagattttggcatacatacatacatacatacatacatacatacatacatacacacatatatatatatatatatatatatatatatatatatttgaaaaccaggaaatattattagtagaaacatagaacatgagttattttacaattgatagaagagagagtctagtagggtaagcaatatgagaaatattttgacagctaataacaggatttgacagaagacttgttctagatttccatgccacctgaagcaaattttcaggaatgtctctttgaatttggctccataaaggtctgaggcttcaatggcctggttcattgctgaagtctattttcttgatcgtatccgctattactgaattatcagttaaaaaactagtacctgcaaagttgaagaatttggcaatctccatagcaagttgcaatgctgccaattctgccagcaaagaagattgagccacctcacttgtggctttaataaaaagagcatttgtgtgttgtcggcatgtggaagaaaataccaatctttgtgaattgattctcccaagctgcatctatataatatttattgccctccggaatagtctccattcttcttttatatacctcctcctgaggctccacctgcaaattatgatttatagagaaaagagtatatatgaatttatcatagcttctgccgcaaaacacacttgggtcggctcctttaagatgccctgaaatttcagatcattcttggccttccaaagctgccacacaagataatcaaagatttatggagatcaattttattagaaccatttgaggaaatgtaagcaatgatgtgagccagggaaacattatcagagaaaatgtcagtactcagtagaaagatttgcttcagaaattctccaggttagtctgctaaagaaacaaccaaagaaaagatggaaatctgtctcagggtggttgcaactacagcaattggctgaaatatcagaaattctgtgatttaacctttgcgctgaaggcagagcttctccaagcaaaaactttgaccttgggaggagtttggtaaggcatgtttatttcccaaacaaaaatttttatgctttaacatcgaatgtttggacacatgtgtggagtattaaatgtaggaaaaaaaccaattacacagattgcgtgtaaattgtgagacaaatcttttaatcctaattgtgccatgatttaataatatggtgctacagtaaatatttgctaatgacagattaattaggcttaataaatttgtctcgtagtttcctggcgaaatatgtaattaatgtaatttattttgttattagactacatttaatacttcaaatgtgtatccgtatatctgatttgacaaccaaatctaaaatttttccccggctaaacaaggcctaattgagttgtgcctaaaccctaggctacagcgaaaccagcccgtactaattgtttgggcagcagacgtacacgttgttccgtttgaatttaactacgacgaagataaagctagggtacgcaaaatgataaaattattaacatgtgattaattgatttttaatcattacaaatttaaaaaaatagatttatttgatattttaaattaatgtttgaaaaacacgctaatggaaatcgaggaaaaaatccgtatcttttagctacaaaagaacaccaccgggttagagcaagtttaatagtataaccaactgctagcttcaaatcatctatagccaatgtaatagccaattcatacaactaggaaagtagcccgcgcgaatgcgcgggcatgcgtcgtacactatgtttgagacacttataagagtgaaatattaactggagaacatatgccacaatttttctattgttttcattggcattaattgtttttataattttataacctattagctttatattacatcttatttaagcgatatttataagcaactatttataatcttcttcatcatttgaaaagaaggtagactaattttctttagaaaacatgtcaccgaaagtaaaagtaaggtaaagtaaaagtaaggtttttttctaaatgcatatatattatcatgatttattagaggatgaattgggtgggacatgaagctccactaaattctatatagcctaatatgattgatgtagtttgagaggctgtccatccataaatattttatgtacagtgggtaagaggttatacgcaacctaacatgaatacaataatgataagatatttatatattttgtttaatatttttaataaaatgaatggtcaaacattattaaaaaaagaaggaagtaatatatttttatctttctcttacatggaatatcctaattccatatttcttttgcaatcatacttgggaaaatatgtagtgatgtggacaaatctcatgcgttcatttttgatccaatggtgattttcaggtttccactacgtatgttgtttgtactgtatattttttccatcatactatacgtaggtaagtttgttttgggttttgggctataacgtttttcccccgtgaactgtatgtacgtggtgtactttacgtacatacttattttctatcatacattttcccggtgaactttacgaaagcatgcattttttttctgcatacgtggatggagattagggagtagagatcacttttttagtttttttaagtatgataatataatggtctaaaatattgggtccatcaacgtaagtaaaaataaatatctataattttctctaattaattagagtgtcatgttgtgatgtaggaatgtttgcagagtaccacgtgatggatacgtagcgtttgtaaaaagtttaataaacttttagtatataatagatacatggattataatatgttagttatctaatgtttgattttaattaatattaaactttgctaggtagaaaattaaaagatgaaagtatatataacagatgataggagatagatggagggactgacgtaccaatgttacttaggtgatgatggagtgagggtgcctaggaggtggtggggtaggggtgggatgggatttatggatgggttgttggattttgtttaaagatggatctaatggtgaaaaataatagatccactgtattaattaaaaatttaaggtcggatgttttctttttttcttggaatttctttgatttctctaatttattaaagtgtcgagtgacgatttaggagtgtttgtagtgcatacgtattttctatcgtacgttttccatgtgaactttacgaacatacatattttatctcttacgcggctggggattaggaaggatatattacttttttattttttaaagtatgataatctaatggtctaaaatattgggtcggtcaatttaactaaaaataaatacatttttcttagaatatctatgattttctctaattcattggtgtgtcatgtagtgatataggtgcgtttatggaataccgcgtgacggattggtggcgtttgtagaaggtttaataaacttttaatttataatagatagatagattataagctgttagttatttaatgtttgattttatttaatcttaaacttataatataatatgttagttatataatgtttgattttatttaatcttaaattttgctgggtagaaacaaaaagatggaaagagtaatcgatgataggagataggagacagagggagggacggacgcacgaatgttaagtaggtgatgacggggagaggatgccaaggaggtggtgggttaggggtgggattggatttatggatgggttgatagatctaatgatgaaaatttcttcgacttctctatttagtagaacatttgtaaaaagtataatggatttttttatataatagatttaaaaaatacaacaggatcacaaattagatactctctctatcccataatataaatcgtggtgaaagttggcatggtcatcaaaactaagttttagcttataatttttcatatactataaggttaatagtaacaaaattataaccatatgaaagtaattttaaatttcaatctaatgatatatttttaacaaataaaatttattttatattatacaaagtgttagtcttaaaatatgtgcgcgccttatattgtgggatagtgggagtatattttcttttacaaaattaaaagatggtttaaagaatgttgattggatattttaaatttttttattatatatcttaattttactacatatttatatttgtgaagtaatatattttatttttatattataaaaaataaaatggaccgttaatttttttcctccgggcagcagaaggaaagcttcgttttaaacagtaatgtacgtactcaaatttttgtttccaatcatacgtacgtacctacgtaggggacagcagtcatgtttgtatcatatatacggtcggaggaagttattattttttaataataaatttaatctaatggtgtaaaataatgggtccacaaattaagcgaaaatcaacggtacggttaggacgggtccaccaatttaagtgaaaatcaacggtgagattagatagtgccatgtgacggcttaagaacgtttataggagtgacacatggcagcgttagagcgtttgtaagaagtttaatggacttttagtatataatagaagatagatagatatagttgcttactgtattattaatatctagtcctacctatcatatgcacattatgttttggagctggctataaatttgtagcctgttgctgctctatctctttctttatttttttaaaatatgtttatagctggcttatagtttttattgtacctgtatgtaaagatgctcaagcacgagctgcagcgcaggtggtctgtgagaagtagcagcagatgaggagcgggccctacgttatctcggagcgtggacacgactacgccacgtcggatagcacatcatgatcggcagctaacccaacgtagccgcaggctggagctgtgttggaaagggagagtgatgaatccatgaacgaaccattagcagctagctaggtcgcgggctgagggctgactaatcatggagcaagcagcgaaggccaccatctcactgtcgccgccgagttacgctggatgttgcatggcagcatgtccctaccgatcaacgcggcacctgcgcagaggaggcggctgctctgctcgctccatctcctccctccggcatgccccttctgctcgtgtttacgccgcagccgcagccgcagccacgccggagtccaagtcgacgaaagagaatgacctcgtcttcatcgcgggagccaccggaaaggtgggatcccgagctgtaaggtacacctcctcctcctcgatccgttcgtcctccaggccggctagccagtcatccctcgatcgatctgtccctggaaaaatatactccagtatgttaattactgcagagacacgtacgcttgtatgcgcttgcagggagttcatcaagcttggcttccgtgtccgcgccggcgttagaagtgcacagagagcatcgtcccttgtgcaggtaacaataatccatgaatcttgctaccagctacacctatgtaaatgttggagtacagtacttttcatttatacatcttgaccatacatacgatcgacatttcaatttcagagtgttgagcaactgaaagtcgatgacgatgcaacttcgcgtgagtcgtcggcatagatatattaattcgagtttccggttaactgtttgtgtctgaactggatcaataatctctagaccagccgcagaaaggctcgagatcgtagaatgcgacctggagaagcaggcgcagtcagacatcgtgtcggccattggcaacgcggcgattgtggtgtgctccatcggcgccagcgagaaggacatcctggatgtaacgggcccctaccgtatcgactacatggccaccaacaacctcgtgcaggctggtatgtatatataatatactctagctagcttaattagctttaatttgttcatcattaatattactctataagcagaaacaattaataattgaaactcattaactacgtacatcattgacgtacgtgcgccagcaactgctgcaaaggttgagcacttcatcctggttacatccctgggcacaaacaggattggcttccctgcttttcttctcaagtaagctagatcgatgtgtaattaattaatttccttgttcgatataattattggccctgttttagtttgaggaagaaaaaaagagatcgatatgtatgcatatatatgtagacagcccagccctttaggacgtacaaaaacgaaatgaaatttatgatgcatatgcacgcatggttacagcttgttttggggggttctgtgctggaaaaggcgagctgaagaagcgctcatcggcagcggccttccttacacggtacgctttctttaagataataaaaatggtttgcatcttcagcttctaccaatgagtttaggtgtattgtcaggtatatatacactatatatatgcaattaattaatgggttaattagatccatgctattaaaaatatgctgattttgaaatataccattagtattcaagtattttgaaccatgccattataattttatacatatttgatatatgccactatttatcacttagatgcatttaaaaaaaaattggacaaaattgcccttcttcttccttcctccacttcttctcccttcttcctgttcgacggcagcggtggagcggcccggcggcaagtggcggcggcaggagcggcggtgcggcgggcggcggcgagcggtggcggcgacggcagcagcaggcagcggcgcgacgacaagcggcctcttcaccgtcaatcttgccggcctcttgaaaccagccacgcaccatgacagtgtcaccatccccggcgttcaactgctcccaattccccacctcacacactgctgaaagacgcggcggcggatggacttggggtcgtcgtcccaggggtagtcgtgttcgagctggaggatggacttggcggagcggcccggcggcaagcggcggcagcagcaaggagcggcggtgatgacagcagcagcgagcagcggcgcggcggcgagtggccgcagcagcagcggcggagcaagaagcaacaagaagagggggtagaagatgagggtaatttcgtccaataaatacaaaatacgtatcttaatggcatcgttacaaatatgtaaatattaatggtatattttaaaaccagtaaaattttaatagcatagatctaattaattactatataatttctcatcagatcgtccgacctggtggcatggagaggccaacggacgctttcaaggagacgcacaacctggtggtggcagttgaggacacctacgtcggtggactcgtttccaaccttcaggtggcggagctcatcgcgtgcatcgccagcaacaggagaacggcctactgcaaggtggtcgaagcgatcgcagagaccaccgcgccattgctgcccacggaggatcagctcgccaacataccttcaaagcgggtatacccatgcctattattagcatttaatttctccatttcatattataatttgatatttttcacagtcaatattttttattttaagctcaatcaactttattagaaaaatatagcaacattttcgataaaaaatcatatattatcggaatataatttaatgttagtttcgacgaaactaaggctgcattttttcgcttagatttgagagagatttttcaatgcacgcaaaacgagaaagattattagtatatgattaattaagtaaataattataaacttgaaaaatagatttatttaatttttttaaacaacttttgtatataatttttttttgcaaaaaaacaccattgaacagtttgaaaaatgtgctaacaaaaaaaataagcaagttaaagtttggagttgatgaaaataataatcctaagttgatgttgctatttttttaaaaaaaaatttagttaactcaagtaagtttaacttaaaaaaattaaaccgacttataatatttttattatatacatatgaaataatgtgttaaattgatggcatatgtatacccatatgtgcagcaacctccgcccgaacctgaggtagttcagcagggagagacccctccaaaaccgatccagcaaagccaacgaccactctcaccctacacggcgtaagtataacgtgcacctacatatacagtacattctactccctaaattaatcctattttttctataaaaaaactagtgtagaaactttttcccttttagagatggttgccaagagcatgctcataatcaggactgaaacaaaatatctatctatctatctatctatctatctattatctattatctatcttctattatataagtccattaactttctacaaatgctcctaaatcgccacgtgacactttaaaatttaaaaaaattctttaaaattctgaaaaaaaaacatctaaccattgatttttattaaatctggtggacccattatttataaccattagatttatctttgagaaaaaaaacatctcctaacccgggtccacctggcatgtaggtacgtacattcctgtacgtacgtctccccatgttccctcaaatccttggttcctcctcttttttatcacaaaatataacctgagaagttaggcttaaccagtgacacatgtgtgagggaagtactactatacatgcatggcttttttgctattagacatgcatgtcttttttctctcttcttataaagttttctcacaaattacttgtccgatcaacaattagattacaccatcgtattcgttgcaattaaatctttacatcaaagatcttacacgattatattacgatgaaaaaatatttatgtttgtaaattaattttattatatacgtaagttacttttatcatatatataaattacttttagatttgactaaattacttcttatacattcataatactctaaattgattatttttattattgttttaagttaatttaataatttatggactttaaatttaatttttacatagaccatatttttctctctacagcaaatttacttctaatgttgtaacaacttattttcattttgtgctaagttatttttatgattgatgtaaattacttttagactttattaaatttatttttagactttattaaatttactttcataaatgcatttacttaaaaatattctctacgctttacttgtgaatttactctacttactgtttcatttcaactcagtcacaaatgtaattacttctactacaaaaagttactcctgttagatagctaagttatttctacaatttcaatgaattgcttttaaattaataaattgtttgaatatattcaacgtgcatcttgttttctcacatgttttatatagagtacaatgatgcaaatagatcttgaaaacaatatgtgatttaaaatatataagttattaaagaggttaaatctaaaagtaatttatatatatgataaacgtaacctacatatatattaaaattaatttacaatatagatatttttttcagaatataatcatgtaaaatcttattgtaaagatttaattataacaacacaacggtataatcgaattatggatcggataagtaatttgagagaaaattctataagaagaaaaagaaaagcatgcactattgagtctagtagtagcaactaaagtgaggtcgcagaatattatgcctaactagcgatggttttgtcatagtcacgtcccttttttttatctaatcattctcttatttttatgccttactctctccgtttcaggttataagatgttttgactttggtcaaaattaaactgcttcaaatttgacaaagtttatagacaaatatagtaatatttacattaccaaattagttttcttaaattaataattaaatatattttataataactttatcttggttcgaaaatattactattcttttctataaatttgattaaacttaaagcagtttgactttgactaaagtcaaaacatcttataagttgaaatgtagggagtattagttagaaaaccaaaaattttgcgattttgctaaatatttatttacagatttttttttggctaaaaatcactcggtattttttaccgtccgattcattgatgatttctgtgcttcgttattagccgcacagtttctttgcgtgtcctctttccttttccctgtgttgtatgcacatatttattcgttcactacccgtgattggttggctatcgtttgagagatagaagatgcatattctctatttactagctgctatatgactatgcgaatggcttctgctgttcttttgtgagactagcatactacttttatatatatatatatatatatatatatatatatatatatatatatatatatatatatatatatatatataaatacatatcagttacactataattatattatatttctaccttagttgcatttgtatgattttagtggaaaaatctgtcgagcgatacatagatagaccaaaaattttgtgttaaataattgagcaactataacatataaatcataaaactaatttttatctacttacatctttaaattatttatgaataaatttagacttgaagaccaaacttcactataattcaactttgaatgtcattttgggttatactttttgatttttgagtgccatcaagcaattattaaaaaaataaaatataataataataacaatatagatttcattatcgtaaacaacttcataatagtcaaattagatctataatcattaaagtaaaatgataactatgagtaatgttcccaaagtatattagttagaaatcataagttatggctggaaataagcaactataacatctaaaccatacaactgatattttatatcatctaaatcatacatataatatttgatccacttatgtctttagattattttacgttcaaagactcatatccagtgtaatttaactttgaaaagaattatgtcactttcgggaggtgtattttctgaattctgtgtgccattcaaacaatttaaaattataaaaagatagtgatttagattttatcatcctacataactttataattattaaattagacctatagtgataaaatttgaattaacctaactctgagtaataatgaaaaattactcccaaattctaacattataataagtcaaaataatattattagatttgtagtgttcatattttgaatatctactatgaatatgaatataccataagaatagatgagtaaaaacttttattctatttttatttaataaagtaatagcaactaagatactattacccgtgaaaaaaatataattatctgcaagcgtacattctccccttcggctctctcttcctctcctctctcattcaattcctccgtgttctaatttttaactaattaataaaagctatcaatatttagaaagaaaaatgattataattcttaagtgatatcctatttttattttgtgaattattgttttatttatagttaagtaaataatttaagatccacattaccacttatttctgcataaaataaaaacacgtcatttgaacatagacacctatgcttttgcatggtaaccaaatagcaaaaagaacataacattatcacaagtacatgctctgtagcgcacttaaaatgtcacgtttccgtcttaaacaaaaataaaatcatagatattgtaaagaaaaaatcatctgccttgtgttatgtcttaaaaattaaaaaaaagatattagaaatgtgagaaaaaagttggatcatcggttttcacttaatatcatttagagaaaaaaaccacccctccgcttcagcctcccccacacatggacacaatacaatactacatgtctcctccctgtccttttatagtttgcaataataaaaaatattaaaatatgcataatttttaagatactcatatgatttctaatctaactattgttgtattcacaattaaaccaacgatatgaagatccataacgcctaaattttgaactggtataaaataaaataggaaacaaaaaatgtcaataaggactaaattgaactatttggagaaaatttaataagttcgtaaaagcatttgtgcttaatttttactaaaattggaccaaccattgcatgtcccatttttataacaatttgtaaatgcttagtttctcgatatactattgcatatataagccacgctaaggttgttgtatatagtttgttgaaaagttatatttcttactattaaatttaattttttggattcatgttaacaaggtattttctttgaaaaagagaaagtatataccgcaaatatcacaaggaaggaggtatacgacatctctttgttaatttatatgcatgtatgtaacaacttgtgtcaatctgaaccaactaagtaggactagcttacaaataatacacattattaacaataatagttctttagggttttaaaaaaagcccctatgaatttaattaaacaagataaaacaccttagttttaagtgcatttacacttagtttgttagacacgtttatcaaatgttatatattttaaatgctaacaaatagtttggaaaaattatctaagcaataccaatgaagaaaattcatagagaaataatacttttgaaatatggcatcttacaatgggttgatattccgcctatataaatttttcaaacacaatcaataatatacatgtccgcacgaatgcacgggctatcttcctagttgcaattaatagttaaaaaaatgttttttacaaaacatatttagggtgaaacattgtctgacttttaatataattttgattgaaccattattatgaatgtttgcatgcgggtgattttttttcttgaaatattctttgattctactctaaacctgtttctgtcaataatttatttgggattgttttcatagtggttatgattttcttctaattacccttctaacatataaattgtaaagtagaaatacttgaaatcgtacagtcctgaatttatgagaatttattgtagtggaataatggagtttctaaactttaaatactatttgttttttttgtatatatagtattttctctgttttttaatatataacaccattgattttttagactattcatcttattaaacacaattaactaatgctatgagagagtatatgtatgaagagtgccgccatttatagatggatttgttcggtttgtttggtttgtttgcacatatgtggattaatttagttttgaatatttgtaaagttgtatatttgatttcataatatatacgaagatttttagaaatttctaaggttgtttggatcacgtgtaaatgatgtaaatgaggtagatatttgaactaatgacataattgtaagcacatattattttacatgtaagaacatataattggatcatgccactacaaatatgccattttagataaataccattactattcacaatatcggctcatggcactgaaacatggggaaattggaatagtgccactccatcatgttttccgtcaaaaatttccgttagccctaactgcacattggacctagctagctgtcagttccatcttcccctcactcccctctcttctctttcccccttcctctctcttcaccaccgtcgtcgaccaccactgtcgcaaccaccatcatcgactacctctgctgtgggaggcctcgggagccgccacaaccaccaccacggtccttgatgccatccgcgacaggaggcttgggagcagccatcctcgaccccatccatgcaggagggctcgggagctgccaccgccatcatcgtcgttgtcctcgtagtagttgcggggatgcatggaggaagagatagggaagaaagaagagggaggatggtggaagatggaagtgatatgtgctccccacgtctaggggtctgacggaaaacatgatggagtggcactgttccaattttccccaatttcactggcatgtagccgatatcgtgaatagtagtgtcatttatctaaaataacatatttgtagcggcatgatccaattaaccctagtcaatatatggatgtaaaaactattaatttaattgtgaagctagactacaaccattcaaatggatcttatcaaggtgtttaaaagtgtgcatacaaattatattagccgttttttgacttgaagtccagcaaaggaaaaacaggctaagtgccctagctagattacttaacattttctatcatcaatcataccatcaaccctcttatggcctctaaatataggattaggcttattggtttcaagttttaagttaaagttttagcttatatatgatttataattagtggatttaaagttctaagtttaacggtggagtcatacatctgtcttacataagctaaaaaaagtttctccaaccaagcttttgatttaatagtataagtttggcttatggctttaaaaaaaccaaaataattgcttgtttgtttaggtttaaactttttggctcataataaattggcttataaatctaaacaataggcccttagctaggaccaagcatccattgagtttatagattttgattgcacatgtgatctctgttcacaccaagtcgatgagatgcacggatgcatgcaagcgcctcaaacatttatgccataatttttatggaaggatatgtttaacctataactcatcaatagagataatctatgctctaattggttcacacgatgctaccatttgcacatataccgagcaagacatctaccccttccagtccacattttggacaatgatatgatatctaaaatatataatatatacaataaattattttttctctttttattatagttcgctgtaagataaatctatatatatattgttctaataactctaaattaaatattatttgagttattgatagtaaaagatatgaaagttacctaacctttttcaaaatttcagagggagtaaaatgctaaattaaattatttactataaatttgtcatagtagcttgtgattataaatgcctcacacagtcacatgattgcaatgaatactgaattaagcattgattacaatttacaagtttggtagtttcttcacacttctttccctaataattcctaccgtttcttatttttcttctctaattgtaagatcatttatggatttttggtgtgcatatgtacgcatatagatcattcacaactgtgtggctatctaactagcataaaaaacgatgcatgatttgcttggagagagttgggcatgtacgggaggcagtcaggaggcggtacgtacagactcatacatatataatatactaggtgaaacccagcgcattgctgcgggaatttagtataataacaataaaaaaaataatatgtaaaatagctagataatattagattaagtaaattaatgtggtttatgataatttaaatttaaatagtatgtagaatggtgattcaaacgtaaaaagtaaggtagaatgactttatggaagaagaaaaataggaagatagtttggaccgtagattaatcatctaaagactaaaaacaattgatataatatgacttaattagagggaaaaaggagaaagataatttgtaccatagattaatcatttaagcactaacaagtaaggatgaactatataagtatataggatatcataaaacataataaagatatactttgaaacattatgtgaattatgttggatgataatttaacatgtttgtatttgaaaagctcttaaattataaaaactataaagatatagcatgtttacatgatgtttaaatgtgatgattgttagtggatgatgatgtgacatcttgttaattagtggactagtggatgatatgcgatatctttgcatgttaagcttaaggagttagtggaggataacttagtaagataggatacctacaggaggcagggtttaaggaatttattttttaagattgatctaatggttgatactaatgggtccaccgatttaaatgaaaatcaatggttagattctttagttgccacatgacagtttgagagtgttttgaggagtaccatgtgacggcttgagagcgtttttaggaagtttaatggatttttagtatataataataggtagattggggtgctaatagatagatagatatattaattatattatactctctctccactgttcacagagaaaacgttcgatcgcttcaatatcgaaatcctaactcattagctttgtactgattttgccataacttcagattacctgttggcaatatatagctttgtgctgatgattttggccggtctggcatggctacagatttgtggacctgaagcctccaagctcgccatcgccgtgcccaccatcagcagcagctcctgctcctacttctacagataccgctgcggcaggttcatcgtcaacgttgaactccagcgccaccggcacccccatcagcgtggatcaaccgaagcagcagcagaggcctctttcaccgtacactaggtactatatatacttaagactaattgattaattgatgccatttcatttttggtgttgtctattaatgaattggttaattaatttgttgaatgcacggtgcaccgtggatgtaatgatttgttctaagatatgaggagctgaagccacccagctcgccgtcaccgacgccgccatcagcagcttcatcggcttctgtttctgcttctcctgatacacctcctgcagcagcagcttcatcggcggcgttggactccagcgccaacggcactcccatcaccggcgatcaactgaatcagcagcagagtcctctttcaccatacacaaggtgcgtactgtacgactatatatgtatatacatgcttgtccattcttgtactaattcgatctttttgtgaatgcattattcaaggtacgaggaactcaagcctccaagctcgccaaccccatctacccccaaactatagaagcaagatagttagcatataaggctatattcgttttttgccttggccaatcatcactcaagatccagttatccactactagttaattaccttcatccaggaaaagcgacttgtatttttcatgtccaaattcaaaaaaaacaaagagtagtattggaattggaagtcaacaaattaattctctctaagtcttacaatgtttgtgcaccaagacccaggaataatttaaacggcatcaatcaatatgacatgcacaatatgcacacattatcccacaatgcatgcatcaatttaaaacacaatgcacaattacacccttagcatgcacatattttcccatgctgtattaatttaattgtactccgatgaaatccttgtccatgcagttatatgatgatcaaattgagaaaatttggttttcaatatatgatgatcaatttgggcaagagtgagtaagtcttaaccataaatactccatccatcccattttaaacatcacataagcaaagaacacaaagatcatggacaactaaacctttatcattctgtaattaattctcatcagttataagagcatctccaatagcctctccaaatcggactctccaaacacccatatagccaactctccatcttatttggctagtcaaactacttactcgctccaacagcctctccatctacccactctattttaagtctatcacagtgggtccccacatgtcagtcgctgcttcttcttcctcctctcccctccttcctctttctcccgcaggtatcaccgagcgcctcttcggcgacggcgaaggtggaactgtgcgcacgcgaggcaaaggcatcggaggcggcaagggggaagggggtgggagaaatccgtgtgcgcgaggtgggctcgtgcagcaagtagacgacgacgatgaaaggggagaagcaggcggcggcaaatccgtgcacatgcgagtcgacggcgacggcgagggatgacgaagactacggcgacggcgaaaggggaagccggccccactgccgcctcatttcctatctcgctagcgccaccactcccttcacgccgccttgtctcccttctcccacctcgacaccgtcgtcaggctgcgaggtgacaggttgcagcgagtggcggggcgggcggaggcggggtaacggctgcggtgagcggaggcggcgggctgtagcgagcggaggccggcggctgcggcggcagggcggccagaggatgatgctatggcaggctgcggcgagcggcggggcgggcaccgtcttcacctgccatagcagtgctcctccccgtgctcctcgcctggttgcctgtgctcgaggggtgggaaagagacggatgcgagagagagagagggggggtatggaggagactgtcagtgtggggcccaccattggccagccaaatttagccagtgaggaggagggtttggcggccagtgagttggagaggctgttggagcatgttttttgggtagaatagccaaaatttaacttggagagtcaatgggagaggctgttggagatgttgtactacgttgtttcgtatcccatggattacatcaagttttaaatattgcatgtagttgaccaatagaaattaatcttggttggttgcatgcggcgtattcaatgatgctcatttactctttttgcacaaataaataaagatgtgtttgttagaggatgatcattttgggaagatctcaagaaccttacgtgctgatcaaattaggatagagggagtaccaaatttcaggaaccaaaaggctttcttcttccatgcatcaaattcagatatacatttccagtcctagttcagctacaacgctcttcgcgggagcgattcctcggacagcggggagtggagaccccttcccaggtgtgaagattggaccaggggtttgtggtgcaaggcataggaaggtatctaggcaagatcggatctgcggggcctgagctccccgctgagcaaaagatacatgaatttatacccacccggaggtgtaataccctactcctgtgttggtttcgttgtcttcccaagataaggtaagtacaagggaggcctttccaggcaacaatgtgaaatgtactgatctaaagaatccaacccttcatccgtagcttgtcccctcccttttatagtccaaggaggggctcacattattacaaatatactctttgtcttgtcttatcagccgtcttgtcgttgtcggctagttctctaacacaatcttcaagaaacccattgagatttgaaacctgcattatattaccccgggtacctgggcttctgttcgacacagctgggttgcgacaactagcccaccacgtggcaagtggtgggcctggaggaacccgggctgcctgaaacagcgccacggttcctcttctgcccgtttggccaaattaggtggtgtgaggcatgttcgacacgcatcaaagacgccaccagttctaatgactcagcgctggtatcttgtccacgtcctttcagctccagactggctggggctccccataaacatgtttcatttatggtggagaggtccacttcacaacagtccatggagtgcgcccatctccccagccggtcctgatgttgcgcccttgcgctttttgtgatgataattcatctattcttaggcgagcttctcgaagatgtcgttgatcagtagataatgtgcttattttgtatgtttagacgctcttctttgcagatgaacttggaaactataaggactaaggtgagctcggggcccaggacaaggccgggcctaaggcagacctgagtctacttcttaagatgtagatcttgtatgtctctacgctcctcttattgagtagcataggacttacaaagactaaggtgagttcgggacccaggacaagaccaggtctgaggcaaaccttaggttacattcctcttcatagagcagtgtgtaacctagacgtgctaaggtgaacctgggacccgagacaggactgggtttgaggcaaaccttaggctacattcttatccccgaagacaaacaaaggactcaccaaggtggggcccctagccctatcaccctaggagtagctttttatttttaagaatgatttaagcatgtcatttattttacttctaactattttgttagagaaatgggtaccttggtttccatttcactgaaagtagcccccagcctcgggctgggctagagagatgaacgaggccgggcctggggcttctctccgaaggaaaaccgaagtcaaggtctcgggtccaacttgtcagggttcaacgagcgtgacaacactctgtcatgtcgcacgtctcatcattctgtgggtcagctgcgggagttaagccacgttcacacgccgccttaacttcccactaccatcccgtttttcgaggcgtcgtgggcgtggagaccgaaatgtctactcggggtttcttcttttaaaacctccctttcatccccattcgatctttccacgccctagcgctcttaccctcgattcaatcttgccgccaccgatcttcactaactccggtcatctttccccgccaccttctttctctccttttgcctgcaccatgctgttgtccaaccgcaacacactgtcggtgccggttgaatagaaaactaagtccatttgaaaatcattaaaatagttagaaataagtagaatgcattaaatatatgtttggaacttttaattttttaaaataattaaaataaggataatacatggaaaattatatttacaattattcgagacatataaaatttatatataattaaccatatctccgattaagtccatttaaaactcattaaaatcgttagaaatcagaagaatacattaaaaatgtgtaccatcggtttttagtttaattttgatgttttaaattattatatgattatttaatttttttcactttcgtggacttcctttacatttgttatcttctgatgtagatgaatcggcaatggatgttgtcatggttatggataccacatacttaatagtagttgactaaacttgccagggcccaccgcataccatgtcttatacggaaacaaacctcgtatatagaaggagttccggataatgaaggataaatagagttctatatggaaacggcaaggactactcggattgtatccatatttatctccctagtcttacttggacaagagggcatatatgagtataaatacaagccccccaggaggagaggggtcacgccacaacgcctcaaagccacaagccaacacacgtcgccagatatcaacatcagatataagtctagacataccccatccgactcctacggaggctggcaagagggatctagcaccatctctgatctcgccgagtacggattcgaggaggaagactaccctgttgtcgactacgggttggttatctagccgcctagtcgacgacggctagatgagttatcccaattattgtacttgtgtgattcagatgaataaaggagcaacaccagctgcggccaacaggatgtagggctattacctgtcagataaggggcccaaacctgtataaaaatccctgtctccatctcttttacctcaatctggcatataccctggtaccaacgatccccataccatctaaataacgtagtcgcaatatcaaacgttaacagtggcgtgctaggtagggggattttggtgcttcaaggttttgacgagatgggttcgagggatggattctccgacaacaaaatactcgatgacttcggctataggaagatctaacccgaccggagtatgtcccccgcagagatcaatgacttgaccaggaagcctccgttcgagtcgactgcccgggaagtgacatcgtcaattaattttgattctgttgggacctggattatcctcacccctaacacatagtgagaacgtccatcccgacaagtcgtggcgaggagaccgaatacatcattattcaagaccatcacgtactatttgctcctgacatgtgcacctacatatgcatggactcaatacatgcctaggtgtgcattgatttgacgacatgtacatgcacagaagacaattcagatcggctaccaaggctaattaaggtaattagtagattaattaaattgatctactaattccgtagatatattcggcatgtatctacaaaggtacgcaatattttatatacaatttatcgtacctattttccgatctatacaatattgttagataaataatttattatgtttacctagagcatgttttctatacaatatttattgtgcaagtgtttccggtgttaggccgactacggtttaatgctgggggctcgctctattttcttctgtataaatcatgtttgtttatggtttacataatgtccgatatttaatctgttcattatatcctgataatactagaagatccatgcagtcttttgagtatatactcgatattctctgctatacatcttgtcttctagaaaatatttttcaggaacgattgagcactcgagtaggatgtggtcgagtacaccgcattatcgagaacattctcgaaaaatgttgagttgtcgcacccaacctaccaacgaatattgacaacttatctcatgtatagcatcggctacagctagactatttgagaaaatgttgttaatggataattcctcgcgaacattgtcggcttgatcacccgacatgattgcgaatagacatccggatatgctatatgttgggtatgtgagtcatactggccacatgagatgcacatgtaatcaccaactctagcgcctctccaggtgatcgagatacgcctacacctagtcctcgaccagtagatcgtagtgatctctcactacctaaaaattcgttcgagacacgtctacacctagtccttggctagtagatcatagcgatctctcaccacctaaaaatttatcttcaggtgatcgagatatgcctacccctggtccttgactagtcggttgagcaatctctcgacatctaacgcgacaatcaacattgtcgtgatagcgacaaccaagaccgactagatcatcgttgtcaccaggacgacaacgtccaggactaacgacatcaggacgacatcagacaaggttaacgacatcatgacatcacacgacgacgacgaaactcgagatccccagacttctagagggcccgaggatgaggtagtaggtataggagccgaacctccgactacgataattcctcattgtcttcgtcttcatcaagaggctattctcgcagttcacgagaatgtcgtccatatattactctggattccttacaaatggtcgaggtaccactacgattggtcttcaatcgacaacgtagcgatcctcgtaccacaacttccactggttgaggtacgactacgactggttttcagccagcaacgtagcaatcctcgcaccacgacttctaatggtcgaggtacgactacgaatggttttccaccagcagcgtagcggtcctcgtatcatgacttccaaaggtcgagttacgacttcgactggtcctcgaccagtagcgtagcagtcctcgcacctcaatttcaaacagttgagagactcctactcctggttctcgaactagtaggtcgtagtgatctctcatacctccacttcaagtggtcgagttatgactacaactggtcttctgccagcgatgtagcgattctgccactacctatgcgatttgttgtgcacaactatacagttggtctttgcccagtgtggtggtcgtctgatcatctacgtcaaatttatgtaagtgcttgtatgtgcaatatttgtccagagatccattaccacgataacacctattgaccctttacgccgttccgacaagcctccaagagacctacgagaatttcagctagggacgcccatagtggataaggtcttgtcagactctgagagccgaacgaccatgtaagacctggtcatgtaagagtgctcaaaaggtgtattaactaagccgtgtaatcagaaattgatttttccaacttcacggctgggggctaggtaaatcgcattttcagctaggcaagttacaggtcgttgagccttctcctccgagaacgtgcttcttcgaggacaaggctgggggctaggaggagtaccgaactccgtttgctgagggcaactctagcgagagtactcttttattgtcaaacgcagattcaatttattttcaatttttcatacatattatatcatgttaccctttgagcgttcgcttcggggctatttctatttaatattctgttctgagtattgatttcaggaaagtaagccatcagaatagtcaagtcagattttcaaggctttgtcgctgaatttacaccttcttgattactcaagaacgattgatggagctcgacaaggaatatggaatgaagcgatggtgtacccgccgagatgaaatttcttgacttcaatccaaattctcgattacagcaagacgggagacttagtcgcatgatccataccttctcggtcaacatcaggacctagacaaacccagtatggtgcctgcggaggctgataaggggtatctagcattatctctgatctcaccgagaacggtcaaatgagcacgacaatagtttttcaaagtcttcggtcgagaacatgaacatgttcatttgcattgaagtcaggggctactgtcgtggttacctaatagtagttgactaaactcgctagggcctaccacataccatgtcttatacggaaacaaacctcgtatatagaaggagttccggataaggaaggttaaatagagttctatatgaaaacgacaaggactagtcgtattgtatccatatttatctctgaaagtgcatctaggcccctaatgattttggtgattaattacaatgcgattagaaaggactaacatttttatttaagcaaatgtgaaggttgttatgtcctcaatgagttagcgtaatacatatcccgccgaatatgttgatgtgatgtgatgcggcaaatgagcaaatggtattttgtacgttttcgtttccttgagttaataggaaagccgcactattaagagggatgacgcattgacatacgaggagtgatcaaagtgctcaaaatctatttttaaaaagtgtttctcctcagtttggtgtgttctggatttttttggagttttccgaaactcattttcagactttccgaaaacacacaaaaccagatttttgcttctggaaattttcggatatgtccgaaagtgattttcggactttccaaaaatgactgcgagggcaaaagtggttttgtatattttcggacttgtccgaaactgatttttggattttccgaaaatcatcagtagagtcaatttcgcttctgtatattttcggacttgtccgaaagttattttcggacttttccaagaacatccagaacgatgttgttggtactggaaattttcggacttgtccgaaaagttttcgaaatgtccgaaaaatccttcgttgactttgctgttggtgctgagctggaattttcggacatgtccgaaaatctttcggaatatccgaaaatctcaattattgtgcataacgggcagaatctgggctgtggctataaatagccccctcccctcacttgtgagggctgctggttccattccaatcatttgtgcccttggcttgctctctctcactagcacttttgagccttactttcttgtttcccctctcactggtgttcgatttggatttggtgtgtgtgtgagagttgtggattcgagtttgtgtgagtgcttattgttgacttcgtgaagatttgtgagcacttgcatcatctccaggagttttttgcttcatttgttactcttggaggttgaggactcctaggcggctaggtgtcgctcccgagccaccgatctacttgtggttggccgggagaagtttgtgaaggtcagatctcacctccgaataggaagagatacccttagtggaaggaggagtgcttagtgcaatctcttgaggaaagggttagctaagacccggctcttagtgagctcctcaacggagagtagaatcccctcaaggattcaaacttcgagaacaacctcgtgagcttcatctttggtgactttacttcctacctctccactagctttgcttgttcgagccactataggtctagttgctgtttgtgctagcatattcttgttgtaggcaactatttctaggatttactttgctatttgtgctgactccaaaaattttcggatatatccaaaaatttcggaaatatccgaaaattactgcttccacttttaattgatttttgaattagcctattcacccctcctctaggcctaattgacactttcaattggtatcagagcctaatctcctaattaggcttaaccgcttggagagatcatgtcgggccaagcgggggatgggaacgatggtggtaagggagctaatatcccttatgactatccctctacatctatatcttatgtgagtacctatagcggcaaagctccgtacttcaatggtacggactatgccgcttggaagcataagatgaagatgcatttgaagtctattaacccatctatttggagaatagtcgaaaaaggctatgttttgtagaatcccgaagatcccaccaaggaggacgacgagaacaagcacaagaacgctcaagccgctaatgcaatacttagcgccttgagtggaagtgagttcaaccgtgtgatggcattgagagtgccaaagtgatttgggacacgcttcggaacttgcatgaaggcacggatagtgttcgtgagtccaagatggagatcctcaaggggcaatttgagagatttgtgatgttagatggtgagagcccaagcgacatgtacgaccggttgagcaagatcgtcaatgagatcaagggacttggctccaaggacatgaccgatgaggttgtggtcaagaagatggttcgagcaatcactccaaggaactttaccttggtgaccatcattcgtgagcgtccggactacaagactctcacacctcatgatttgctcggacgcatccttgcccatgacatgctcgtgcaagagtccaaggatgtcattcaatacatcaaccaaagctcaaccgcaagcatcaagaaggaagacttggctttgaaggcaaaggaagaagaagaagagaaccgcaagagcaagagcaaggcggagatcgatgatgaagagatggctctcttcgtcaagaagttcggcaaattcatgaggcgaagcggcttcttcaagggaggatcttccaagcactactctaacaagtcaagtggaagacactctgcaagagtgtgctacgtgtgcaaagagcccgggcacttcattgcggattgcccccacctcaaggatggttcccacatcaaggaagataagaagaaggatgagaagaaggagaagcacaagcatagcaagagcgaacattatggccaagctcaccttgggatgatctttggctccgactccaagtcaagctcaagtgatgaagaaggagttgccacgttcgccgtcaagccctcatcaccaccgagactcttcaactactcaagtgatgagaatgctaaggtaccttctcctcttaagtcatttaatgttgatcttgttagtgatgaggaggatgaggttgaggatgaggttatggatgacgaattgttcaagtccataactaaggaatccctaccacacttgagtgagttgcttgggagaattgaggaccaatatgtaactcttgagaggcaagagactttgctcattcatgagaaagagcggtctcatgaactcaagagtgagcttgctaaggagagagagaaaaatgaggcattggtacggctttacaagcaaaccaaagagtctcatgctaatcttgaggtggcgaacgctcaacttcaagagagagtggatggcttggacaaagcatacctcactcttgaagagaagttcaaaaccttaaagaatagtgtctctctccctagcgagccatcttgttctaaaattgtcccaagcaatgaaccatgtgtgagatgcaaagatattgatattgaagcttgtgctactaactctatttccttgagtgctttgcaaaagcaaaatgagaagcttatgggactccttcacaatggcttacttaagtgccatatggatagtaaggccctaaaggagtacctaggctatcaaagggacaacttctaccatcagggtcttgggtatgttcctccaccaaaagaaaaggtggacaagagtgtgctgatcaggaggccccaaggtcttagcaattttgttaaggccaaaagtatccttcctaatgattatgcttcacattgttcttttgatgcatcttatgttcttaggaagaatgctagttgtcgtgttgttgctaagtatgtaggcccaaggggcaagaatatttctatcaagagagtactttgggtgcctaagacacttgttactaacatgagaggacccaagcaagtatgggtacctaaaattagaaattgatctcttgtaggaatatgtctccggtggaagaagttgggtgattgataatggatgcacaaatcacatgatcggagaagaatcaatgttttcaactcttgatccaaatggcacttaacaagataacatagttttcggggacgatggaaagggaaaggttatgggattgggtaagattgcaatctctaatgatctttccattgccaacgttctcttggtaaaatctctaaactacaatcttttgtccgtttctcaattatgttctatgggttacaattgtctttttaccgatgttgatgtgaccgtctatagaaggaatgattcctcggtagtctttaaggatgtcctcaagggaaagctttaccttgtagatttttcctcaagtaaagccaaacatgagacatgcttagtggctaagtccaatacggggtggctttggcatcggaggctagcccatgttggtatgaggaatcttcacaagcttctaaagcacgatcacatccttggacaaacaaatgttcaatttgagaaagatagggtgtgtagcgcatatcaagccggcaaacaaattggagcacatcaccccgtcaagaatgtgatgaccactacaagaccattggagcttctccacatggacctcttcggaccaattgcttatctaagcattggaggtaacaaatatggtcttgttattgttgatgacttttcacgcttcacgtgggtgttctttttgcatgacaagagtgagacacaagctatcttcaagaagtttgcaagaagagcacaaaacgagttcgacctcaagatcaagaacattcgaagcgacaacggcaaggaatttaagaacacgtgcatcgagagtttccttgatgaagaaggaatcaagcacgagttctcggctccatattcacctcaataaaatggagtagccgagaggaagaataggactctcattgagatggcgaggaccatgttggatgagtacaagacatcggacggtttttgggccgaagccgtcaacaccgcatgccatgccatcaactgcctttatcttcaccgccttcttaagaagactccctatgagcttcttaccggtaacaaaccaaatgtctcttactttcgtgttttcggtagtaagtgttacattcttaataagaaggctagatcctctaagttcgctcctaaagtggatgagggattcttgcttgggtatgggtcaaatgaatgcgcttaccgcgttttcaacaaaacctccggtattgttgagatcgcgcgtgatgtgacatttgaagaaactaatggctctcaagtagagcaagttgattctcatgtgttaggtgaagaggaggatccgagcgaagcaatcaaaagattggctcttggggacgtacgtcctagggagccacaacaaggagtctcttcctcaacacaagtggagccacctacatcaacccaagccaacgatccctctatctcaagcttggatcaaggtgaagaaggtgagcaagtgccaccctcaccgatcaacttagctcgcccaagaatccaccaaagtatccaaagagatcatcccaccgacaacatcttaggagacatcaacaagggagtatccactcgttctcgtattgcaaatttttgtgagcattactcgtttgtgtcttctcttgaacctctaagggtggaagaagctcttaatgatccggattgggtgatggcgatgcaagaggagttgaataatttcacccagaatgaagtgtggaatttggtggagcgagctcggcaaaatgtgattggcacaaagtggatcttccgcaacaagcaagacgaggccggggtcgtaataaggaacaaggcgaggttagtggcgcaagggttcacccaaatcgaaggattagatttcggtgaaacttttgcaccggtagctagacttgagtcgattcgcatattgcttgcttttgttactaacctcaattttaagctatatcaaatggatgtcaaaagcaccttcctcaacgggcctatgaacgagttggtatacgtggagcaaccaccgggcttcgaggatccgaagtatcctaaccgcgtgtacaagctccacaaggcactctacgggcttaagcaagcccctagagcttggtatgagtgtcttcgcaattttcttgtgaaaaacgactttgaaatcgggaaagccgattcaaccctttttactaaaagacatgataatgatatttttgtgtgctaaatatatgtcgatgacattatatttggttctactaacaagtcttttagtgaagagtttagtaggatgatgaccaaacgttttgagatgtccatgatgggtgaattgaagttcttcctcgtccttcaaatcaagcaactcaaggaaggaacttttatttgccaaacaaagtatttgaaggacatgcttaagaagtttggaatggagaacgccaagccaatccacactcccatgccatcaaatggccacctcgacttcaacgagcaaggtaaagacgtcgatcaaaaagtataccgttccatcattggctcacttctttacctttgtgcatctaggcccgatattatgcttagtgtgtgcatgtgtgcaagatttcaagccgctccgaaggagtgtcaccttgtggccatgaagagaattcttagatatttagtgcacacacctaaccttggtctttggtatcctaagggagcgaggtttgatctcattggctatgccaatgtggattatgccggatgcaaagtggataggaaaagcacatcgggtacttgccaattcttgggtaggtcccttgtttcttggtcttccaagaagcaaaactccgtcgtcctatccaccaccgaagcggaatatgtttcggcggggagttgttgtgctcaacttctttggatgaagcaaacattgagagactatggcctcaatgtatccaaaatcccactcctatgtgacaatgagagtgccattaagatagccaacaaccccattcaacactctcgaaccaaacatatcgatattcgccaccatttcttgagagatcattccataagaggcgacatagacatccaacatgtgagaaccgacaaacaattggcggatatctttaccaagcctctagatgaagctaggttttgtgagttgaggagtgaactaaatattttggattctcggaatatggcttgatcaattgcatgcatgtttgcttggtagaataggtttgcataccactttgtgacaaaatggtcattcaattcatggatggacactagtcacttttttgtgtggagattttgaatctatgtgtatggggatctcatttttcaatgaatttaggtcctagcacaacttgaaatagattcacacattccctctctcgagggtgaattatcttgtctcatggtaattccctctcttttgatcccttggatcgtccatttgacttgtggctattgttttgtgtgattgattgtgtgctagtcacaagttcaaatggagcctctagtgctcgtccatcccttccttcctaaatcctatcacaaatccttgtaaaaattgtttttatcaaaatttccggtgcttgtcccttgcaaaattcctttaaaatgtttgaaaaatagtttcatcaaaattctcggcgaaatctcattgcaaaactgtgttttccaggaattttcggactttccgaaaaattttcggacattctgaaaatctctgtcctgtcgctctttcaattgctgcaatcccaggattttttggactttccgaaaaaaattttggacatatccgaaaaacatcagaaccgtgcgcaactcttctgtatcctttcggacatatccgaaaatttttggaaatatccgaaaatctcggggttcttatatatcaccccgtggactcccttctctctcctttccacttcttttccccacgggttgactccctcctccctccccccggcgacctcctcctctccggcgacctcccgcgactcccctcctctccaacctcgagggagcacgtttggggcacttcttgggccctacattgtcgatcttcatcgcattcttcacgtgttcttcgtgttcttgaggtatttgccctaaaatcaaatccctagattcctcaagttttatcttgcgatttcctttggtggagatgttcccctagtgccataggccctgcaaattcaatttcacaagtttttgttggcggatttgtgcggcatctgagttatagggttcggccagaatttttcggacttgtccaaaaattgtcggatatattcgaaaattcctggccgacccctatcacttcggatttgcatgattcttgccctcactcacttgtttcttgcctctttggcttccatacttgattccttgtatctctattgcttgaaggatgcctccccgcaagcaaacctcccacaagtccaagcgcccgagggatcgctctcccactccatcctctcatgatgattcggacagtgattggtccggtggagaagatgcggttcctcaggttgcgtgggtggctcggcggtctactcaagctcatggtggtggtggcgatggtgagggctcctctcgtcaaccgcaaacgccgccgcaccaacccaatgtccccattgggcctctccgcattcatacccccgagagggatccggcggtgattcaccaagtgtatgattggtggcgcaagtctgaggttgttgctcctcgtcgggatgaggatctgcgctcctttcgccgcaccgccacggatctgcggttttggaccctttttcagcaagacttttatgagtctgtgattaagtccaaaactcatcccactgttcccatgcaatggatcaattgggaggagttgcaggcacacaatgatccagtgattgactctgtgattgccaattgtgatctcatgggtatccgctccttcatgacgttgcagcaaaattggtgcaacgaggtcattgctcagttttatgccaccgtctactttgatcgttatcgtgccatgcactggatgactcaggggtcctggtattctgtttcttatcagcagttggctgagatctggggcttccgtcttcgttctttgctcaaccttgatgaccttcataatcttcaaattcttgccaacacagaattgcttcccctttatactccaaatgatccaaatgtggtgttgggcaaggtcgacggcctcaagccgtactttgcctacttgaaccggatgtttcgccggtcttttgtgcctaaggatggtgatgccagcagcattaaccacctctctaggaccgtgcttctccggtttgatccccctcctcatcgcttccatgtctatcactttgtgtgggaggagatccgcatggcttcaattcagtacaagaaggggttggtctatgcccctcacattatgtggatgatcgagactgtgactcagctccagtttcgccatgatgtgactcattctcagcttcagttgcgccttcttaaggccccccgctcctcagctgctcgggacataccctcctcttccactcagccgcctcctgctcctgagcgccctgcctctgtggctcgtcgtgagccgtctcccttattccgcattttgcggagtctttttggtctttgctccacggaggccaaaaagaaccaccgattgcggaattcggcaaagaaaacggctcgtgatgtcaagttcctcaaggcaaggtattatgaggaccaccacattgatatccctccttctcctccaggtttcgaggccgagcccgatgagccagaggatgaagagattgaggatccttttgccgggttgccttccgacttcgacttctttggatatggccatggctatggctatcctcctccacgcccttcgcttgagtcgtcatctcatcgtcctctctttttggtgtcttgatgccaaagagggagactatctatcatggctttagattatctatcttgtccttagagtcgagcacagttggtttttatctgtatgagactgttgtggttttttatgttaagtttaaagctttgtaagactattgtttaattatgaatgcttgtgatgtaatggatctttttatcttttaatgtggtgcaatgtcacatcctgatttttgtttcaggatttataaattatttaataaattaataatagaatttatattaaatgatctttaatttacaagtgaagttaaatgtgggaaataaaatttcctaaatctaaggcatggatggatttaatttttattaaattctccatgattaagtatactctctgaaattttctcggatttttcagagctcaattcctaaatgatacaaagaacagttcagtaattatttgatcaataatgatctaattataattgttaagtgcttttcttgtttaaaatccttaaattataaattgttgtttaaaaggaattattagaaatgattttaaaagcttaaaagagaagatctaattttaatttgttaaatctcaatataaaatggggccagataaaatttcattaaatacttcgcttaattctataattcctagatttttctgggatttatttgagctaaggaagtatttttaataaatggaattgcatttcatgaataatttaaatagaaaaaggttttaaaatcctccttttggctttgggccgaaagccggcccaaaacctctctccttctctctctctttctcggcccaagccagcccagtccgcaaccgagccgccgctcttctctctctctcccactgacaggtgggccctacctgtcaggcctgtcttcctcctcgcgccgccaccgccgcccgaaaccctagcgcaagcagccgccgtctccttccaaattcggccgcgtctttcccgatctggtgaaatcaatagaggggaaatgatcttctcgatctcctcttccttttctcttatagaaactccggtcaatttcctttggaaataggcggattcgagtttgattcggattcgtttttccccaatctttccttctcgtcgccggccgccgtgggccttcgccgccgcctccttgcacctataaaaggacccccggtgtctcctctacccaccgccacctttgccttagcccgccgtcgtgtctagcgccgcctccgcgtagccctagtcgccgccgtcgttgccgtcggttcagccgcgccgcgccgccgttgcagccgccgtcgtcggtcgccgtcgccaccatcgggatcgccaagtcgtcgccgtcctcatccgccccttcgccgccgccgaagaccaccggagcaccgtcgccgccatcgacccgatcttcgccgccgcttcttcctcgtcgccggcgctgtccgttgttcctccgccgcttcttttggtcaccggtgagttcgccgcgtcgccctctacccgttggtgtcctctgttcgcgtcctcgcgccgtcgttcgccggcgagcttgcgccgtccgagccgcccgagtcaccgccggtgctgacgtcgtcgctgacgtcatcgtcgtcgttctctgtgagccggtcgtggaccgttcgatctcggccgtccgttttggatcaagtcgatctcggccgtccgttcccgtgagccgtcgctcgtgcgcccggtccaccgaaaccctagccgctgacgcaataaatctcttttccttttcaaaattaattcattattgcgtcataattcaattaaaatcaatataagtgtttttaatccgatttaatctttaaaaattcataactaattcatcttagctcagtttaatgtggttcaagttgcaaaagttgtataaaataaagatctacgtattaaaattgtccataaattgaattaaatttatttaattctttttaaatgggctttaattagatttaatcttgtaaaattcataataaattcatttgaagtcagaatgaggccgttcaagtctcataattcatctaaaattataatctacatgtttgtttactttttatgtattgtttatttggtttttattagtctttttcctcgttttgcgtgatagcttgtcgtttccgtcgttgcgaaggttcgcgagtgcgccggaagtattcaagaagattaattgaagaccgattattgcaaggcaagtcacacagatcctaaacacaatcctttgagcatgttgatcctatatttaaattctctatttatttcaactgtgcatttattttcaaatgtcaccgggtggtgtgaacttattcctttgttatggccaatttgcattgattactttattccttgataccttgggttattataacttgactagttgagctttatatattggttcagctagatattagatatgattgcttagccatgcttagaaacattagcacattattgggataacttatgactcattattatttaatgatggcttaatgatagttcacgatggtcaatcgtgattggttaattaattacttgccaactaaaacttgataatggtgggttgtgagcacatggttttgagagtcgtgctcatgacaattaaggaccggttcgcgagctactattgtgaaacattaatcgtgccaaccacaagccagcgtgggcaacggctttacatttcgtatagcatggttcattgcagagcaccagactgagaagtggcggagataagcccacgggggtcgctggggagtccatgcctctggtttttgagggggtgattatgatccaggaaaggtgcactgtggtgggttgtgttatgcgaggggtactgtcacagctcctttccgaggtaccgtggtggtattgaggcgcatggtgacatgtcgtggggctgtgtcttgtgggtacagtggtacacctctggccagagtaaaactattcggatagctgtgcccgcggttatgggcgggttgagcaatgtttttcgtgattagtctcacacctctcacaataattattgatgttatgactggtaataatttgcttagctcctggtttggagattagatctgtacagccgggtatggttgttcaggatggtcgggcctgtgcagcatgggtgtgctgttcagtgttgattaaaatttctgattaactactctactgttttatttctcttaaatattttgctaaacgctgcttttgcaaatgagcctatattatgccatcctttggtatccttgtgcacttgcatatttgctatgtggcttgctgagtatgtcatatgctcaccttgcaataatcaatcaacctcagttgaagaaaaaggatccagaaggagaagacgtttggcttataccccagttgagctgcctgtgggagtggagctggagcttcgctagattttattttccgctgcaattttcttcttggtgaggactaagtgcctcttaagtaagtatttattgttttagttaatttgatgaatctgtatattaaattgtcagtttgtgtacctcggctgattcctggacgaggattttatgcacaaataagttcggaaattactagtaaatttccgggcgtgacatgcaatgccttatcctctttatatggtgcttgtgatgagatgtaattattcctttgcatgtgatgtgttggatgtaatgagcatatgtgatatatttgttctcttgtgagcttcaatgtggatgcaataatttagggggagctctccacttgcttttatgcacactcttagggggagcttccactaaaactttgcaccaaaaaccttaaattatattcattctctcttgtgttctaatcatattgtcatcaatcaccaaaaagggggagattgaaagtgcatctaggcccctaatgattttggtgattaattataatgcgattagagaggactaacatttttatttaagcaaatgtgaaggttgttatgtcctcaatgagttagcgtaatgcatatcccgccgaatacgttgatgtgatgtgatgcggcaaatgagcaaatggtattttgtacgttttcatttccttgagttaataggaaagccgcactattaagagggatgatgcattgacatacgaggagtgatcaaagtgctcaaaatctatttttaaaaagtgtttctcctcagtttggtgtgttctgaattttttcggagttttccgaaactcattttcggactttccaaaaacacacagaaccagattttcgcttctggaaattttcggatatgtccgaaagtgattttcggactttccgaaaatgactgcgaaggcaaaagtggttctgtatattttcggacttgtctgaaactgattttcggattttccaaaaatcatcagtagagtcaatttcgcttatgtatatttttggacttttccgagaacatccagaacgatgttgttggtactggaaattttccgacttgtccgaaaagttttcggaatgtccgaaaaatccttcgttgactttgctgttggtgctgagctagaattttcggacatgtccgaaaatctttcggaatatccgaaaatctcaattattgtgcataacgggcaaaatctgggctgtggctataaatagccccctcccctcacttgtgagggctgctggttccattccaatcatttgtgcccttggcttgctctctctcactagcacttttgagccttgctttcttgtttcccctctcaccgatgtttgatttggatttggtgtgtgtgtgagagttgtggattcgagtttgtgtgagtgcttgttgttgacttcgtgaagatttgtgagcacttgcatcatctccgggagttctttgcttcatttgttactcttggaggttgaggacacctaggcggctaggtgttgctcccgagccaccgatctacttgtggttggccgggagaagtttgtgaaggtctatctcacctccgaataggaagagatacccttagtggaaggaggagtgcttagtgcaatctcttgaggaaagggttagctaagacccggctcttagtgagctcctcaacggagagtagaatcccctcaaggattcgaacttcgggaacaacctcgtgagcttcatctttggtgactttacttcctccctctccactagctttgcttgttcaagccgctataggtctagttgctgtttgtgctagcatattcttgttgtaggcaactagatctaggatttactttgcaatttgtgctaactccgaaaattttcggatatatccgaaaatttcggaaatatccgaaaattactgcttccgcttttaattgatttttgaattagcctattcaccccccctctaggcctaattgacactttcaatctccctagtcttacttggacaagggggcatatatgagtataaatacaagcccccctaggaggagaggggacacgccacaacgccagaaagccacaagccaacacacgtcgccagatatcaacatcagagataagtctagacatacaccatccggctcctatggaggctggcaagagggatctagcaccatctctgatctcgccgagtacggattcgaggaggaagactactctgtcgtcgactacgggttggttatctagccgcctagtcgacgacgtctagatgagttatcccaattattgtacttgtgtgattcagatgaataaaggagcaacaccagctgcggccaacaggatgtagggctattacctgtcatataatgggcccgaacctatatagaaatccctgtctccatctcttttacctcaatctcgcatataccctggtaccaacgatccccataccatctaaataacgtagtcgcgatatcaaacgtcgacagatgtacaccgcagaccgacggtctaaggagtttattgatggcgtgcattattttttaagtgtggccaatgcccataagcctaagagttttatattttgtctatgcagaaagtgtgaaaactagaaggtgtattctacatcaagaactcttcatatctacttgttgcagtcgggattcatgcctagctataattgttggaccttgcatggagagttaggggttgcaatggaagaagatgaagaagacgacgataacattccggactgggctcaatacgatggatttgcagaaaatacaaatgggcgaggtggacaaagctattgaagaaaacgacagtgtggattatcaaatcctaaagaatattctttctgagggaaacgacttgctcgaaacaacatacaaagataagaaggtagtctgcgctctaggactggaagtctagaagatacacgcatgtccgaacaattgtatcgtctatcgcggtgaggagtacgagaacctagaagcatgcccagtttgtaaggcactattatacaagattagacgagatgaccctggtgatgttgatgggaagcctgaagaagagggttccttctaagatgatgtggtatttccctataataccatggttgaggcgtttgttcaagtacaaagctcatgctagaatgatttgttgtcacgtagaagaacgtaaacatgacgggatgctgagacaccctgttgatggtcgtagtggtgaaacatcgatagaacatttaaagactacggaaaggatgcacagaacataaggtttggtttaagtacagatggcatgaatcattggagagatgagcagcggtagtagcacttggcctgtgaccatgtgtatctatgacctccccccttggttatgcatgaagtggaagtacatcatgatgctgattattactcaagaactagagcaacctggtaacgacattgatgtgtacttaagatcattggttgaagatctgaaacttttatggaagaaagaaggtgccatgtgtgggaggagaacaaacaagagcaatttaacctacgagcgttgtagttcatcaccattaacaattgccctacacttaacgacctatctagataatcaaacaaggggtataacgaaagaaaggcaaacattttgaagagaaggcagaccaccgtactaacctaaacatcataatggaaaaaccatgtttgctaaagatctgaaagtaatatttggaaagggacccgatagccaacctatagctagtgaatatgttcacgtggtgatgtggaagactaagtctatttttttcgggagttaccctattgggaagccttagaggtccgccaagcaatcgacatgatacactttactaagaacccgtgcatcaacctaccgggcttcctaggtgtatgtgagaagtcaaaaaatacacttgaagcatgtaataatctcaagcatatgaaacaacgtgacggccttcgtctgaagccaaggagaaaggaagccattgcttgagtccagccaactactctctgaggaaggcaaagaaggaaagcatgtttgtttcctgtgagagaatgtaagcagcttacgagttctcatagcatatgaacggagagaatagagtgtaaa

SEQ ID NO: 5066 - DNA, 3951 bp, Oryza sativa
gggcgatataaccatatcggccattgtacatcggcaaaccacagccgattacaatacgaaaaacagctaagggcaatataaccatatcagccatctcaaggcgatgtaaacacatcggctatcatatatcaacaacatcagccgatcatgcattaacccaaacacttgggtaatatttcttcaaatacttgccatttagcgctcgtccataaacctctccatcgagtccttgcaacatgtaagctcctttagacaccactttatgaatttggaatggtccttcccaattcggcgaccacatgccgaatttgctatcccgagtcccaatcggcaaaatcaacttccatacaagttcaccttcggaaaaatctttaggtactaccttcttgttgtaatgccgagcaacccgttctttatccttggtaacctttgcgagggctcttaatctagactaaaccaagtcctccctttcatcggccataaggttacaatactcatcagctgttaaattatcttgcagctcagttctgcttgagccgattctaacctcgcatggcaaaacagcttcatgtccataaacaagcttataaggagggacttggatcgatccatgacaagccatccgataagaccacaacgcttcagccaaccgagtatgccgttgccgaggataatcagaaatctttcttttaatcagtttgttcaaactcttgttagatgcctcagcttgcccattagcttgtgcataatatggcgaagaattcaacaatttgacacccatgctgtcggcaaactgaacaaactcatcggatacaaaaattgaaccctgatcggttgtaatggtttgagggataccaaatcgatagattatatgttcttgaataaaatgtatcgcatccccagaatcaaccttcttcaagggaatcgcctctacccatttggtgaaataatcggtcgccaccaatataaacttatctcctttactcgatggaggattaatcattccgatcatatcaataccccatggtttaatgataggattcatagccgacgccggtgcttgctgaattgctccaaatttctagcagtcttgacaccctttgtaatatctgaaataatcttccagcattgtcggccaaaaataccctgaacgccaaagtaaccacttcatcttatgaggcgattgatgagtaccataaatcccttcatgaacttcgccgattgcaaccttagcctgatcggcactcaaacacttaagcaacaccccatcaatcgtccgataatagagctcatcatccaataaagtatacttcaacgccttatatcttaatttccgagaagccgattgagatggattctgtaaatattgatgcacatcagacctccaattatcggctgttattgctgcgacctcgaccttaacatctttgatcatcggcttataccccgatgccccctaggccaaatcattagcttcaatattttgttctcgagatacatgcttcaaagataaccaaccgaaattccttcatcaattcttggcacttctcattataaaccattaatgtatcattcttgcactcatattctcctgccaattgacttattgctagcaaagaatcccccatgatttcaatagcatcggcttcaacctccttgagtaactgtaaccctttgagcactgcttcatactcagcttgattattggttgcatacggtttgatagtataagcaaactcaaaattcgcaggggaaataataaccaagccgatgccacaaccatgagtgcacacttacccatcaaagaataaagtccacggtacgatctcaaccgagccgattgaatcatcacgatgctctacaataaaatcggctatagcttgtcctttaatcgcccgactcataccgaagatcaaactcagttaaagaaaatatccactttccaacccttcttttcaaaatcggggccgatagcatgtatttgacaacatcggccttgcatatgacagtgcattcattagactatagataatgccttaaccttgtacatgaaaaatataagcacaagcataacttctccacaggggaatacctagtttctgcatccaagagccgacgacttagataaaacacaactctctctttcccttcaagctcctgaatcaaaaccgagccgattgacttctcaccggccgacagatataaccgaaaaggtacccccttctggggaggaatcaaaactggaggagagctaagatattccttaatatcgtccaacgctttttgttgctctaccccccaagtaaactgttgatcggcattcaatctcaacaatggtgtaaaaggctctaatcttccagacaaattagaaataaaccttctaacaaaatttatcttgccgatcatctcctgtagttctatcttgttcttcggaggctgaatcttcttgattgcattaacactcctttgagttacctcgattcccctatcgtgaacaagaaatcccaaaaactggccagccgatatgccgaaagcacactttgtcgggttcatctttaggccatatttcctggttctctcaaaaaccttccttaaatcggctatgtggtcttctacctctttagactttacaaccacatcatcaatgtagacctgaactaaccagccgatcagatcgtgatatatataattcatggctctttgatatgtagcccaagcactcttcaagccgaaagtcatcacaacccactcaaacgagccgattgcaccaggacgcctaaaagttgtcttatggatatcttcttcagccataaaggtctgattgtatcccgcattaccatccataaaactcaaaattttgtgtcccgaggcagcatcaactagctcataggctactggcattggatattcgtctgtcggggtagccttattcaggtttcggaaatcaatacataccctgatcttgccgtttttcttgataacatgaactatactagaaacccactcagcatatcggcaaggacgaataaaacaagcatcatataatcgttaaatttcagcctttacgggatcaagcatatcagctttgcatcttctcggaggttgttgatgtggtctaacccctggtttgataagtagccgatattcaacaatcaatcggctgaggccaggcatctcataatactcccaagtgaagcaatctctgaattctttgaatagctctatcaacatggttctaaactctggagataaattcttactaataaatgtcggccgtcgtcgatcacctggactgtcgcgaccgggaaaattgccttttcccgaacgctagtgtattaatccccgtcccaggaaaagccggggtacaccatacaaacatgatataaaagacacatctttattacatcgataatatttacattattacaaaggcacttaaggcctgacaatcaaaaataaacagcagcggactagcgggcctacggctccatcttcacaggcgctcaactggggtataagccaggactccacctaagacatcttctccaaagcttctcttactgaaggggggagaaagatagagcaagaatgagtacaaccacagtactcagcaagacacaccggagaatgcatgattaatgcaagggagtacaaggagataataatacaggggttcagttttgcagtaaacagcatttaaaagtcacttagttgctcaaagccattttgtaaagacgatcctagagctacacagtattattaaacaaggccgtgaaccctcacgaacctgccttaacccaaggcctacgatgatttggaccgaactggcaacccgacctgggttccagctcgtcccaagccaacccaggccaaccattccacattttagttgtttgagcaaattttaagaattagaacactgacttgggtacattgctcggcttgcccata

SEQ ID NO: 5067 - DNA, 13519 bp, Oryza sativa
ggtgcgagtgcgactgtgcaagagtggggactggatttggggaggtgatggtggcacggacggctttggttgtctgtgaccgacggatcggacggctcacgcgagggatggttactgctgccctagaaagatgggggatttgtattcccgcccaccaccggaaattgggaatttggagggaaatatttggtttcattaaccctgattcgttttttttatttgtttgtaacgtgcagttgatttattattatatcactgaaacatatacttctcatggataaaatataatttcactccaataaaatttagaatgaaaatttttaaacttctaataggataattatagagtaagatttttatactttaataattttagagcaacataatggatcttaatagttcaattcctgacattgagtgaacaaaggacttaaaaccccttaaaaagtatctaaattttatatttattgcaatttataaactaaaaccaaaactaaaacaaactcatagtatcaactagcacataacaaattaatgtaacttagtatatatttgttcttttaatttctacgtgtttttacatatatgttcctacatctttgtttataaatcatgcaattcatataggtaagtattgatcaaagtataatttgatataaatataatttaaattcctttcatttgatttaaatgctatttgcccattcatctaaattaatataagtataatttaaagccagcatatggaagtagggtgatgtcaagaggagagaagcaacgccgatgcctctgtccaactgaaacaagactaagaatgtgagtatagcaaggcgacatgtcaacgcagttataggagcgagggcaacggatagaggaggccaatatggcatgcaacctatggttttctccacatttcctgaatgaatttgggttgtcttgccgatccaaagacgaaggaaggattagttgtcctaggctaagtggcggtcaaatcgagcccactagcaagatcgaacaatcctcgtgagttagcggcttcatgctattaacagaaagtcgtagaacttctttgcagaatcactgacatcatgtcccattgcctcagcttctcatcgagcctacatggtttagagagattaatatgatggatgaaattgagttctatgataactatggaaggcacaaacaaacgaatttaatactagtaagatgaaaagttaaattttaaataaacctaagaaatatcaatgaaaatagttatcaaagaaatcaaaccatcgaattgactaaatgcgtcgaatttcaagtatttcagaaaaccattgaatttttggaaagtggaatttgaatacaattttctggtttctgagtaaaacaagaacaagtttgaaccgatatcaatcaagatctgacaatttttattaaaaccacggagagaagacgtgcaccattggttttagaaagtgaattagttttatggaaattaaatttccatgtcatactccccaaattttagggcccctttgaatcgtagggtagaaaaaacagaggaatacgaaaaattacaggattctgacagaaattgaagtgtaaaacataggattgcaaaacacaggagaaacacaggaatggtcgtttgattggagcgcaggaaaaacgctggaatcggatgagagagatagactcaaagaaaatttttcaagaggttggagctcttgctaaatttcctacaaaatccacatgcaatgtgccaatccataggaatttaataggatttggaaagctttaatcctttgaatcaaagggccaaataggaaaatttcctataggatttgaatcctatgaaattcctacataaatcctatgattcaaagggtccttaaaaggaagatatgtatagaatccaactatttagaaacattatactttatttttgttttttcagtatgtaattcaatgatttctgcctcaaaagaaaatgctacaatcagcaataaataagttaattaattaattaacagtacaaaaaatactgctcattatatggcgtctgtgtatatcgattggtctgggtgagttttgctatgagtactattttttatattcttctggtttacttttcacccgaggaactgtagcagtaacggaaagtttttcaggccgttgattgacgtgtggccctaagtaccggctggtccgttagttagttggaattaccgggtgtgtgtaccagaacacacgataaacatcagattccgttagattcggccaaaaaaatagcattcgcgccaccgtgaatattttggcgctaacgcatttctgttcgcgccaacgaaaatagcttggctgatggatgtgggccccaagatcccgggtgtaattggtaaatctcctaatgttacgtagtgtttaaaatgaacgctctgtaatgacatcagttacggggtgttcctactatacactccgtagtttactcagtgctagatcaaacatacggtaacattctgctcccacccgggagagtctctcatcctggtagctccctcaagataaagacgaagccgagcggatctccagacgcagcaaactttatgtcatacatgagaccgagctgtacaagaaaagtccatcagggattttgcaacgctgtgtgtctttggaagacggaagacaattgctaagagataaccattcaggcatctgtggcaatcacgctgccgctcgaactgttgttggcaaggcttatcagcagggttttttctggcccacagctgtatccgatacagacaaaattgtgcgaacatgtgaaggttgtcaatttttcgcccgacagactcatctaccggctcaggagttgcaaaccatcctgttattttggccgttcgcggtttgggggcttgacatggttggcccgttcaaaaaggctatcggtggttatactcatctctttgtagctgttgacaaattttccaagtggatcgaagccaaaccagtcatcacaatcacggcagacaaggctagagcttttttcatcaacattgtgcaccggtttggggtacccaatcgaatcatcactgataacggcactcaattcactagcggagtatttcaagatttttgcgaggacttcggcatcaaaatttgttatgcctccgtagcgcaccccatgagcaatggacaagttgaacgtgctaatggtatggtacttcaagggataaaagcacaagtttttgaccgactgcatccctatgctggcaaatgggtagaacagttgccatatgtcctttggtccctgcgcaccacacccagtcgggctacggacagtcaccgtcctttctagtatatggtgcggaagcaatgttgccaagtgaggtagaattcgaatctttgcgatttcgtaatttcagcgaggagcgctatggagaagaccgagtagatgatctcaaccgactggaagaagcccgtgaagcagtgctaattcagtcggctcggtatttacaggggatgcgccgttatcacaatcgcaatgtttgatcacgagctttcttagtcggcgacttggttctgaggaaaattaagactgcacgagatcggcacaagttatctcctttgtgggaaggaccgttcatagtttctgaagttactcgaccaggttcttatcgactcaagcgtgaagacggtactcatatcgacaactattggaatattgaacatcttcgttgtttttatgcttaggcattactttttgtatctttctctttgactgctaacatcaagttcttccttgagttatcagtcgggggctactataataataatggagtgtgatttttatcaattcaatttgcttacttgatttatcattgccttgtttgattttttgacttagtcaatgaggactgaaagtttttaacagcttttgcgggttctaggctcaataaggtttgacaaaaacttttaagaaatcaggagctaagtttaaattatcaagcacagcataaatccatcagtattgtacaaattgtgcctccatcatcatcatcattgtcagaaaacaatatcaatcagtttcagtcttttcatcgtcagagttattagatccagtcggcctgaggtcgttgtcctggaatctctcaacaacatcagcggctatcttgtcagcagctttctacgcatcattaatgagatcaagggcagcttcttcacttgtctcgtctgcaaagccatcgataggatcaatgttgatctttgggtacaaggacttggtcatcgccaacgccagactcgctcccatgcttccagcttccttcatgttcttaaaatatgtttctggagcaattatcggcttgtcgaatattttggcagcatcaaatgaacatggcttggacgagtggtgcagcagcgttggcgacttcatctctagctccctcaagcctcttgattttgttaaccaagacgtcgaattgggcttgggatttgattttgtgatctgcacaagtagattcgcatcagcgagtgggcatgaagatgagagtggtttcttgaagttgcagctgtgagtaccttcgacatctttcagagccgagtccctctgctttgtcagttcgcccttatctttttccagagccttgattcgcctttccagctcggatatcttggcagtttgcactgtattgcttctcattggttagttgcacatggatagcaacacgaaacaagtcagacaaagttgggagttaccttttgatgaaccgctcagctcgaagttggagtcttggagctctgcgatccggtctctcagatcatgctcagtcttcctggcaagctccttggcttcacgcagctggtctttggtggcttccagggttccaagatggggaaccaatttttcgagggtcgcggtcttcgcctgatttctaagatggattctctgtgttgcaagtgcatctttattcagtaaagtggccgacaggatgattgaagctacgtataaagagacttacatttacaagacgagtagcttggccgagtgtctttttcagaagctgatcgtatccgaagaacctcttcttcatcaccgatcattggcccttatacattcatgaataatggcaaagcaattgaagaaagtttgtcggatcaaggaaagatttggaggacatgtttacctgtaataatttccggtcgaggacgagcaggtccttgcaccctaacaggagagttggttccagggccagcaccagcgtccgtcttgggagggctgttggcttgagcttttgcttctggcatatctctattttgttcagtacccgactggtttccagtcgggggctcctgatcagcaccgactccagcttcggccgactagtttctagtcgggggctcgttgctggtatctacattgccggttgccggttgattattacccgggcggtcctcggtagtcggctcagtttctgctgaaggaccattctccgtgccagtcggcatggggtcttttcttgatggatctatgtcagatggtttcctacaaatttgagacatgctatcagctttgcttcaatagtgagtgactagcgaaattgggggaattgctagacgacacatacctggatgacttcctgattttcggcatgggacgactggatgttttcttctttggattggcttgctttggctatttttcagtcatccttttgttgcccgcgtcatcaccttcatcgtcacttgaaaccaacttccccttatgagaatctggctggttagtggacttcgcggtgttgggttggacgtttgactggatcttcggccctccgctggcttggctagtttgccggcgcggtgagcagcgtttagcaattggaggatcggatttcatcaaagcgaattcctgtgcgtggtattccaagttttcagtcgaccttacagaagataaaagcatgctttgagaaaggctgaggtgtatgatacgtaccggtggaggagggttgaaggcattgcatggcatgactggcaataagtgtgaatagctgaccacgatggcattcgagaaaattttgtacattctctcctgcataattttgaattcaagagactctgtgtcttctcggttggggtcatgcttgccgtcgaactcgaaagctgttcgggatccttccttgattggtgccagccggctcttgataaagtgccgagtaatttgctccccttgcaggccctattccttaagcttcagcatgcgatccaacaggtcaagcgcttgggcagcctcttctcccataggaagtgagttcccggtatcgcgatatactggaggaagacaggagtacccaggaagcgctggctcggggttttgcacattgaaccagttcgcgtgccaacctttgttcaaggtcttgaatggcacggagaagtatttttggctctaggtccccctcagttgaaatccggctcccccaactacgcatggtttgcttttattaggctagggcttgaggaagaagatgcgacggaatagagcaaaatgtggcctaatccccagaaaggcctcgcaagcatggatgaaattggcgatgtggactatggagttggggtttaggtcatgcaaactgatcccatagaaatctaaaatcccccggaagaaacttgaggtcggaagggaaaacccgccatagaagaaatgggagaataccaccacctcgtatgtgtcgggggtcggaaacgtttcaccacatgctggacgccacccgatgatctccttcgccggaagaacgccgtgcaccaccatctccttcaggttctcctccgttacatcagagggcacccattgactctcaaagctttctctctcttccgccatggatacgaactggatgatgtgatttggttcgaaatgtggctgggaatggatgggagattgatgcggtggttccgtgggagatttttgtggagttttggtggctggattggagcgaatctatgaaccctagcttcgccggtgtggtctgacactgtagcagagaatggggaaagtggcgagagttttggcggggaagacgaaccgacgctttgcattcggtgttatttcattagggtatcgggagtactaatgggcctgggcctaaacagtacttcagcccaattaggctatcgacgtggctaagttgtgatccttagggacttaggcattttgctttggcaacacttgctcacaacggtatagcccaatgctgttaaaatcctttttgacgcagttagataattatttggaattactacgatgcaaataaaatggtgcccaacggaaaggtgttatactaattttgtaagcctttttaggctgcaaaagctgtttgggttttgttgagatgactagtttttgaatagtcattctctcgacatgttatatgcttattttgatatggtgcgagtcatagcttaggcaatttagactcacctattgtcatgatttataccacatttgatggatcttttttgagagtttttacttggattcttatcatatgtgttggtttatagacctttagagtgtttttcacgcgggactttatatatctcctttcctggggtatcaaagctaaagcagtcagctggatgttttattaacgtcacatatgcttagctatgtgataccatggatgatccggttgtaaaaccactcggttggatgttatttacaccttggttatatccttagtttttaactaaacacatagtcgaggtctacacctaattaggtgtatctaatcgatgcacctgattttctctatttttagcccttcacagtctttgattttggcactcgggagatcaaggcagaagaagtcggagtactcggattatcgtttggattacgggagaagactatttcgtcgactgtaaatgtctcaggggctactgtggagattatggatacctcatacccacacgacatgtatagtccgactgggtatggggtgccatgtgtagatagaatatctttaaagggactcggattaaattccaaacttgtatgttaaggaaatatccgggatcctagtcggttaccattgtaacttatctgtaactacctattccgttagggatatggattgtactttgtaatacggacccctccccctatataaggaggggtccgggtgcctctaagggcacgattttctcccagatcatacgatcaataacatactcggcggatcaatccccggataggagtagagtattacttcttattaagaaggcctgaatctgtataaaattccttgtctctcaacccatccacttttctagcttgatagccacccctttagtattgccgaaatctcatttcgacagtatgaatttgacatggtgggctacaaacctagaaccatatgtatttccgacttgtagttggccatcagtgtatatatatagaaattgagaagattagtatagattctactagcgatcatagtgatacatctaagaagtaaagctatcacttgtgggctttgtggaagggaataagaaaaaatatgaggtagcactataggaataagctattacgtttactagccaagaacatgtgtattgtaacggaaaatgaaatcagtttctagctcaattaggcacatatttagtcaaattaacacttttatgtttctccttattgaataagtagatgagttcgatgtttaagataaaccattagtgaaacgggagaggactcattggaggttggtgcaatactatagattgtagggcctaaatgtcagtggtagggggtagtgtgaaagaacagacaccaccactacagacatttgaagtagtatagattgaaaaagcaggtgatttcaaagtttaagataaaccaacagtgaaacgggagaggactcgttggaggttggtgtaatactatagattgtttggcctaaatatcagtggtaggggtagtgtggcagaatggacaccaccactacgaacattttaagtagaatagatgtactctattgcttaagtgtgaaagaacttacaaagttgttgatttatacataacagctttgtcaaatagccgtgagccccatggacaagtcagctcaggtttaaccgactactttagattttcagcaagctcataagctttaggcttatcataggtcacaacccgaagtgcttcgaagtaaagagcatgatcagtaagtattaaccttgccagcaaaggaaaagttgaaatccagtgatataaaaccgtaacaaggcaagttaaaaaaagcatgccagcatctaaacaacaagaaatcgtttctcctcactgagaaccagacatacctggccatgtcgaaatcctaacatgttcaagtactggttgagtcgtcaatgtttcatctatttctacaatcctttctcctctctgagaccgctggccagataaaatcaaggactcaaattgtcctttcattttcttaatctccctacatgagataaaacatactctcagtcctgactttatgaaacaagatccaacagaaagttatatgcttgcatatcctatcttcagaaaaacaaagggagtatagttgaacttattttggtaacaaaaattggcaaatatgttatcccatatttgtcgaggttacggataaggtataccctctatccttggataaacaatgagtactgatatggtatgcccgcgcgtatatggatagttcctatatgtgttaaggaaatctatcacgtgatagaaacataatccatggatggaaggagtcctactcggacgagactgggtctttaccatatcgtgaggggtccgatatctccgagttctacttgaagatcaacttacccgcggtataaaagggaccccctgggtaggagctaaggcattgaatatcatcgctaacacatccaccacagcctacgaagccggagcctacaggagctaagtcgccgggtgatctagtcgaaccaactcgactacggtctcgtcggtaccatcgagttctgttattctctttgtaatctgtggtttccatcatataatcccataccaactagattaaagctattacctacaaaggggcctgaactagtataatccttatcttctgtttgcttgatgtcgtactacatagatcctcataccaacataccccaataccctctatattcggtctacgggtatcccctgtcgacagttgcgcgccaggtaggggaatttggtgctcaaggttttactactatgacttcaagcctcctcgacaacagcgtcgaccctgggatcaaccaaggagcttcaacttcaacgatgctggtgtggactcaagtcggcgaaatcgtcttcccggtctacaccacgatgccgatctcgactggcgcagtaatcaccagcagcgagaacggcgtggttacgaccccggtcgactccatgtcgaaagatcctcccgcaggagcggagaacggaacatcgacaacatctgcgcccgagaagggtcctaacgcggccagttcttttcgttctgacaagaagcacgagccgacaaggacaacttccgaggcgacgaggatctggtgtcccatccacaagaccaaaaggcacactttggaagcttgctcggtttttctcgacgtacaagctgaaatccgtgcctgcaaagagcatggaatccaacgcacttctccaactcgtgatgtctattgtcccattcacaaggcaaagactcatgacctctcaagctgcaaggtcattctcagcgccatgaggacgtcacctcctaaggtccaacagtcacaaatctctcctagagatgcggacaaggaacgaggagcaacgaatatttaagatcgattcgtcagggtaatcgatattgatccccacgagccatctgtcctacatctgctcgaagaccaggcctcatcatcaacaagtacaccacgcaacatgtacgccatcggtgggaccagcacgtctggaggcggcaacacggaagcggaggatcaattggctacgccagcccaacatatcagaaccatcaacgcaatactgagggaaacctctaatgatcccgtcctgaatgctgatctcgatcagtggacggaacgactacgggaatcagtggccagcctcagtaacgcgttcgaggaggccgctgccagggcaccaccagaacaaccgccgaccggcggcgctaatggggaacagcctgaacagcggacgccacctcgtcaagccacccttccgccttgcggcaccagtgatctgcgcgaccatctgaatggtcgccgagaagcgcgacgcacgtgagacaacgaaaatcattccccacatcgcgtctctttgcgacatcacgagaacgaagaacaaggaggacatccgagcgagaaccgagaccgtgatgatcaccacaaccaccgagaacatgctaatcgcgaactgtggctgccgggtgatacaagttgaggtcgacgccgcaatgacgacgacgatggaggtcgacactgggaaaacaacgatggatgacgacgaggctcacgagaacccgagcgtcgtcctcggaaccctgccccaaaaccgagtgattcgtcatcgtcctcgtcatcttcatcatcttcctcatcggacagacatccacgacgagcacatgatcgccgacaacccaccgctcctggcggcgggtgcagagctttcactcgttccctacaagaggttcgatggcctgagaaatttcgaccaggagcaatagagaaatacgatggaagcaccgaccctgaggagttccttcaggtctattccattgtactctacactgccggagcagacgacagcgcactggcaaattatttgccggcggcgttgaagggatctgtgtcacgaccggaattaacccaacgggcgttccttacgtgcgtgtattattccttgtcccaggaggcaaggtacaccaaaagttgatacatttcagagtttatcaagcggaagcgtaaatagttaatttattacatgggcggcgaaggcccagcacacacaaagacaaacgggaaacaggggaagactagggcgacgaccacaggcgcttgacggcaggcacgagctagacaccaaagccttcatcttccaggaactccacttctgggtttgggaaaaattgagcaagactgagtacaaccaccgtactcaacaagacacacccacaagtgcagaataaatgcaagggagtacaagggggttataatataaggggttagggtttgcagtaaacaggatttaaaagacacttagttgcccaaagatattttataaagacgatcctagagctatacaagattattaatcaaggccgtgaacccacacgaacctgccttaacccaaggcctacgatgattcagactgaattggcaaccctaccctgggtcccagctcgtcccaagccaacccaggccaaccattccacattttagttgttaagcaggttttaagaattaaaacactaacttgggtacattacttggcttgcccataaccgagggcgcggctattcgaatagattatactctgatcagaggtgtacatctttacccacaagacacatcttcctcacgtgtaaccacgtgccacataccaccacggtatacggatggaagacgtgacatagtttccaacccatcctagccatagacaagagtaccgacccaaccccacctacggccggaacctccgggacaggtaggcaggactgagcccctagcagcaggacaccggccctgtgccatgacatctcgactaccgggccgcagctcatgtagccttcatttgccctagagatgtccatcgacccctgacttcatccatctccaatccgtgtacttttgtttataaccagactgagccacaaactaagccttacccactagacatgtggaagtacggtagtgctttgcaacagaggcccgaagaccggtccttatatggccgaggtgctactatcaaaaccatgcaccccgagcccagcctaaaaccattttggggattttgaatagaaggagcggtgtgaagccaattccacagtaaccaaaccattccatagtatccagatgatatgaatatttcccaaagtctatagttgaaaaaccacctaatgttacctaattaaattgcgaagcatctacctaaaactaaactagtggtgccatgagtagagtgtccactagttggggttttgtttgttctagggtgaacaaggtaataataacaataacaataataataaggtcataacaaaggtaaataggcatggctaaataaaacagtgataacgcgggaatttaaataaagcgataatgcaataatttaaatcaacataattttataaactgggattcaatatgttcaaagatgatgtgacttgccttgctcgctttcccaaacgtcggcttcaacttccacgaagagcggatcttccgaagctgcagcgtctacacgaccaacggaaaagaaaaggcttttactctaataaac

SEQ ID NO: 5068 - DNA, 3354 bp, Oryza sativa
taccctttcatactcgcaaataataaaagattacagaggtagatagttcctctcaaaaaaaaatttcattctacatttccggtgctctgaaaattcaagtaaaatttgagggctccttttagaccaaggagaatttaacaaaaattctccgggccacatttgaatttttcttgcacgtattttagtgtttgccaatttcttttcgaattttaattaattctattattccttttaaagaatgatttttaatttcgggatgaatttatcaggacgtgacaaatccaccccccttacaagaatctcgtccccgagattcgaggaggctagcaagaagataggttgggcggtcttctcttcttgtctaacttcttccgctccgtcttctataacaaacttgcctaacaaaacttctccactctggactgcttggctcgatctcctgttgcagatggaatcttctcttcacctgacttttccctggttgtacctctagctgacttcgactgggatgcggcattggaagatggggcttcagttccagaacttcttataactcgtatctttggagtcaacctcatacaagttaccacttcatgtcatgcgtcaacactagcttgtcattactaggataccatgtttgtcatcatttagcattcaaagtattcctttacacattcagccctgacgtattctttttagatttctcttatcaatcacctttcgacctacttctttgcctggtaataaacatctttttcgatatctcctatcagtcatcttttgacctttgtcactaagtactcttcactccgagagttgtggatgcttctggtgacgaggtggtacttgagcctgctgcctttcagagaaaccttcaagtgattcgttcaaaagctagactggcggttgttgcctttgatccaaagaagacacatctgaaactcttagtccaaacaaaagtctctttggctttttaatctaacacaggtcgcttcactttcttttctatcaacaactaggttacttgatttatcatagattatgagcttacggatatgagaccctaggtctcccttgtcagtaaacaattatacacataatcccatatcagcatcttccgaaataatcctcatagcacttgtttttattacacatgtctcccttattacatgaatgcaaggcctggccttaaacaaaaagggaaggtgcttaacatcggtacattgcatcctccacatgaatcttccataaacataacaaactcattgtttataatcatgaatgtatttatttattacatgattgctgcaaactcccgattacacaatgataagtagcgaactgaaaatcacaaacgtggctgctcattttgattctggagagatatagctcgcattgttctagtgactgcatccttgattggttctgtgatgatgtggtaggactgcgtattgctatcattcacaggagaagcttccttctgattgctgtttgaagtggatgacggttttctgcttggtatcgccctcctgaggttgattgccctttgcttggcctggagtaggtcggggagagacacaacttcttccatcgacgacaattctttgctgaggctgtcggtgcagagaatggttggtgctgaaggtattatcgctatgatttactgcagagtcaggtgcagcaggaggagcattggtgctgtggatgatatcgtcgatgttgctgttggagctgactagctgatgagacaatcgtagggttgttcgttggatttctacggtcttggtcaacaacacactgagttggcaatccttgggcacatggtttgtaccttcgcacagaaaacatgtgaccttgcgggtgagacactcccctggtggatggtcttcttcacaatgagtgcagagtgtgagacacatgctagcaatgtgtccaatttccccacaacgggggcatgcttttgattccatctcttcctcgccgagatgtcggagagactcatcttcataatccgaggagacttgatctgacccttcactatcagatactctgccgtcatggcttaggaggtgctgggtcaactgtcgtgcacctcggaaagtatttcctctttgacgtctaggaatagttatcccagctggaggccattcggtgctggtaatagtcatcttacgtacttcttcttcagttcgcatcggcgcttttctcttctgattcttactcttcttgcctttggcttgcttagtacgtgaccccacgtggtacgaaaggctaggaggaaagcacttcccgggattcaatggattctctccattgggctctctactttgcacactaggctgcaagcttgacttggtgcgaggaggctggtttagcgatgtctgccctgttaaaccaaatgaaggggcttctctggcatatacccatggacaattcagggcatagtgtccttgttctctacaatcgtgacaaaaggggacatcctcttctggcattggaagttcattgacctgggtggcaaatgctcgatcaaacacatactgattttggtcttgacttccaaccaatggtagctgtgaactaagcggcatgcttggaatggaccaagggtgtgccctggttaactctcttgaggccagtggtggattgagttgaaaacttgagttactggagacatacccgctgacattctttcctttttctctgttaaacatctgttacaggaattgaggtgagagaggaaacaagctaggaaagaatagaccagaactagagataggaccttaaaggaactaactcttcttgttgatgtgttgtttgttttgcttattctgcaagttgattaagcaaacaacctagcatggttacatcacaacccaccgatgcaaaccacgcgctacacacacaagcaagaaacacacgactaacgacactaccctagagggtggcttaggttctgcgacgggttctccaagatcttcactgcttccttcactttactagcggatcctgcagccttctggaatttcgacaaacaactgacgatgtcttcttcttcactgacctgaccatctagtactagttgaaatccgaagaaggaagaagggagtaaaccttttgcagatagcacaggggaaaggagaaaaaaggaactttcacaaatagttttatttataaaataggtccttaggttatatccacttggcttatcctacagtcgagatggctcagataccagcttgtcgcgaccgggaaaattgccttttcccgaacgctagtgtattaatccccgtcccaggaaaagccggggtacaccatacaaacatgatataaaagacacatctttattacatc

SEQ ID NO: 5069 - DNA, 3517 bp, Oryza sativa
gttggtcgccgtcgtcgaccatcggggcgcgggtgcgcgccgctcccgtcggccgcgccgaagagcccgccctcgggcgcgccctcgcggctgccaagtgggcccgggcgtcagccgcccgcgcccgcgggtgcggctgacgcgcgggacccacggcgccgaccgccgccagccgcgtgcgcccggtccaccgtggaccgagcggctgacgcgtgggccccacttcccgtggacccggtccgcgcgcccgcccctcggctgacgcaataatccgtttttaattaaaatttaaatgaagaaattcgtaaatatccatttaaagagcatataaacttcaaatggccatatcttggccatttgaactcggaattggaccgttcaagtctctaatttctccttaagatgtaaagaacccatttttgtgctttgtttctgctgttatgtggagttatttagtgttaaagcctttttcttttccgttggtcgtgtagacgctgcagcttcggaagatccgctcttcgtggaagtcgaagccgtcgattgggaaaacgagcaaggcaagacacatcatcttgatcatattgaatcccagtttataaaattatgttgatttaaattattgcattatcgctttatttaaattcccgcgttatcactgttttacttagccatgcctatttacctttgttatgaccatattattattgttattgttattattactaccttgttcaccctaggcaaacaaaacctcaactagtggacactctactcatagtaccactagtataattttaggtagatgcttcgcaagttaattaggcaacattaggtggttttataactctagacttgggaaattctcatatcacctggatactttggaattgttggtttattgtggaattggcctcacaccgccccctctattcaaaatccccctaaaatggttttaggctgggctcggggtgcatggttttgatggtagcacctcggccgtttaaggaccggtcttcgggcctctgttgcaaagcactaccgtacttccacatgtctaatgggtaaggcttagtttgtggctcagtctagtcataaacaaaagtacacggattggagatggatgaagtcgggcgtcgatggacattctccagggcaaatgaagactacacgagctgcggcccggtagtcgagatgtcatacggcagagggttggtgccctgctgctaggggctcagttctgcctgcctgtcccgggtatcccggccgtaggtgggattgggtcggtactcttgtctaaggctaggatgggttggaaactatgtcacgtcttccgcccgtataccgtggtggtatgtggcacgtggtaacacgtgaggaagatgtgtcttgtgggtaaagatgtacacctctgatcagagtaaatctattcgaatagccgagccctcggatatgggcaagcctagcaatgtacccaagtcagtgttttaattcttaaaatttgctcaacaactaaaatatggaatggttggcctgggttggcttgggacgagctggaacccaggtcgggttgccagttcggtccgaatcatcgtaggccttgggttaaggcaggttcgtgagggttcacggccttgattaataatattgtgtagttctaagatcgtgtttacaaaatagccctgagcaactaaatgtctttaaatgctgtttactgcaaccctaaccctttatgttataattcccttgtactcccttgcatttattctgcattcgtgggtgtgtcttgttgagtacggtggttgtactcagtcttgcttaattttcccaagcccagatgaggagttcctggaagatgaaggctttggtgtctagctcgtgcctgccgtcaagcgcctgtggtcgtcgccctagtcttccgctgtttttcgttgtctttgagtgtgctgggccttcgttgcccatgtaataattttatttacgcttccgcttgttaaactctgaattgtatcaacttttggtgtaccttgcctcctgggacaaggaataatacacgcacgtcaggaacgcctgttgggtgatttccggtcgtgacaggatatacgataccaaatatagatagaatatctttatgaggactcgggttagattctaaacttgtatgccaggaaaatacccgggatcctagtcggttacgattgtattttatctgtaatcccatattccgttaggatatggactgtactttgtattacggatcccttcccctatataaggaggggtccgggttcctctcggggcgattctttttctcccaatcatacaatcgataacacactcggcggaatcatccccggacaggagtagggtattacttcttgaataagaaggcctgaacctgtataaaattccttgtctccaaacccatccactttcctagcttgatagccacctccttttattattgccgaaatcttgtttcgacagttggcgcgccaggtaggggtagcgtcaagttctcgccgactaagtgcgatgggtttcttttctggcatcgacgacttcgccttccctcccgggcaggcgttccagttcggcagcctcaacttcatcaccaacgacttcggcaagatctctctccttgactcggactcaaaccagtcggggagagaccaggtccccgtggcattcggtattccgaactcggccgaggcctactccaagatcatctctcccgagtcggcttcaaaccactcggacgagatccaatctactcttccgcgaccagatcaagacgacgggtcctatccctcaatcctgatgaaacttcctgatgatttggccgttgtcttcactgccaagacatctcccacccgaagatctaggcgagctccggcttcggccccgatctaatctagatccagagaggttggcgttatactccaacctcttgggacagtctcaacggaagagttggatggttaccttagctcccccggcttcagttctcgaccaaccgagatcctcgactatgacaatttcggctaccactacgaccacggtgacctcgacaactttgacgacagctatgaggataactacacgcccctcttcttcaacgtattcatggctgacaacgaaacggaggaacagcgtcaagcccgagaagcagaccaagatagcgcacggcaagaagctgaacgtcgccgactagaggaagagcgacagcgacaggagcgagaacgactacagcgtgagcaacaagatcgcgaacggattgcaaaggaggctgaagatcgacggcaacgcgccttggaatctggacgctgagtgagagagctcattgggcaacaagacgtcgatggaacagcggtctttcgcaccccccagtagaacgcggttgcagctatcactctcctcgacaccctcgtcaaggaagacgtactcaaccaagctgatcatgttgtcaacatcttgaaccagacgaagaccatgatcgctgcctcggttccagccaact

SEQ ID NO: 5070 - DNA, 4944 bp, Oryza sativa
ctgcagttggtccgttttgcttcactggtccgttctgtactccagtgatagaatccaccgatccactttcatcctcctcatgttgtatgttcctaagcacaactaaagtagaacacttaggtagtataacattctcagaagtactgaaattaaaatcagttaggaatgaattcacctgaacttgtagtttcttggcacgacttcttgtaagtggaccttgaattgtatcctttgtgtttgatgatggttgcttggtacttgaagtagcatgcacggttgggatgtcctcatcatcaaccctagatgctgatgcaataaatcccttttccttttcaaaaataattcattattgcgtcataattcaattaaaatccatataaatgctttaatccggtttaatctttaaaaattcatatctaattcattgtaactcggtttaatgtggttcaagttgcaaaagttgtataaaataaagatctacatattaaaattattcataaattgaattaaatttatttaattttttttaaatgggctttaattagattaaatctagtaaaattcataataaattcatatgaagtcagaatgaggccgttcaagtctcataattcatctaaaattatgatctacatgtttgtttactttatgtgtattgtttatttggagtttcttagtgttttcctcgttttgcgttttagcttgtcgtttccgtcgttgcgaaggttcgcgagtgcgccggaagtgttcaagaagattaattgaagaccgaatattgcaaggcaagtcacacagatcccaaacacaattcctttgagcatgttgatcctatatttaaattctctatttatttcaactgtgcatttattttcaaatgtcaccgggtggtgtgaacctattcctttgttatggcctgtttgcattgattaccctatttcttgattacctcgggttataatttgactagttggatttatatattggttcaactagatgtattagatataattgcttagccatgcttagaaacattagcacatgattgggataattaatgtttcactattatttaatgatggatatttaatagctcacgatggtcaatcgtgattggttaattaattaatgtgccaactaaaacttgataatggtgggttgtgagcacatggttttgatggtcgtgctcatgaaaattaaggaccggttcacgagtttcggttgtgaaacattaatcgttccaaccacaagccagagtgggcaacggctggacactttgtataacaaggctcattgcggagcaccagactgagaagtggcggagataagcccacgggggtcgctggggagtccatgactctggtttttgagggggtgactatgatccgggaacggtgcactgctttgggttgagttatgcgaggggtcttgtcacaactacagaaatggtgacatgttcagcatgggcacatgatgatatggtgacatattgtggagttttgtcttgtgggtacagtggtacacctctagccagagtaaaactattcgaatagccgtgcccgcggttatgggcgggtcgaacaatgtctttcgtgattagtcccacactactcattaatagtaatgtgataattgatggtaattaatttagctcctggtttggaatggtatattcctggtttggagatagatctgtacaactgggtatggttgttcaggatggttgggcctgtgcagcatggatgtgctgttcagtgattgattaatattgataattaattactctattgttttactactcttaaatgtttgctaaatgctgcttttgcaaatgagccctatattatgccatcctttggtatcctgtgcacttgcatatttgctgtgtggcttgctgagtatgtcatatgctcaccttgcaataatcaatcaaacctcagttgaagacaagttgcgaaggagaagacgtttggcttataccccagttgagctacctgtgggagtggagccggagcttcgctagattttattttccgctgcagttttcttcatggtgaggactaagtgcctcttaagtaagtatttatcgttttagttaatttgatgaatctgtatattaaattgtcagtttgtgtacctcggctgattcctggacgaggattttatgcacaaataagttcggaaattactagtgaatttctgggcgtgacataaactccgcaagcgtccacacgccgactagcagccgagttccgcctcttcgatcccaagattatcaccaaccaagcctcagcatcgtcgcgggatccagtcgcaggagcagggaccatggcaaacgatctgtctactcgcctcctgactggcacaaggagcatcaagccgaacatccccgctccccacgtcgcaggcgtcccgtcgatcttcgtgaaactatcaaccagtgctgcgcggcaagaggctacatcccccgccattcaccagatcgttacgacgaagacgtagatggagttgctgccttcacaagcgacctgcatcgagtagattggccagccggcttcaaaccgactggaatcgagaagtatgacggcacgacaaatcgtgagtcttggctcaccgtctacagtctcgcaatccgcgcagcaggaggagacagcaaagccatggcaaactatatgcccgtggctctagcggattctgcccggtcctggcttcacgggctaccccgtggcacaatcggatcttgggcggagctttgtgaccacttcagcgccaacttccagggcacctttgaatgctctggcacccaatttgatctctacaatgttgtccagaagtccggagaatcccttcgagattacatccggcgttttaccgagcaaagcaacaagatttccgacatcaccgacgacgtcatcatcgccgccgtcaccaagggcattcgccatgatctcttagtcggtaagtttggccgcaaaactcccaggacggtcaagcagatgtttgaaaaagccaatgagtacgcaaaagccgaagatgccgtcatcgcatccaagcagtcaggcaccacctggaagctgaagaaagatacgccgactgcagggggagcggtagtaccaatcacaaggatcgcaagcgtaagcccgaggaacttgtggcaaccactacaccgtcctcccgacagcgttcgcgcatcaacactttccacaagattatgaactcccaatgtctgcatcatccaaattcaaatcacgcagccaaagattgcttcgtctacaaatagtttgcagagcaatacgccaagaacgcacgcaaaccgactgacggagatcaaagcaagtccaagaagaaggatgatgaagatgccaagacccttgcaaggaactcaaccatatcttcggcggacccctggcttatgaatctaagtgaaagcaaaagctgaccgaacgggagatcaatgctgttcaacccgacacgccccaatatcttcggtggtcagagacagctatcaagtttgaccgctcggatcatcccgaccgagtggtccacccggggcggtaccccctggtactagacccagtggttcgcaacgtcaagctctgacgatctctcatcgatggtcgcagtgcactcaacatccatttcaccaagactctggacgacatgcagatccctcgcacagaattgaagccgagtaatgcgccctttcacggagtcatccccgggctatcttctactccactcggccagatcaccttgccggttactttcggcactcgggagaactttcgcacggagaacatttgcttcgaagttgctgattttgagacagcgaaccacgctatactcggacgcccggcgttagcaaagttcatggctgtcccgcattatacctacatgatgatgaaaatgccaggtcctcaaggagtcatatccctacgaagcgacatcaagcaagccgtcacttgtgacaaggaaagctgcgagctgtcccagacccacgagatcactctggctcgagaggaaatccgactggctgcgtccacagcaaccaaaggagaagtgcttgcaaccaagatgccaaagaacggagaaggcgacgccaagaccaagaaaattcctctagatccctctgatcccactaaaactgctgtaataggcgctgagttagattgtaaataggaaagagcgcacatcacctttcttcaaatataataaagatatctttgcgtggaaaccatctgatatgcctggtattcctagagaggtgattgagcactctttacatgttaaggaagacgctaaacgtattaatcaacgaccgccgtttcgaacaggatagaaaggatgcgatcaaggaggaattgaccaagctgttagcagcaggcttcatcaaggaagtcctacatcccgactggctggccaacccagtcctggttcagaagaagacggggcaatggcgtatgtgtgttgattacaccgacctcaacaagtcttgtcccaaaaatcccttcgggttacctcgcattgaccaggtagttgactcaacggccggctgcgagttactcagttttttggattgttactcaggatatcatcagatctgactaaaggagtccgactgcttgaagacttcattcatcacacccttcggggcctactgctacatcaccatgccttttggattaaagaatgcaggagcaacttatcaacgcatgatccagagatgcttttcaactcagattggttgcaacgttgaagcttatgttgatgatgtagtcgtcaagaccaagcagaaggatgatttgattacggatctacaagagacctttgcgagcattcgcgctttcaagatgaaatttaaccctgaaaagggcattttcggagtaccgtcaaggaagcttgttggcttatggtggtctatagaggcatacaagccaaccccgagaa

SEQ ID NO: 5071 - DNA, 1665 bp, Oryza sativa
ccgacctcgtccacccctccgtttcgctcgccgaccgccggaacgccgtcgaccccgtcgacccgagccggggggccgccttcctgcgctccggacgactttttcgtcgtcgccgtcgacctaaggtgagccggggaccgccgccccttttcccccttcccttcccctctctcgggcggcgctccgccgtgcctatgggcgccgccgccgaccataggggcgcgggcaccgacttccgccggctgcgccggcttggctgccctcgggcgcgccgagtggttgccgcgtggggcccggccgtcagccgcccgctccctcgggtgcggctgacgcgtgggacccacggcgccggccggtgtgagcccgggtgcacccggtccaccgtggaccatgaggctgccgcgtgggccccactcccgtggacccggtccgcgcgccccctcccctcggctgacgcaataaatccgttttaaaattaaaatttaagtgaagaaattcgcaaatattcatttaaagagcatataaacttcaaatgaccataacttggccatttgaactcggaattggaccgttcaagtctctaatttttccttaagaagtcaagaacccatttttgtgctttgttcctgctgttatatggagtttattagagtaaaagccttttcttttccgttggtcgtgtagacgatgcagcttcggaagatccgctcttcgtggaagttgaagccgacgtttgggaaagcgagcaaggcaagtcacatcatccttgaacatattgaatcccagtttataaaattattttgatttaaattattgcattaccgctttatttaaattcccgcgttatcactgttttatctagccatgcctatttacctttgttatgaccttattattgttattgttattatttccttgttcaccctagaataaacaaaaccccaactagtggacactctactcatggtaccactagtatgattttaggtagatgcttcgctgattaattacgcaacattaggtggttttataactctagactttgggaatattctcaccacctggacactatggaatggttggattattgtggaattggattcacacctccccctctattcaaaacactcaaaatggttttaggttgggctcggggtgcatggttttgatagtagcacctcggccatataaggaccggtcttcgggcctctgttgcaaagcactaccgtacttccacatgtctagtgggtaaggcttagtttgtggctcagtctggttataaacaaaagtacacggatggagatggacgaagtcaggggtcgatggacatctctagggcaaatgaaggctacatgagctgcggcccggtagtcgagatgtcatggcacagggccggtgtcctgctgctaggggctcagtcctgcctacctgtcccggaggttccggccgtaggtggggttgggtcggtactcttgtctatggctaggatgggttggaaactatgtcacgtcttccatccgtataccgtggtggtatgtggcacgtggttacacgtgaggaagatgtgtcttgtgggtaaagatgtacacctctgatcagagtataatctattcgaatagccgcgccctcggttatgggcaagccaagtaatgtacccaagttagt

SEQ ID NO: 5072 - DNA, 8919 bp, Oryza sativa
  unsure (1)..(8919): unsure at all n locations
gtgatttccccctctttatggcgcgcggggacggcgggatgcggcggattcggcggcagcggcggcgctagggcacgggcgggcggcgggtgcggcgcgaggacagggatgacaggtgggccccacccgtcagcgagggtggcgggtgggcccgcccgtcagcggcgcgcgcgcggggagaggccgagtgggccgcggggaggaggagagggagggaaggagctgggccgagccggcccagtaagggaaggggggggaaagaagactttttaggatttttctttttataaaaccattctaactttgtttatttcttaataattattatttgtgctctgaaaattccactaaaatttgagggctccttttagaccaaggagaatttaagaaaaattctccgggccacatttgaatttttcttatacgcattttagtgtttaccaatttcttttcgaattttaattaattctattattccttttagagaatgatttttatttcgggatgaatttatcaggacgtgacactctgattatctgtccattgaggctgaagaaaattttacactacctttatctgctcaagcagctcacttcttcccttctagatatcgagctgattaatgaaaatgatgtttggtcttacatttggggaagtatgaaatattcttcacagaaattctatgcactgaatttcagagttattaagccaccagttcattttctatggttatggaagtgcaaagtagtttcaaaagtaaaaggtttttgggtggctactcatgatgaatagattaaacaccaagttcatgctagatcataagaattgtgctcctccgaattgtgatctttcttgtgttctttgtcaatcggcagctgttgaagacctcatgcatctgttctttttatgcccgtttgcccaaaatcgttggagtcttctaggcattatatgggatactaatctatctttggaagcaatgtttataagggctaaattggattatcaggggagctgtttcatggagaaattcctttatgctacttggcatatatggaagcaaagaaatgggttcatttttgagcaaaagatcccttctttcatcacttggaggcaactcttaaagggtgacctcttccttctgttgtttagaatttctgcgagatatcacgatataatcataagttggattaatgggttgtaactttgttcttgttttcttaataaagtttttctaacagtgggggcctcccctgctatgttctttcaaaaaaaaatggatcggctgctcaatctccaaggacctcctctgggcagtattgaaaatatcgagctggcgggattcaagagcaaaaactttgacagatggtggggcgagtggaaactgcatttattccaccaatcagcttctatgtatatgatagatctttttcctgatgtcatacctctggtaaactttgatctcattagttctgtttgaacaattatcagccgattcataatttgactaaccctctcttgtattttgtagacaacataattttcccctccacatcaaagcaatagtagagatatcaaatatgccccaggtctaattcaaaatggaggtggaccatctcctctcgtcatcggctataatgcccccaagacctcaacccttcttcaaggcctcatcagagaaaaccagccgatgcaggcaagaagagaagaacaaggtcatcggctgcggacacattagctctagcctcaaagaagaaggctaaactcaagaagcctaaaccaactgatgatctgcctgtcctagatccatctattgaacaagctctggatgaagaagacatcgaagatgatgttgatcaagctacagccgaagtaagcaatacagaaaaaacaccatcggcttctcccaagcagactcctccaactccttctgccccaactcatttttcaagagtaagcagctctctttaatcctttttgaaatcacttcattttttcggccgattaatcacatatcgtatagctgcagaagaagaaaactgctataaagaagaaatcagcagcaacaactatcaaaccagctccaccagtaagacattcctaatttttactagttgattatagccgattttgtctaacacttgtatcttttacagcctcctcctcctccttctcctcctgtacagcaatcatcaagtgaccgaactccatcggctgtggggagtcaccacattgaggaagaaatacaaccagctgctcctgccatcccggtaagtcttgtcttataagaatcttgaatcggccatatgactcatgtcgagactcaatttaaaattctttcttgcaggcgttagctgatctgttttctttcgacattaaagactatcttgacgaagaaacagaagaagataccaccagcaaatctttacttcccttgtccgatgatatgaagaaaacccttgaagacatctctcatcggctggaagcatcatcactggaaaacttggtggtaaactgtggaccgattaggactcggctacatgagatccaagctctaatcccagatgagctagccgatatccttactccagctgtctatcttgagcaacatcaattcaagctggagaaagccaagctaagactagccgaacgtcgggagcgcaaggatatcgaagccacaatccaagccaatcggcagcttgtgcatgaagagaagtccaagcttgatcagctctgatggcccaatcaaatctaatattgatcggcttgaggctcgcaagattgagctcttggcacagcttgaagaacgcaatgccgagctggatatagaacataaaaagctggccgatctcccaaaatccgttgaagaacagaagtcacgattaaaatcggctatcaagaatgttgctgagctgaccaagtctttgaaaatcatccctggaaccgatgctcaagacgcccaagccattgaagaagtagaacagattaggcaaagggcaatatcggctatccagcactatttgtctcagtgactctttgtataataggtcttagaaatttttgtaattggctaagatactccagtactttactgtcttgacaatcatctgtgccaattaatataacttctaaatttgctcaaaaattttcatttgttttgtatatatgtgccccctgattttataatgtcaaaagcattgagaaaattacaaaaacaactaagggcgatgtaaacacatcggccattattcatcggcaaaccacaaccgattacaatatgaaaaacatctaagggcgatataaccatatcggccattgtacatcggcaaaccacagccgattacaatacgaaaaacagctaagggcaatataaccatatcagccatctcaaggcgatgtaaacacatcggctatcatatatcaacaacatcagccgatcatgcattaacccaaacacttgggtaatatttcttcaaatacttgccatttagcgctcgtccataaacctctccatcgagtccttgcaacatgtaagctcctttagacaccactttatgaatttggaatggtccttcccaattcggcgaccacatgccgaatttgctatcccgagtcccaatcggcaaaatcaacttccatacaagttcaccttcggaaaaatctttaggtactaccttcttgttgtaatgccgagcaacccgttctttatccttggtaacctttgcgagggctcttaatctagactaaaccaagtcctccctttcatcggccataaggttacaatactcatcagctgttaaattatcttgcagctcagttctgcttgagccgattctaacctcgcatggcaaaacagcttcatgtccataaacaagcttataaggagggacttggatcgatccatgacaagccatccgataagaccacaacgcttcagccaaccgagtatgccgttgccgaggataatcagaaatctttcttttaatcagtttgttcaaactcttgttagatgcctcagcttgcccattagcttgtgcataatatggcgaagaattcaacaatttgacacccatgctgtcggcaaactgaacaaactcatcggatacaaaaattgaaccctgatcggttgtaatggtttgagggataccaaatcgatagattatatgttcttgaataaaatgtatcgcatccccagaatcaaccttcttcaagggaatcgcctctacccatttggtgaaataatcggtcgccaccaatataaacttatctcctttactcgatggaggattaatcattccgatcatatcaataccccatggtttaatgataggattcatagccgacgccggtgcttgctgaattgctccaaatttctagcagtcttgacaccctttgtaatatctgaaataatcttccagcattgtcggccaaaaataccctgaacgccaaagtaaccacttcatcttatgaggcgattgatgagtaccataaatcccttcatgaacttcgccgattgcaaccttagcctgatcggcactcaaacacttaagcaacaccccatcaatcgtccgataatagagctcatcatccaataaagtatacttcaacgccttatatcttaatttccgagaagccgattgagatggattctgtaaatattgatgcacatcagacctccaattatnncgctgtattgctgcgacctcgaccttaacatctttgatcatcggcttataccccgatgccccctagcccaaatcaataagctccaatattttgttctcgagatacatgcttcaaagataccacccgaaaatccttcatcaattcttggcacttctcattataaaccattaatgtatcattcttgcactcatattctcctgccaattgacttattgctagcaaagaatcccccatgatttcaatagcatcggcttcaacctccttgagtaactgtaaccctttgagcactgcttcatactcagcttgattattggttgcatacggtttgatagtataagcaaactcaaaattcgcaggggaaataataaccaagccgatgccacaaccatgagtgcacacttacccatcaaagaataaagtccacggtacgatctcaaccgagccgattgaatcatcacgatgctctacaataaaatcggctatagcttgtcctttaatcgcccgactcataccgaagatcaaactcagttaaagaaaatatccactttccaacccttcttttcaaaatcggggccgatagcatgtatttgacaacatcggccttgcatatgacagtgcattcattagactatagataatgccttaaccttgtacatgaaaaatataagcacaagcataacttctccacaggggaatacctagtttctgcatccaagagccgacgacttagataaaacacaactctctctttcccttcaagctcctgaatcaaaaccgagccgattgacttctcaccggccgacagatataaccgaaaaggtacccccttctggggaggaatcaaaactggaggagagctaagatattccttaatatcgtccaacgctttttgttgctctaccccccaagtaaactgttgatcggcattcaatctcaacaatggtgtaaaaggctctaatcttccagacaaattagaaataaaccttctaacaaaatttatcttgccgatcatctcctgtagttctatcttgttcttcggaggctgaatcttcttgattgcattaacactcctttgagttacctcgattcccctatcgtgaacaagaaatcccaaaaactggccagccgatatgccgaaagcacactttgtcgggttcatctttaggccatatttcctggttctctcaaaaaccttccttaaatcggctatgtggtcttctacctctttagactttacaaccacatcatcaatgtagacctgaactaaccagccgatcagatcgtgatatatataattcatggctctttgatatgtagcccaagcactcttcaagccgaaagtcatcacaacccactcaaacgagccgattgcaccaggacgcctaaaagttgtcttatggatatcttcttcagccataaaggtctgattgtatcccgcattaccatccataaaactcaaaattttgtgtcccgaggcagcatcaactagctcataggctactggcattggatattcgtctgtcggggtagccttattcaggtttcggaaatcaatacataccctgatcttgccgtttttcttgataacatgaactatactagaaacccactcagcatatcggcaaggacgaataaaacaagcatcatataatcgttaaatttcagcctttacgggatcaagcatatcagctttgcatcttctcggaggttgttgatgtggtctaacccctggtttgataagtagccgatattcaacaatcaatcggctgagtccaggcatctcataatactcccaagtgaagcaatctctgaattctttgaatagctctatcaacatggttctaaactctggagataaattcttactaataaatgtcggccgtcgtcgatcacctggactgtcgcgaccgggaaaattgccttttcccgaacgctagtgtattaatccccgtcccaggaaaagccggggtacaccatacaaacatgatataaaagacacatctttattacatcgataatatttacattattacaaaggcacttaaggcctgacaatcaaaaataaacagcagcggactagcgggcctacggctccatcttcacaggcgctcaactggggtataagccaggactccacctaagacatcttctccaaagcttctcttactgaaggggggagaaagatagagcaagaatgagtacaaccacagtactcagcaagacacaccggagaatgcatgattaatgcaagggagtacaaggagataataatacaggggttcagttttgcagtaaacagcatttaaaagtcacttagttgctcaaagccattttgtaaagacgatcctagagctacacagtattattaaacaaggccgtgaaccctcacgaacctgccttaacccaaggcctacgatgatttggaccgaactggcaacccgacctgggttccagctcgtcccaagccaacccaggccaaccattccacattttagttgtttgagcaaattttaagaattagaacactgacttgggtacattgctcggcttgcccatatccgagggctcggctattcgaatagatttactctgatcagaggtgtacatctttacccacaagacacatcttcctcacgtgtaaccacgcgccacataccaccacggtatacggacggaagacgtgacatagtttccaacccatcctagccttagacaagagtaccaacccaatcccacctacggccgggatacccgggacaggcaggcagaactgagcccctagcagcagggcaccaaccctctgccgtatgacatctcgactaccgggccgcagctcgtgtagccttcatttgccctggagaatgtccatcgacgcccgacttcatccatctccaatccgtgtacttttgtttatgactagactgagccacaaactaagccttacccattagacatgtggaagtacggtagtgctttgcaacagaggcccgagcttaatccttatagtggccggggtgctacttcccataactggcatgcacccaaaccccaccgaaaacaggttttaggggttttgaaagaggaagagaggtgtatgtccaattccaccataaaccaacaattccatagtgtccaaatgatatgagaatccccaaagtctaaagttataaaaccacctaatgttgcctaattaatcagcgaagcatctacctaaatttaaactagggataccacgagtagagtgtccactagttgaggttttgtttaatctagggtgaacaaggtaataataataacaataacaataataatatggtcataacaaaggtaaataggcatggctaaataaaacagtgataacgcgggaatttaaataaagcgataatgcaataatttaaatcaacataattttacaaactgggattcaatatgttcaaggatgatgtgacttgccttgctcagagagaacggacttccgatccttcggcgacgaccgcgaaccacgcttcgggaacctccggaacgacagaagctacgcgaagcacacaagcaaagctacaagcctataaagaagcaataacaatacataaaaacaaagcacagggttctttaggttataacaaacattaagagacttgaacgggtcgattcggagctcgtatgaccaggatatgatcatccgaagtttaatgctgttatatggagatttgcgaattattataattaagctttgcaactataaaacaggtgtaagcgctagcctggaaaagacaggagggctgcgccgttgacatgcggaccccacatgtcaacctaaaggaccacggtagaccgagtacacagagacggtccacgggtcgacggaagcggaacccgtgtgtcaaccgaggcgagtggccgacaaacggactccactagacaccacacggcctgcacccgtggaaaccacgcggctaccgagcgggcacactaacacggacactacccggtcaccacccgcacacgtgaacgactaccgacaccggtacacgggtaccggggtcgacgaccgcacaacgggtacggggcgacaccggaaggacgagggcggggaagcgagaggacggatccttaccaccacgcgacgaggcgtgggaacgacaacgacgaacgggaccggcgaggacagctcggggacgacggaggcgaacggcgagggaacgacttcggcggcgatccttggacaaaggcgagacg

SEQ ID NO: 5073 - DNA, 7160 bp, Oryza sativa
tttttaattaaaatttaaatgaagaaattcgcaaatatccatttaaagagcatataaacttcaaatggccataacttggccatttgaactcggaattggaccgttcaagtctctaatttttccttaagaagtcaagaacccatttttgtgctttgtttctgctgttatatggagtttattagagtaaaagccttttcttttccgttggtcgtgtagacgctgcagcttcggaagatccgctcttcgtggaagttgaagccgacgtttgggaaagcgagcaaggcaagtcacatcatctttgaacatattgaatcccagtttataaaattatgttgatttaaattattgcattatcgctttatttaaattcccgcgttatcactgttttatttagccatgcctatttacctttgttatgaccttattattattgttattgttattattaccttgttcaccctagaacaaacaaaaccccaactagtggacactctactcatggcaccactagtttagttttaggtagatgcttcgcaatttaattaggtaacattaggtggtttttcaactatagactttgggaaatattcatatcatctggatactatggaatggtttggttactgtggaattggcttcacaccgctccttctattcaaaatccccaaaatggttttaggctgggctcggggtgcatggttttgatagtagcacctcggccatataaggaccggtcttcgggcctctgttgcaaagcactaccgtacttccacatgtctagtgggtaaggcttagtttgtggctcagtctggttataaacaaaagtacacggattggagatggatgaagtcgggggtcgatggacattctccagggcaaatgaaggctacacgagctgcggcccggtagtcgagatgtcatggcacagggccggtgtcctgctgctaggggctcagtcctgcctgcctgtcccgggggttccggccgtaggtgggattgggtcggtactcttgtctatggctaggatgggttggaaactatgtcacgtcttccgtctgtaccgtggtggtacgtggcacgtggttgcacgtgaggaagatgtgtcttgtgggtaaagatgtacacctctgatcagagtataatctattcgaatagccgcgccctcggttatgggcaagccgagcaatgtacccaagttactgttttaattcttaaaacctgcttatcaactaaaatgtggaatggttggcctgggttggcttgggacgagctgggacccagggtcgggttgccagttcggtctgaatcatcataggccttgggttaaggcaggttcgtgtgggtccacggccttgattaataacattgtatagttctaggatcgcgtttacaaaatagctttgagcaactaaacgtctttaaatgctgtttactgcaaccctaacccctttatggtaattcccttgtactcccttgcatttattctgcatttgtgggtgtgtcttgttgagtacggtggttgtactcagtcttgctcaatttttcccaagcccagaagaggagctccttgaagatgaaggctttagtgtctagctcgtgcctgccatcaagcgcctgtggtcgtcgccctactcttccgctgtttctcgtttgtctttgtgtgtgctgggccttcgctgcccatgtaataagttaactatttacgcttccgcttgttaaactctgaattgtatcaacttttggtgtaccttgcctcctgggacaaggattaatgcacgcacgtcaggaacgcccgttgggttatttccggtcgtgacaaagatgctaccgacatgtgggccccacatgtcggtgacacgagagagaggagggcggccggctcggctgggccaaatgggccggttcggccgcgcggagagagaaagagagttgggccgaattcggcccaacaactaaggaagggctttttgaactttttcaataaaaataaattgtgaaatgatgtttcatttattaaaaatacttccattgctcaaataattcccagaaaaatctagaaaatagaggagcaagcatagtatttaataaaattttatctaacccaattttatattgagatttagcaaattaaaattagatcttctcttttaagcttttaaaatcatttctaataattccttttaaacaacaatttataatttaaggatttttaaacaagaaaatcacttaacaattataattagatcatttgatgattaatttaatatttaaataattgctgaacttctctttgtatgattaaaattaataattgagctccgaaaaatccgagaaaattccagagagtataattaaccatggagaatttaataaaaattaaatccatccatgctttatatttagaaaattttatttcccacatttaaatttacttgtaaattaaagaacatttaatataaattctattaataatttattaaataatttataaatcctaagaggaaaatcagggtgtgacaaatctaccccccttacaaagaatctcgtcccgagattcggaacggctagaaagaaaaaggcataggtaaactgcagtctatcttattattccataactccgataattattctaaggctttaaagaaaactactgctgctttgaaactggtggctgagctgtatcccttgagaacgcaactcttgaagacgcaactggcactgcattggctcctgtgacgacaatgttgttgacctgaccttgcggctgctgatgctttgacttcggacactctcttgcaaagtgacctggcttgtaacagttgaaacatacctgctgctcccttccactactgttattctcttgagactgatcctgctgaactggcaccggttgattagcttgctcgatgtttacttcattgctttcattagtctctgattcgatctcaccaccgatgttcaactgttgcgactgtccttgaccagcggaaaaagattcaccaatttggagtggctcgatacgctgtctctggcgactaccttgtgcctcctggaaaacagtcattttccttttacggttatccatcctgttcttcttgtcttccagtcgaattgctttgtcaaccaactcctgaaaatcctcatagtcatgagagatcaacataactgacagctcatcctttaagccttccaagaacttctcctgcctttcctcgtcagtacgcacatcttctggagcatagcgagctagacgattgaactcatgaagatattccgtcacggtacgatccttttgcttaagtgcccggaactcacgcttcttcaaagcaacaacacctgcaggtatatgtgtcttcttgaatgcttcagtgaactccgcccaagtgattggttgtccttctgctctgttcatccggaaatgatcccaccattccgaagcagatccttgcaactgatgtgaagcgaaaacaactttctcctgatccgtgcactggagcaattccaacttcttctcaacagcgtgcaaccaatcacctgcttccactgggttggtagtgctagagaaggtaggtggcttcacacgaagaaaatcaactaacttgttctggggcggcggaggattgacattgttgttcccttgctggttctgcatttgttgcactaacaggttgatcaattgggtctgttgagccagcacttgagcaaaggttgggttctcttcattgttattgtttccacttccactggcgcgagtgttcaccatctgttgcagattagagaagataggaggagagaggttacactaaagacaagaccttaaccaggttaccactgatctggtgtgtgtagttcattatattgttcaagttgattaagcaagcaacctagtatagtcacacactcatcaatgaactactccaatgcaactatacctacacacaaaacaaacaacaaacgttctaccctactaactattcttcaaagacactttggcggcataggttctaaggtaggatgccaacttcattctatcttgacatctgggcacttcggtccttcctcgatccactttactgacctctacaagtagacctcattggcgtcttcaggtttcaaccactagtttcagaactactcaagttgaacgagagaggagagtagacaatgaaacaatttgcaaagaattctagataaggaagaaaggaaaatttttcacaaattatgttttcggaaaattagtccttaaggtttgaccacttggcttatcctacagtcgagatggctctgataccaacttgtcacgcccggaaattcactagtaatttccgaactaatttgtgcataaaatcctcgtccaggaatcaaccgaggtacacaaactgacaatttaatatacagattcatcaaattaactaaaacgataaatacttacttatgaggcacttagtcctcatcaagaagaaaactgcagcggaaaataaaatctagcgaagctccggctccactcccacaggcagctcaactggggtataagccaaacgtcttctccttctggatcctttttcttcaactgaggttgattgattattgcaaggtgagcatatgacatactcagcaagccacacagcaaatatgcaagtgcacaaggataccaaaggatggcataatatcggctcatttgcaaaagcagcatttagcaaagatttaagagaagtaaaacagtggagtaattaatcagaaattttaatcaacactgaacagcacacccatgctgcacaggcccaaccatcctgaacaaccgtacccggctgtacagatctaactccaaaccaggagctaagcaaattattaccagttataacatccataattattgtgagaggtgtgagactaatcacgaaaaacattgctcaactcgcccataaccgcgggcacggctattcgaatagttttactctggccagaggtgtaccactgtacccacaagacacagcctcagcatcatgtctaccatgcgtcgcgatactggaaagtacccgaatagaggctgtgacaataccctctgcataacacaactcaccacagtgcaccattcctggatcataatcaccccctctacaaccagaggcatggactccccagcgacccccacggacttctcgccgcttctcagtctggcaccccgcaatgaatcatgctatacaaaaggtaaagccgttgcccatgctggcttgtggttggtacggttaatgtttcacaacagtagctcgcgaaccggtccttaattgtcatgagcacaaccgtcaaaaccacatgctcacaacccaccttaaccaggttttaattatcaattaattatcatcacacgattaaccatcgtgagctaccatttaatgtaaccataaataataatgtagtatatatgactcatcccattagtgagctaatgtttctaagcattgctaagcaattatatatataacatttagctgaaccaaaccaatacataaggttcaagctactcaatttattacccaaggtatcaaggaatagggcattcaatgcaaattggccataacaaaggaataggttcacaccacccggtgacattcaaaaataaatgcacagttgaaataaatagagaatttaaatataggatcaacatgctcaaaggattgtgtttaggatctgtgtgacttgccttgcaataatcggtcttcaattaatcttcttgatcacttccgacgcactcacgaaccttcgcaacgacggaaacgacaagctaacacgcaaaacgaagaaaaagactaataaaaaccaaataaacaatacatataaagtaaacaaacatgtagatcataattttagatgaattatgagacttgaacggcctcattctgacttcaaaagaatttattatgaattttacaagattaaatctaattaaagcccatttaaaaagaattaaataaatttaattcaatttatggacaattttaatatgtagatctttattttagaaaaatttagcaacttgaaccacctgaaacggatctacggttatttagatatgattttccgaagatttaatctattaaaaaaaaaggaaaaagaggagatcgatgatgtcagcatgacgtcatccatggccggccgactcgggcggcaacctcgccggagctagggaccttggccgggcgattggagagcacctacgcgaagaggacgacgagacgaacccgacagtactcaccacgacgacaaacgacgaacgacgacggccggcgacgagaagggcgacggcggcggctcggttgaacggcgacggcgagctgtggcggccggcggcgaagaaaaggtggcggccggggttctcctcaccacggcgcacctaacggggcaagcggcggcgacggcggaggcgacgacgcgacgcgactgaagaccggccggcgacggcggcggctaagtgcacgcggcggcggcgctacggtgcacgggagaggacgagagagggggcaaacgaaagagggcgacgaggggatgctttatatagccttggattgaagagatcgggctccaaacaagaggaatcgatccgagaaaatcaaaactcggttttggagataaactcgaaaacgagtttgattcgaacaagatacacaacgatttgctccaaaacttgggggaagagatagaggagaacgagggatcaaaacccctcaaaaatccggaagaaaagaggccggattggagcggatttgagaggagaagaaagcggctcgggcgacggcttgggctcggcctgtgccggcggctggaggtagaagatgctaccgacatgtgggccccacatgtcggtgacacgagagagaggagggcggccggctcggctgggccaaatgggcctgttcggccgcgcggagagagaaagagagttgggccgaattcggcccaacaactaaggaagggctttttgaactttttcaataaaaataaattgtgaaatgatgtttcatttattaaaaatacttccattgctcaaataattcccagaaaaatctagaaaatagaggagcaagcatagtatttaataaaattttatctaacccaattttatattgagatttagcaaattaaaattagatcttctcttttaa

SEQ ID NO: 5074 - DNA, 6759 bp, Oryza sativa
caaaatccccaaaatggttttagcttgggctcgggtgcatggttttgatagtatcacctcggccatataaggaccggtcttcgggcctctgttgcaaagcactaccgtacttccacatgtctagtgggtaaggcttagtttgtggctcagtctagttataaacaaaagtacacggattggagatggatgaagtcgggggtcgatggacattctccagggcaaatgaaggctacacgagctgcggcccggtagtcgagatgtcatggcacagggccggtgtcctgctgttaggagctcagtcctgcctgcctgtcccgggggttccggccgtaggtgggattgggtcggtactcttgtctatggctaggatgggttggaaactatgtcacgtcttccgtctgtataccgtggtggtatgtggcacgtggttgcacgtgaggaagatgtgtcttgtgggtaaagatgtacacctctgatcagagtataatctattcgaatagccgcgccctcggttatgggcaagccgagcaatgtacccaagttagtgttttaattcttaaaacctgcttatcaactaaaatgtggaatggttggcctgggttggcttgggacgagctgggacccagggtcgggttgccagttcggtctgaatcatcataggccttgggttaaggcaggttcgtgtgggtccacggccttgattaataacattgtatagttctaggatcgcgtttacaaaatagctttgagcaactaaacgtctttaaatgctgtttactgcaaccctaacccctttatggtaattcccttgtactcccttgcatttattctgcatttgtgggtgtgtcttgttgagtacggtggttgtactcagtcttgctcaatttttcccaagcccagaagaggagctccttgaagatgaaggctttggtgtctagctcgtgcctgccgtcaagcgcctgtggtcgtcgccctactcttccgctgtttctcgtttgtctttgtgtgtgctgggccttcgctgcccatgtaataagttaactatttacgcttccgcttgttaaactctgaattgtatcaacttttggtgtaccttgcctcctgggacaaggattaatgcacgcacgtcaggaacgcccgttgggttatttccggtcgtgacaagttggtatcagagccacccttgaccctaggacgagccgtagatcccaagccttagcaatattttcaaaaataaaaatcctttgttatttgtgaaaactgtctagtctctctctatcttgctgcttcatttatcgccaaaatctgacctttaaaatgttgtcttttctttttgtttttgtttgtagatggccggcagcgtcacccgtcgtggtttgcacatgactggcttcgtcttggagctgcgaggcatgtgcgtggtcttggggtatccacatggagtggactaccaggccaggccgcttccggagcaggagggtgacgatgcagagccccacgctggttgggaggtcactgcagtgatcctctctggctctcccgagcggacttcgctggcagtcaccgcgggtggagattccttccccgccgcttgccagaacgtcgctctcctcgccatcggcactcttcaccagcgctacccggacgagttgcagcactcgccctaccgctaccaccctcgtcgcggaggagcccgcgactacgccaccttccgggatgctagctcggaggatgacgctaccatcgtgcacctggcgcgcatggtggaggcgtacgacgcggctcgcatcgacttccaccagatggtacgccgtgggatggtcgagaacaacatgaagatcctggagctgcgtcaggagaacctgcagctcaagaaggacctagacgcggtggaggcgcagctgcatcagctcaagatcgcccagggagaggtctgccgccccaagcgtcgccgcgtctgccgcagccagaagatcaccgcccgcaagagcacctccaggcccgagcttgttcgtcagtccctggcgtggacttgcttcgtcgagacccctcgtgccgagcccgcgcccgtggttccccaggagggggaagcctccggcgttggtagcacggaggatgcgctgttgctcaccttccgtcctggcccgtcgcagcggtagacgagcagttagtaggcttgcgcgtgtgttcttcctcgtttgtcttcttgttgggtcgtgtggggcatggtcatgccggtgtgtggcataactgtgtcggagcctgtctttatttatttgcctaagcaacttgaactttaatgaacccatttaatagcagtaataaattcaagaattatggtagttgtgggtggttagttttaattgttagctctttctctgtttgctggttctgtgtggggttttcagatggtgacgaccaggagaaatgctgccaccggtgatggcaaccaacctgaaggcagcaaccacaaccaccagggcaacccacctccaccttctccttcgcctcctccaccaccaccagataccaatgccattctcacccaaatcctcgcccagcaggccaacatgatgactgctttcctccaccacctccaaaatccaccacaacagaatgctccaccaccacccccacaacactctaaactcgccgagttcctccgcatccgtccacccaccttctctagctccaacaaccccgtggatgcgttggattggttgcatgccgtggggaaaaagctagacacggcgcagtgcagcgatgaggagaaagtcatcttcgccgcccaccagctgcaggggcccgcatctctatggtgggaccatttccaagctacgcagccagaggggcaacctattacttgggcccgcttcaccgccgctttccggagaacccatgtgccagctggagtcgtggctcttaagaaaagggaattccgagagttgaagcaaggcaaccgctccgtgatggagtatttgcatgagttcaacaatctggcccgttacgccccggaggatgtgcgggaagatgaggagaagcaagagaagttcttggcaggaatggacctcgagctgtccgtccgtctagtctctggggactatccggatttccaacgtctggtggacaagagcatccgcttggaggccaagcacaaggaactggagtcgcacaagcgccgcttggcgaatttccgcaatcaacagtgtgctaaccaaagggtccgctacaccaatccctatccagggggatcctcttcgcagcagcaacaacagcagcagcaacctcgctccgcgcctcgacctcaattcgtggtgcgcgtcccacagccgcagcagcagcagaatcagcaagggactcgtgcgccccgtcctcctacgccaactgtgcagcccggtcaaggccgcagggacgctcaaggtcagcagcgtctgtgcttcaactgcttcgagcccgggcactttgcggataaatgcccgaagccaaggcgtcagcaaggtcaagcgcctccccgctccaacaacggtgggaaggatgtcattcggggtcgtgtgaatcacgtgacggccgaggacgtgctgacaactccagacgtcatcgttggtacgttcctcgttcatcccatccctgctaccattttgttcgactctggagcttcccactcgtttatatctgtgccattcgtggggagaaatcagttgggggtagaaaggcttaggaaccctctgctcatcaccacccctggaggggttatgacagcaaagtattatagccctgccgtccctatagaaattcaggggattccttttccctcggatctgattctgctagacaccaagaatttggatgtgattcttgggatgaattggttggctcaattccaaggagtagtggattgcgcgaggcgcactgtcactctgtaccgagggccggaacaaccggttgttttctttgcacccccaacctctgtcagtagttcagaactgcatcagataggactgtcagaaatccccatcgtcagggagttcggagatgtgtttccggaagaactacccggtatgccgcccaagcgagagattgagtttcggatagatcatgctccaggaaccactcctctgcacaagcgaccctaccgtatggcagcaaatgaactggccgaagtaaagaaacagttggaagagttgaaagaaaaggggtacatacgtccgagtacttccccctggggtgctcctgtgatttttgtggagaagaaagacaagactaagaggatgtgcgttgactacagagctctcaatgaagtcaccatcaaaaacaagtaccctcttccccggatcgatgatctgttcgatcagcttaaaggtgccactgtattctccaagattgatcttcgttccggatatcaccaattacgtattcgtgaagaagatattccgaagaccgcattcaccacgcgatacgggctgtatgaattcacggtgatgtcgttcggtctaaccaatgcacctgccttcttcatgaacttaatgaacaaagtgttcatggaatacttggacaagtttgttgtggttttcatcgatgacattctgatatactcacaatcagagggagaccatcagcaccatctccgtctggtgttgggaaagctgcgggaacatcaattgtataccttcgggtcacgccattgcgaggtgtacacaggtttcagacaaaagggaagctcgcacctcggtatgtgggtcctttccgtatcattgctcgacacggagaagtcgcttaccagctggagctgcccgcctccttgggcaacgtgcatgatgtgttccatgtgtcgcaactcaagaaatgccttcgagtgccatccgagcaggccgactcagagcaaattgaagttcgcgaagacttgacctatgtggagaggccagtgaaaatcctggacaccatggagcgcaggaccaggaaccgggtaatccgtttttgcaaggtccagtggagcaaccatgccgaagaagaagctacttgggagcgtgaagacgagctgaaggcagcccatcccgatctcttcgtcagttcttccgaatctcggggtcgagattccgtttaaggggggtaggtttgtcgcgtcccaaaacgactctaaaatacatcctcgaaattgtgccgagaataattaaaattcatgtgaaagcctccaacaattaaaatgtgcaaatataaaagtcaaataaggcttggaggatttttgtatatttcctaaaagcctaaaatgcgtaaataaattttagtggaattttcagagcacaaataataattgagaagaaataaacaaagttaaaaaggttttataaaaagaaaaaccctaaaataagtccttttcccccccttcctctcttgggccggcccggcccaactccctccctctctctcctctcccccgcggcccatcggcctcctccccgcgcgcgcgccgctgacgggcgggcccgcccgccaccctcgctgacgggtggggcccacctgtcatcgcctacctcgcgccgcgcccgccgccgcccgtgccctagcgccgccgccgccgccgaatccgccgcatcccgccgtccccgcgcgccataaagagggggaaatcactccccgtgattccctccctctttccccccactttcccctctctctctccctcggattcgctcggatttaatcccgcaaagttcgccggcgcatcaatggagcccgagatcgccgcgccggtttccttcctccccggccgccctctctccctcccgtccctatataattgttccccgtgcctcactcctccgtttccgccactcgccgctcgctctttccgtcggattcgtgctcgcgccgttgtactctctctccgccgtcgccgccgagctccggttcgccgccgtcgtcgctccggacctcctcccgtctcggcgtcacctccttcggcttcgccgcgtccccgtcaacctcgtccaccccttcgtttcgcccgccgaccgtcggagcgccgccgtcctcgtcgatccgaaccgcgccgccatcttcctccgctccgatcgtcgtctccgccgccctcgtcgtcccggggtgagccgaggaccgcccgttcgcttcccccttccctcctctctctcgggtgccgctccgccgcgccgttggtcgccggcggcgaccatcggggcgcgggcgcgccgcctcccgtcggccgtgccggcaaggccgccttcgggcgcgccccgcggctgccaggtggggcccggccgtcagccgcccgcgcccgcgggtgcggctgacgcgtgggacccacggcgccggccggcgtcagccgcgtgcgcccggtccaccgtggaccgagaggctgacgcgtgggccccactcccgtggacccggtccgcgcgccctctctcccggctgacgcaataaatccgatttttaattaaaatttaaatgaagaaattcgcaaatatccatttaaagagcatataaacttcaaatggccataacttggccatttgaactcggaattggaccgttcaagtctctaatttttccttaagaagtcaagaacccatttttgtgctttgtttctgctgttatatggagtttattagagtaaaagccttttcttttccgttggtcgtgtagacgctgcagcttcggaagatccgctcttcgtggaagttgaagccgacgtttgggaaagcgagcaaggcaagtcacatcatctttgaacatattgaatcccag

SEQ ID NO: 5075 - DNA, 10375 bp, Oryza sativa
ccactcctcgtcgtcgtcgtcgtcacccgggccggcaccgacttgtcgtcgtcgtcactagggcagtgccgatctgagggggtggcggcgccggctcgccgtctcgctgcaagtcgccgctgtcactgcaagtcgccgccatcgccgcaaggagagaaatgtggatagggttgggtggatggagagggttttctaagggtattctgggtattatgaatattagttgtatttctttttcattttaaatcaaaacttaacggactaatggaaatagggtcagacgggaaactcgtttttgaaaaggagggtcaaataagtgttgatgaaaaacaagaggcctaggagatctgcttagctccagtgcaggtccaaaactcgccttcgggtatgctagcttgccagttgatttgatccagtaatcaacaagaaataaagacaaagaaaccgcggttaaacttataaacgatagccgatcggctaagggccaatgacatatcatttatctttgaggcaatgtcatatatgtatcgatcggcagtcatgaataaataagaaagaactaaatctactcgatcggctgtagatattaacgatatatactccttatatcgatatatacttaaatcaagtgattgggatagatcggtcgccatgccgagacagtataaatcacttagatcgaaatatatattaataatgggacaatatatgttcatagcatagccgatcagatagatctagcatgtatcggctagtactccgatacgactctatactaagatattaaagcaagtagaatataccaaacaaaagcctaatatacttaaatgcaacaagatctcaacataaagggcagatttaacatgtcaataaagcacataaaacaaatatagttaaatcaggtaagatcggctgaaactccgatactaccctaatcggcaaccaagaagcaggctagagattgagattctaatcacgactcaaaagatcaaacaactgatgcagctataagtatgaagggaagaacaatatctagacaatcaagctgctggaagtttcatagagtggtggatatcttatataatctgaatcaacatcgatatttaacctaatcggctgccctctatcgacagatgttagccgattgtaagttaaatagcaatattgctagagattatgtaagatatatgataactcgatgaattacataaacaagattagagtatcataaagatgaaagcactaattccgagaatgcaagccgtcataacaagttttacctcttgttgaagatcgaaaccgatgcagcttaacccgaaagcaagaactcgtctaaataagactaaagcaaaaagggtggcgatgcaccgagattgtattgaacgtgtatgttcaatgattacatggggttcggggtctatttatacccgaaaattacaaactatgtccataccggacacgactcttatatctaacaaaccctaagataccataagtctttgcggcagacttttgcccaaacatatctctaaggaaattacataaaatatcctaattaatagagacaattgccttcttaggactctattaatgtgtggcaatcatcttgaagcatatcaactgaacccgatgtcgcacaccaaatcgtattgtcggaatcagctgtatcggcttacccagtctgactcggactcagccgattctgatcgtagccgatttggactccaaccgattcttactctgtttccgcaacgatcttcaccttcgattccgcttcgattcagtcttcttctccgatactaatattaccaaacttggtcgttaacacatgccccccaagtccggaatattggataatgtttcggattttccatatgccgattccgaaagaaatccgctcttgtcattttccgaccgttactcccatgctttaaatactaaccgttacccccaagaaatctcacatcatcttcttccgttttcaccgctgaagcaaattttgccctctctctctctccggcgattcctccgacgcaaaaggcgatcccagggcgattccatctccggccagatctccgcctgcagtgatgtcgtcctccgacaacctgcctactgtgccgtcaaccgagtacgatgaggtgagttcccatcggttagatctccttttcccgtatcggattgatttcccttttcctcatcttgttttcttcttctcggttcttttggatttgcaacatctttctaatttgatcgcaattccaagcctatctcacgagaatcattattttcttggtccaatcggcaaccttgatcccaccgagttcattattggtgaaacaaataggattcctttcagattagccaacccagatctacatcactggaagaacacctttaaatcttggccatcacttgagaaaacccacccgagaagagctggattacatggtacaagcgcgtatggccaacaaaaaagttcattgggataagatcggaatcggccaagcgcttgcccttaccatagccaactcagctaaggacggacctctgatggctgccgctacctatttctggtccagcaccatcaatgcctttctgttcaaccatggaccgatgactccaactttgatcaacaccaccatgatcactggattagatgtaacttcatcggctaaccctatgagtatgaataccaagaaccaatttgacttcaagaccaaaagcataggaggttggtctggctatgtagcggcatatatgggcaaagggcctatcactcctcgggagcatgtagctttcttactaatgtggctagaaaagttcctcttctgtggatccagctatggtcctacaaccaattggcaatttgtagccgaagccctggaatcaaagaagcaatttcccttaggcaaaatcctcctcggcaatctataccaaatgctgaataatgcatcagccaagatagctgtcggctcagtagtgggagtaggtggaccatggtggctgctgcagacttggctaaatctgatggtcatgaaagttgtcaatcggccatctgtgacaaaagctgaatttccaaggttggagccgattgtggaagatgcccgggtttggtttccttatgaagactcagcagaccttgagcttccatcggactttatatttgaatacatcaatcatgaaagatatcaaaagtccagggatgtgttctcagctgcaatcagcccatgcattcttcctttcggcattcatcaaggaagaaacattcaagtctcttatgaattttatcacccgatgagctcagctagacaacttggagtgggtcaactcccaatcggcttattcttcgccgataagatccaatgccgaggagaaatttcatcaaccttaatgatggatcggctgctaaaaaactaaccatatccatggcgactctcttctctggcgacgtccatggcgactctctctagaagatggtcacgccggcgccgcctactggatgggatttctccacgggggattccatccgtgatgaagtttggagccgttttggttcaccggttcacttttcctctcattttagccgttctacgtttcgattagtggttgatgttcctcgttcttcgtttcgattgacctcgtcctcggtggcgcttgctcttagagcggcgattggtggttctccgtctgatcttcatgttgatcctttgattgatcgaagttttacttttctggtgtgttctaagaaagttggactctggatctactctctcagatccttttcttgtaaggatttctcggttcggtattttctctggaagaatggaggtcctgattggagacgggaatgggatctctggcaagctgagcaatataatgaatggaccattgtaaagcggcgatattcttcgggtaatcgttctcagcatttgataaaggcttcttctgtttttgatcgtcttaagtttgatattccatcatctccgaagaggattactcagaagtctgattctattgtctccaaggaaatttttcttgctaattctgatccgaaaggtacgcatcttaatcgtgataagcgcggaattcttccttttcaaattagaaccgatctgggctggtttgttttcggtgtttgggctctgatcacctcatccgggattgctgctcggaggttagatgtttgcattgtaaaagtctgggccatattaaaaagttttgcccttctgttgggcttgttaagtctccatggcccaataaagtggtgtctgctaggggcttgggaaaaaaactgtctgtcccaaaaaaggagcaacctttgcgcattaaaactccacctaatcaggtctgggttaaaaaaaataagaaacccccttcgtcttctccttaagttgctcgctctctagtagtggcgtcagaatcgcagcctcaacctaatcctttccctgctccaatggcaaatactaaccttaatccccatcgcttcctgcgtgcggggcaagtggtacatcaaggtggtgatcgtgtgccaagaatcaacctctctgctgctaccaagccgccaaggtctcatgaagagtatgccagctttggttgagcccatcttgccggaggaactttgggatgatcatcggattctaatttctgaatacattgagcaggtgcagcactttactgttcgccgtagttttcctcatgcttcagctgtgggtctattcaagtttggttctgccatggttagggacctgctagtttatgctcccccttttatgtatgatggtatacatcaggtcaactttgtcagacatgatcagagtcctaactggcgtgctgctccatttactagaactgtctggtttttattgctcgatttccccctagattacatcaacatgcagtacatttgtctggttgtctcttctttcgggcagttggaggaatggtatcaaaatgacccaatagagggcaaagttttggtcagagctatgttcaaggactttgattcagtcccaaggaaaattgttcttcaagatcccacaagtggtgctggtgaatcctggaccatctctgtttttaccttggagggtgattttgctgatatttttccccctgatgaagaccttccccctactggtccaaataatgatgaaaatcctgatggtaatgatgatgacgatggtaatcaagataatatttggcaatttggcccacatcctgtggttcttgcagaaagaagaccaggcttggaatcaggctgctgtgggccatcaggccatggaccttgaacaagctgctcctgagaacatgggccagattgataacaaccatggctggaatctggttgctaacagaggtttaattttcacccttgctgatgctttcaaagatgccttcaattcctggtatgccaactctctggcaaattcagcccttcatcctgcaaagcttaattttaatttgggaaatgaaattgtgccgtatgattctatttcttttgaatcttctgctataatcctgagccgagaacctctagctgtcatccctccgtagtctgtgatgcctattttgcctgaggatccttttggctcaatggaggaacattcttgtccttctactccaacaggcatggaaatagagattagtcttccaccttcccctaggaaaagagggaagaagagaacaccttttgttgactctcaagttagaaggagtggtagacttctggctcttagggatggtttcaagaatattctgcaagaggatccaaacatgggtgttggaaagccaagagggaaggcagttaaaaagctgaaacagttggctgaggtaagtggaattattttcccatccgattcattatcttctattgatttaaatcctgatatatcttgtgaatctgaaagtgatcttacatctgttatacctgctaattgtgatatatcttttctccagaagattggatctgagatgtgtgggacttcccttgaggaggtttcaagcttggtggacttgggagaagctcaggtcatcaagctgaaaaccattggaccatccaatgatgaagcctagttctatcagacttttagggctgctagttgcactctttaggggcatgtgtttattcctttatcaacccttttattttgtgtttaagttatgtaaactctatgatggtactatgtgttggtgtgcttgggacctgcatggattattcctgcttgttatctttctctcttcaagactagttgtcaaatgaattcggctatgagaaattggaatgtcctctgctggaatttaggggtctgaattctgatgacaaatggttagccactagaaataaaattgaggaaagtggttgcgctgttttttgccttcaagaaacaaaaagatcttcttttgatcattcttacataaagaagtttgctcccaaacattttgacaagtttgctttctctccatctgttggagcttctggtggcattttagttggctagaacagttcagtttttcggggatcagatattgtaattgaaaggtttgctgttaagattactttcacctcaaatcattctggtttagtttggactttcgtttaagtttatggtccctgcactggtcctgaaagaaataacttcctgtcctggctccaccagttgaacattcctgatgatgacctctggctcattcttggagactttaacttctatagatcagttacaaatagaaataggccgggtgcagacatgaatgacattttcctgtttaatgcaatgatcagtgatctgggtctagttgagttgcccctcaagggaagggctttcacttggagtaacatgcagcatagtcctctactagagcaattggattggttttttacctctactgcttggaccttaaccttcccccataccttagtaaagccacttgctcggtctacttcagatcacacaccttgtgttgtgcaaattggaactaacatccccaaggctgacatcttcaaatttgaaaatttttgggtagagcatgatggtttctttgatttagttcaatccatttggcaaaatcatgggtatgaaggtaatgcagccaagaatatttctgttaaattgaaggctttgaggaaaggtttgaagaagtggagtaaatctctctctaaacttcaattgttgattaaaaattgtaatgctgtcatagcttttttggactccattgaaaacttgagagatctcactgttcttgaatggaactttagaattcttatcagaaacaagctactactatacctgaagtataaacaaatttattggcaaaagaggtgtactatcatatgggccaagtttgggggtgagaatacaaaatttttccatgctatggctactgagtcttttagaagaaatgcaataccctctttagtagattcttttggtttagtttgtacaagacatgaggaaaaggctcacatagcgtggagtgctttctcttcaacaatgggttgttctcagtttgagtttatgccttttcagctgcaagaacttttccatgcaaatcaatctcttgcttctttggatcaaccctttggtatttctgagttagacaaaattatacagaatctgcctatagacagagcccctgggcctgatgggtttaatgggatgtttgtttagaaatgttggccaatcatttgtcaggattattatagacttgcagctgagttctactatggtacactggacctggatcctttaaaccattcttttatcatcttggttccaaagaaatctgtgccaaaaggtataaatgactataggacaatatcactcatgggaatctctcttaagatttaaacaaaagtcctagctgatagactgcaaaaggtgatattggagataatcagtcaaaatcaatatggattcataaaagggagaactatacaagactgtctagcatggaactttgaattccttcatcagtgccatcactccagaagggaaatagtccttctaaaattggactttgagaaggcttttggcactattgaacatgaagctattttgcatgtaatggaagccatgggttttagtgctacatggtttggatggataaggaagatcttttcttctgcttcttcttcagttctggtcaatgggatacctagaaaaaatttccactgcaagagaggagtaaggcaaggtgatcctctgccacctttactctttgttttaggagctgaacttctccaggtcattgttaacagagcttatgcaatgggtcatctatcaaagccttttccatcagactttgacccaaattttcctattgtccaatatgctgatgacaccctgctttatttgaaagctagtggttaagagctctttactctaaaggctttattgcaaactttccagctgggaactggtttgaaggtaaattttaataaatcttgtctcatcccaataaatgttgatgaatggaaagctcagaacttagctgcagttttgggctgtcaattgggatctttgccttttacatatttgggtttaccatttggtaccactaagccaaaggtaatagattttgcacctttagttgacagaattgaaagaaggcttacatcaaatgcttcattcttgtcttacggagaaagacttacactggttaattcagttttctcttcactacctacttattacatgtgtactttaatgttgccaaagacagtgattgataacattgacagagcaagaagacattgtctttggagaggctctgaggtcaactccaataaaacatctttggcagcctaggataaagtgtgtaagcctaagagaaaaggtggtttaggagtgctaaactttactatccaaaatcatgctctgctcatcaaatttttggacaagttttacaataagaaggatttgccctgggtcaatctggtttggtttgcctattatggtaactctgtccttcatttgacaaacttgaagggctcattctggtggagagatatttgcaaactaatggatgtctttagaggtattgcaaagtgtaatatgaaaagtggaaatacctgctccatttggtatgatgtatggatgatcaaccccctctttttcacactatgccaaagctttgttcttttgctcaaaaaccaaaatgcatctgtctctgtgtcgcgaccgggaaaattgcattttcccgaacgctagtgtattaatccccgtcccaggaaaagccggggtacaccatacaaacatgatataaaagacacatctttattatatcgataatatttacattattacaaaggcacttaaggcctgacaatcaaaaataaacagcaacggactagcgggcctacggctccatcttcacaggcgctcaactggggtataagccaggactccacctaagacatcttctccaaagcttctcttactgaaggggggagaaagatagagcaagaatgagtacaaccacagtactcagcaagccacaccggcagatgcatgattaatgcaagggggtacaaggggtaataatataggggttaagttttgcagaaagcagcatttaaaagtcacttagttgctcaaagccattttgtaaagacgatcctagagctacacagtattattaaacaaggccgtgaaccctcacgaacctgccttaacccaaggcctacgatgatttggaccgaactggcaacccgacctgggttccagctcgtcccaagccaacccaggccaaccattccacattttagttgtttgagcaaattttaagaattagaacactgacttgggtacattgctcggcttgcccatatccgagggctcggctattcgaatagatttactctgatcagaggtgtacatctttacccacaagacacatcttcctcacgtgtaaccacgcgccacataccaccacggtatacggacggaagacgtgacatagtttccaacccatcctagccttagacaagagtaccaacccaatcccacctacggccgggatacccgggacaggcaggcagaactgagcccctagcagcagggcaccaaccctctgccgtatgacatctcgactaccgggccgcagctcgtgtagccttcatttgccctggagaatgtccatcgacgcccgacttcatccatctccaatccgtgtacttttgtttatgactagactgagccacaaactaagccttacccattagacatgtggaagtacggtagtgctttgcaacagaggcccgagcttaatccttatagtggccggggtgctacttcccataactggcatgcacccaaaccccaccgaaaacaggttttaggggttttgaaagaggaagagaggtgtatgtccaattcca

SEQ ID NO: 5076 - DNA, 6295 bp, Oryza sativa
atctcggccgccattgatgacgccggcgagggtttcgggaataaatccgagcgaatccgagggagagagagaggggaaagaggggggaaagagggagggaatcacggggagtgatttccccctctttatggcgcgcggggacggcgggatgcggcggattcggcggcggcggcggcgctagggcacgggcgggcggcgggtgcggcgcgaggacagggatgacaggtgggccccacccgtcagcgagggtggcgggcgggcccgcccgtcagcggcgcgcgcgcggggagaggccgagtgggccgcggggaggaggagagggagggaaggagctgggccgagccggcccagtaagggaagggggggggaagaagactttttaggatttttctttttataaaaccattctaactttgtttatttcttaataattattatttgtgctctgaaaattccactaaaatttgagggctccttttagaccaaggagaatttaacaaaaattctccgggccacatttgaatttttcttatacgcattttagtgtttaccaatttcttttcgaattttaattaattctattattccttttagagaatgatttttatttcgggatgaatttatcaggacgtgacaaatccaccccccttacaagaatctcgtccctgagattcgaggaggctagcatgaagataggttgggcggtcttctcttcttgtctgacttcttccgctccgtcttctataacaaacttgcctaacaacacttctccactctggactgcttggctcgatctcctgttgcaggtggaatcttctcttcacccgacttgtccctagttgaacctttagctgacttcgactaggttgcggcacttgaagatggggcttcagttccagaacttcttataattcatatcttcggcgtcaacctcacacaagttatcaacttcatatcatgtgtcgtaacctgcttgtcattactaggataccatgcttggcgtttccttccagcttaccaccatatgctttagactatgatatcccacttaccaaggataccatgattgacaacttgccattaactgtctcattttagctttcctggtctccggtgctaggtacttctgctattcgatgcaagggtcaaccactctaactataagttatgcttcccaggagaaccaatttatcccacttgacatgctttgacgtcttcccgaatgactttgctgctggacttgttattgtctgatcgtgatcctgccagatctgaagcttcgttgttacaggtgattttaatctgacctctgtagactatcttcgatcatatcacttggttcataactgggaatagctcccacgaacaagcagctcggattcactttctttacattcagtttacttcccattgttatcttcaggttgtcctcagttagcattcaacgtattcctttacacctttaaccttgatgtgttctttcccattggatcatctcccaagacatggcattacctggtaaccggtgcttgcacttttcactccgtgtagcatctgataccgagttgaagatttcactccctgccttcatagaaacacttttacctaggtcatattgcttacttaatgacaaggtgactgttgcggggcaattactatcaggggtcttccttgagcgatgcagagcatgtttctgtttatcaatcacctttcggcctacttctttcatgctggagaacatctttgccaatctcttttatcaatcatctttcggcttatctctaacaggtggtattctttaatgtggattgcggacgcttctggggacgatgaggtcctttggcttgctgcctttcagtgaaaccttgatgtggttcgtcacaaagctgcactgactaccttcagggaaatacattgcttgctatctgtatctatgccactagggtttaattgccgatgatcatctttagtgcttcctcgagatggggagcatccaaattgttcttctgccatatcacctttgacccttttctgatacctgatagactaattaccaaccatcgactactatgttctcaattattgatgtctcctggatcttcttaactgtttgcaggtatatccgaacttatcaatgtagaggcatggcgggtacccttatgggtttcatccaacaagccttatcttgatctgtaaaaggcgtatccaaactcctatccccaactactgtctcattggctttttaacccaacacagtttaattggttttcttttccatccacaggttggttattaactcgaggttagaatatagttcctctgacacgagaccctaggtctcctttgtcagtaaacaattatacacctgatcacatatccgcatcttccaaaagaatcctcttagaacttgtctgtattacacatttctcccttattacacgaatacaaggcactgccttaaacaaaaagggaaggtgcttatcatcgatacattgtatcctcaacatgaatcatccctaaacatagcaagctcactgtttacaggcatgaatatatttatttattacatgattgctgcaaactttcgattacacattgataagtagcgaactggaaaccacaaacatggatacatagctggcattgttctagtgactgcatccttgattggttctgtgatgatgtgataggactgcatattgctattattcaccggagaagtttccttctgattgctggttgaggcgaataacggtcttctgctcggtatcgccctccggaggttgattgccctttgcttggcctggagtaggtcggggagagacacaacttctttcatcgacgacaattctttgctgaggctgtcggtgcagagaatggttggtgttgaaggtattatcgctatgatttattgcagagtcaggtgcagcaggaggagcattggtgctggggatgatatcgtcgatgttgctgttggagctgactagctgatgagacaatcgtagggttgttcgttggatttctgcggtcttggtcaacaacaccctgagttggcaatccttgggcacatggtttgcaccttcgcacagaaaacatgtgaccttgcgggtgggacactcccctggtggatggtcttcttcacaatgagtgcagagtgtgagacacatgctagcaacgtgtccaatttccccgcaacgggtgcatgcctttgattccatctcttcctcgccgagatgtcggggagactcatcttcatcatccgaggagacttgatctgacccttcactatcagatactctgccaccatggcttaggaggtgctgggtcaactgtcgtgcacctcggaaagtatttcctctttgacgtctaggaatagttatccctgctggaggccattcggtgctggtaatagtcatcttacgtacttctgcttcagttcgcatcggtgcttttctcttctgattcttactcttcttgcctttggcttgcttagtatgtgaccccacgtggtacgagaggctaggaggaaagcatttcccgggattcaatggattctctccgttgagctctctactttgcacactaggctgcaagcttgacttggtgtgaggaggctggtttagcgatgtctgccctgctaaaccaagggaaggggcttctttgacatatacccatggacaattcagggcatagtgtccttgctctctgcaatcatgacaaaaggggacatcctcttctggcattggaagctcattgacctgggtggcaaatgctcgatcaaacacatattgattttggtcttgacttccaaccaatggtagctgtgaactaagcagcatgcttggaatggaccaagggtgtgccctggttaactctcttgaggccagtggtggattgagttgaaaacttgagttacttgaggcatacccgctgacattctttcctttttctctgttaaacatctgttacagggattgaggtgagagaggaaacaagccaggaaagaatagaccagaactagagataggaccttaaaggaactaactcttcttgttgatgtgttgtttgtttcacttattctgcaagttgattaagcaaacaacctagcatggttacatcacaacccacagatgcaaaccacgcgctacacacacaagcaaggaaacacacgacaaacgaaacactagagggtggcttaggttctgcgacgggttcccaagatcttcactcctgcttcacagctggcttcactgcttcctccgcttcgctagcggatcctgcagtcttccggagcttcggcaaacgactgacgatgtcttcttcttcactgacctgaccatctagtactagttgaaaatccgaagaagggagaacggagtaaaccttttgcaaatagcattaggggaaggagaaaaaggaactttcacaaatatatttatttataaaatatgtccttaggttttatccacttggcttatcctacagtcgagatggctctgataccatcttgtcgcgaccgggaaaattgcattttcccgaacgctagtgtattaatccccgtcccaggaaaagccggggtacaccatacaaacatgatataaaagacacatctttattatatcgataatatttacattattacaaaggcacttaaggcctgacaatcaaaaataaacagcaacggactagcgggcctacggctccatcttcacaggcgctcaactggggtataagccaggactccacctaagacatcttctccaaagcttctcttactgaaggggggagaaagatagagcaagaatgagtacaaccacagtactcagcaagccacaccggcagatgcatgattaatgcaagggggtacaaggggtaataatataggggttaagttttgcagaaagcagcatttaaaagtcacttagttgcccaaagccattttataaagacgatcctagagctacacagtattattaaacaaggccgtgaaccctcacgaacctgccttaacccaaggcctacgatgattcagaccgaactggcaacccgaccctgggtcccagctcgtcccaagccaacccaggccaaccactccacattttagttgttgagcaaattttaagaattgaaacactgacttgggtacattgctcggcttgcccataaccgagggcgcggctattcgaatagattatactctgatcagaggtgtacatctttacccacaagacacatcttcctcacgtgcaaccacgtgccacataccaccacggtatacagacggaagacgtgacatagtttccaacccatcctagccatagacaagagtaccgacccaatcccacctacggccggaacccccgggacaggcaggcaggactgagcccccagcagcaggacaccggccctgtgccatgacatctcgactaccgggccgcagctcgtgtagccttcatttgccctggagaatgtccatcgacccccgacttcatccatctccaatccgtgtacttttgtttataaccagactgaaccacaaactaagccttacccactagacatgtggaagtacggtagtgctttgcaacagaggcccgagcttaatccttatagtggccggggtgctacttcccacaactggcatgcacccaaaccccaccgaaaacaggttttaggggttttgaaagaggaagagaggtgtatgtccaattccaccataatccaacaatttcatagtgtccaaatgatatgagaattcccaaagtctaaagttataaaaccacctaatattgcctaattaatcagcgaagcatctacctaaattcatactagtggaaccataaatagagtacccactagttggggttttgtttatcctagggtgaacaaggtaatagtaacaatagcaataataatgaggtcataacaaaggtaaataggcatggctaaataaaacagtgataacgcgggaatttaaataaagcgataatgcattaatttaaattaaaataattttataaactgggattcaatatgttcaaggatgatgtgacttgccttgctcgctttcccaaacgtcggcttcaacttccacgaagagcggatcttccgaagctgcagcgtctacacgaccaacggaaaagaaaaggcttttactctaataaactccacataacagcagaaacaaagcacaaaaatgggttcttgacttcttaaggaaaaattagagacttgaacggtccaattccgagttcaaatggccaagtttagccatttgaagttatatgctctttaa

SEQ ID NO: 5077 - DNA, 14274 bp, Oryza sativa
gcacttgcatatttgctgtgtgccttgctgagtatgtcatatgctcacctggcaataaccaatcaccgtcagttgaagaaaaaggatccacagggagaagtcgtttggcttatacaccagttgacctgcctgtgggagtggagccggagcttcgctagattttattttccgctgcagttttcttcttgatgaggactaagtgcctcataagtaagtatttatcgttttagttaatttgatgaatctgtatattaaattgtcagtttgtgtacctcggttgattcctggacgaggattttatgcacaaattagttcggaaattactagtgaatttccgggcgtgacaagttggtatcagagccatctcgactgtaggataagccaagtggtcaaaccttaaggactaattttccgaaaacataatttgtgaaaaattttcctttcttccttatctagaattctttgcaaattgtttcattgtctactctcctctctcgttcaacttgagtagttctgaaactagtggttgaaacctgaagacgccaatgaggtctacttgtagaggtcagtaaagtggatcgaggaaggaccgaagtgcccagatgtcaagatagaatgaagttggcatcctaccttagaacctatgccgccaaagtgtctttgaagaatagttagtagggtagaacgtttgttgtttgttttgtgtgtaggtatagttgcattggagtagttcattgatgagtgtgtgactatactaggttgcttgcttaatcaacttgaacaatataatgaactacacacaccagatcagtggtaacctggttaaggtcttgtctttagtgtaacctctctcctcctatcttctctaatctgcaacagatggtgaacactcgcgccagtggaagtggaaacaataacaatgaagagaacccaacctttgctcaagtgctggctcaacagacccaattgatcaacctgttagtgcaacaaatgcagaaccagcaagggaacaacaatgtcaatcctccgccgccccagaacaagttagttgattttcttcgtgtgaagccacctaccttctctagcactaccaacccagtggaagcaggtgattggttgcacgctgttgagaagaagttggaattgctccagtgcacggatcaggagaaagttgttttcgcttcacatcagttgcaaggatctgcttcggaatggtgggatcatttccggatgaacagagcagaaggacaaccaatcacttgggcggagttcactgaagcattcaagaagacacatatacctgcaggtgttgttgctttgaagaagcgtgagttccgggcacttaagcaaaaggatcgtaccgtgacggaatatcttcatgagttcaatcgtctagctcgctatgctccagaagatgtgcgtactgacgaggaaaggcaggagaagttcttggaaggcttaaaggatgagctgtcagttatgttgatctctcatgactatgaggattttcaggagttggttgacaaagcaattcgactggaagacaagaagaacaggatggataaccgtaaaaggaaaatgactgttttccaggaggcacaaggtagtcgccagagacagcgtatcgagccactccaaattggtgaatctttttccgctggtcaaggacagtcgcaacagttgaacatcggtggtgagatcgaatcagagactaatgaaagcaatgaagtaaacatcgagcaagctaatcaaccggtgccagttcagcaggatcagtctcaagagaataacagtagtggaagggagcagcaggtatgtttcaactgttacaagccaggtcactttgcaagagagtgtccgaagtcaaagcatcagcagccgcaaggtcaggtcaacaacattgtcgtcacaggagccaatgcagtgccagttgcgtcttcaagagttgcgttctcaagggatacagctcagccaccagtttcaaagcagcagtagttttctttaaagccttagaataattatcggagttatggaataataagatagactgcagtttacctatgcctttttctttctagccgttccgaatctcgggacgagattctttgtaaggggggtagatttgtcacaccctgattttcctcttaggatttataaattatttaataaattattaatagaatttatattaaatgttctttaatttacaagtaaatttaaatgtgggaaataaaattttctaaatataaagcatggatggatttaatttttattaaattctccatggttaattatactctctggaattttctcggatttttcggagctcaattattaattttaatcatacaaagagaagttcagcaattatttaaatattaaattaatcatcaaatgatctaattataattgttaagtgattttcttgtttaaaaatccttaaattataaattgttgtttaaaaggaattattagaaatgattttaaaagcttaaaagagaagatctaattttaatttgctaaatctcaatataaaattgggttagataaaattttattaaatactatgcttgctcctctattttctagatttttctgggaattatttgagcaatggaagtatttttaataaatgaaacatcatttcacaatttatttttattgaaaaagttcaaaaagcccttccttagttgttgggccgaattcggcccaactctctttctctctccgcgcggccgaacaggcccatttggcccagccgagccggccgccctcctctctctcgtgtcaccgacatgtggggcccacatgtcggtagcatcttctacctccagccgccggcacaggccgagcccaagccgtcgcccgagccgctttcttctcctctcaaatccgctccaatccggcctcttttcttccggatttttgaggggttttgatcctctcgttctcctctatctcttcccccaagttttggagcaaatcgttgtgtatcttgttcgaatcaaactcgttttcgagtttatctccaaaaccgagttttgattttctcggatcgattcctcttgtttggagcccgatctcttcaatccaaggctatataaagcatcccctcgtcgccctctttcgtttgccccctctctcgtcctctcccgtgcaccgtagcgccgccgccgcgtgcacttagccgccgccgtcgccggccggtcttcggtcgcgtcgcgtcgtcgcctccgccgtcgccgccgcttgctgtcgccgccgttaggtacgccgtggtgaggagaaccccggccgccacctctctttcgccgccggccgccacagctcgccgtcgccgttcaaccgagccgccgccgtcgcccttctcgtcgccggccgtcgtcgttcgtcgtttgtcgtcgtggtgagtaccgtcgggttcgtctcgtcgtcctcttcgcgtaggtgctctccaatcgcccggccaaggtccctagctccggcgaggttgccgcccgagtcggccggccatggatgacgtcatgctgacatcatcgatctcctctttttcctttttttttaatagattaaatcttcggaaaatcatatctaaataaccgtagatccgtttcaggtggttcaagttgctaaatttttctaaaataaagatctacatattaaaattgtccataaattgaattaaatttatttaattctttttaaatgggctttaattagatttaatcttgtaaaattcataataaattcttttgaagtcagaatgaggccgttcaagtctcataattcatctaaaattatgatctacatgtttgtttactttatatgtattgtttatttggtttttattagtctttttcttcgttttgcgtgttagcttgtcgtttccgtcgttgcgaaggttcgtgagtgcgtcggaagtgatcaagaagattaattgaagaccgattattgcaaggcaagtcacacagatcctaaacacaatcctttgagcatgttgatcctatatttaaattctctatttatttcaactgtgcatttatttttgaatgtcaccgggtggtgtgaacctattcctttgttatggccaatttgcattgaatgccctattccttgataccttgggtaataaattgagtagcttgaaccttatgtattggtttggttcagctaaatgttatatatataattgcttagcaatgcttagaaacattagctcactaatgggatgagtcatatatactacattattatttatggttacattaaatggtagctcacgatggttaatcgtgtgatgataattaattgataattaaaacctggttaaggtgggttgtgagcatatggttttgacggttgtgctcatgacaattaaggaccggttcgcgagctactgttgtgaaacattaaccgtaccaaccacaagccagcatgggcaacggctttaccttttgtatagcatgattcattgcggggtgccagactgagaagcggcgagaagtccgtgggggtcgctggggagtccatgcctctggttgtagagggggtgattatgatccaggaatggtgcactgtggtgagttgtgttatgcagagggtattgtcacagcctctattcgggtactttccagtatcgcgacgcatggtagacatgatgctgaggctgtgtcttgtgggtacagtggtacacctctggccagagtaaaactattcgaatagccgtgcccgcggttatgggcgagttgagcaatgtttttcgtgattagtctcacacctctcacaataattatggatgttataactggtaataatttgcttagctcctggtttggagttagatctgtacagccgggtacggttgttcaggatggttgggcctgtgcagcatgggtgtgctgttcagtgttgattaaaatttctgattaattactccactgttttacttctcttaaatctttgctaaatgctgcttttgcaaatgagccgatattatgccatcctttggtatccttgtgcacttgcatatttgctgtgtggcttgctgagtatgtcatatgctcaccttgcaataatcaatcaacctcagttgaagaaaaaggatccagaaggagaagacgtttggcttataccccagttgagctgcctgtgagagtggagccggagcttcgctagattttattttccgctgcagttttcttcttgatgaggactaagtgcctcataagtaggtatttatcgttttagttaatttgatgaatctgtatattaaattgttagtttgtgtacctcggttgattcctggacgaggattttatgcacaaattagttcggaaattactagtgaatttccgggcgtgacacctcttcctcgaatagaccaattggtgaactcaacagctagatgtgagttgttaagcttccttgatgcttactctggctaccaccaaatcagcatggcgaaagaggacgaggagaagacagcgttcatcacgccattcagcgtattctgttatgtcaaaatgccgtttagactgataaccgcgggaaacaccttccagctcacggtccaaagggcacttaatgaccagcttggaaacaatgtcgaggcctacgtccatgacattgttgtcaagacaaagacaagcgagtcattgatcgatgacctccggcaaacgttcgacaacctccgacgatatcgtctcatgctcaacccagagaagtgcacgttcggagtaccatcgggcaagctccttgtcacgcccggaagtttccccctttttcatgctttaaaattttgttaaataaatcgtctggagaaattgttttaattaacctagagatgagttccttaattaatgaatgcaattaataattggaattggcattgtgggatttttcttgagttccacatgtcacaatatattaacaggatttttagtggaattttcagagccttggaaataattttaaccaattaaaaatcaccaaagtgcaattttaaatcccacgaaaaatcctttcccctttttcccctttttcccttttcttttcctctttttccctcttcttgggccaacggctcagtccgcctccccttcctcccgcacgcgctcggccttcctcttgttgggccggcccatgcgcccctccctcctctccctgggtcaccgacaggtggggcccacctgtcggccccgtcttactcctccagccgcccacgccccaccgtcgaaaccgtcgctccccacgccgtcgtggccacgtcgctcctaccgcgcccacctcgtcgaccacctcctccacctctcccgcatcagcgcgcccgattagaggccgtgattcggtttgaatcctgtctctcctctctctctctcttcctccctactcccccacgtcgccggccaaatcgagagggttcccggccacgtcctcccctccctcgcctataaaatccttcccctgagccccctctctcgtttcccactctcgccgccccctcccgtgcctcctaccgagcccgcgccgcacgctgccgtcactagagccgtcgcttcgccgcgcaatcaccgcctttagcttcgccgccgcgagagctacctcggccgccgctcgctttccgtccgccgccgccgaaccccgattccctcgcatcgccggtgaggactacctctctctcctccttcctttcctctctctcccgtgcacgccgccgccctccgcacgtgcgtcgccgcgcttcggccatgcgccgccaccattcggccgtcgccgccgcttcgcgcgccgccggtcaccgccgtcggtggccgtgcctcgccgccgcctcgcctcggtcggccggtcggccttggggccgagccgagcccggctgacgcctcccccctcccttttctccccttcacgcgtgcgccgccgcctttggccgtgccgccgctccggccgtccgccgccgccttgtgcgccgtccgccgccgtctacccgcgccgccagtcaccgttggtggtcgtgtgccgttgccgctcgccatggccggccggccggctttgtgccgggccgagctatgcctagccaccgcccgcaccgtccgatcggcctcccgaccgatctggatcatcggtctcgtggaccggcggtggacaccccgcgtggtcccggtccacggtggaccggccgccttgtgccgctgacccatggggcccacttgccggcgccccctccctctctcttgagccgctgacacgcggagcccgcctgtcggcgcccccccttttgatgacgtcagccctgggtatttattgcgcaataaaaaattaaggactttttctttattagtaaaacacaatttatcttctaaaattcataagtaattcatccgagctccgtttaagtctatttaagtctcagtaaatcaagaaaaatgcaaagaatccattaaaaatggttttgtttcctgtttcagtagtcttatagcatgtttggcttgtgtgctttgtttgtcgcgtagatttcggccgtttcgtcgatccgcggtttctcgaagacgttgctgaggtctcatcagtgcgagagcaaggcaagtcatgcattacaattgatcatattgtacccaatttacaaatatcccgtatttctattaaatgttgcattcttttacaacgtcacgtgggatgggtcttattacttagccatttattgtttaccttatgccattgataacttgggtatcaaaatgactagatgttggtttagaaattgcttagccacgcctagctgaactagtacacaaatggggatcacattattacatagactttgactatgagcatagttttggattggtgccaccacaatggtgttagctaattaaaatgcactgaatggtgggctgtgggtgcatggttttgctggtcgcacccatggcagttaaggaccggttcacgggaaaccctgggagacttaccgtgcttaccacaagcgggagtgagtaactgcttgatctgaggtatagctcgaccctttcctaggcaccggtggcaagggtgagcgtgatggagttgggtcggccagggtgtccggttgtccagctgccggattcaccgcggcgcaagaggggaccgcccactgccttttgaggggtgggggtgaaaccttagcgtggtgtggatggttaggggagggttatgcggagggtcttgtcacgatttccccctttgcagtatcatggtgatacttcggggcatggtgacatgtgtggaatcgtgtcttatgggtatagttgtacacctctggccagagtaaaactattcgaatagccgtgcccgcggttatgggcgatcaaccagattcaccgtgattagtctcacacctagtttagtttaatgaactggtgtagttcaggaggttggttgggcctgttgcaacgtggtgtagcgttggacagtgattgattaatactgcttaattactacaactgttttactgctttcaactactgcttttaaatgcctgctttatgcaaaagaacctttagccttctttggttatatcatgcatcatacctcctcttctggtatgacttgctgagtacagtgggtagtactcagtcttgctctcttttcccccacactagagttgatgttcttctcagttggagccgtctcagagaggttggtttcatcgctgccgtcaaggattgcctgtggagtggagtcgccccgctaatgaagtcaagtttccaagtctagctcgttttatcttttccgctgcaattgcaatcttttctgtttttgtaagacgtggatctgtatgtcaacaattgccgtttgtgtaccctggttggtcctggacagggatttaatgcacattcagcttagaaattctagttcgagaatttctgggcgtgacactcctcagattcctcatctctggaagagggatcgaagcaaatcccgagaagatcaaggcaatcgagaacatgaagtcgcccacaagactcaaggaagtccagaagctaactggatgcatggcggcactgagcaggttcgtcgctatgatgggagagcgaggacaacccttcttcgcgctgctgaagaaacaagacaaatttgtgtggacacaggaagccgaagatgtgttcatcgcactcaagcgctacttgtcaaatcccccagtacttgttgctccccaacctaatgaagaattattcctctatattgccgccacaccatattctgtgagtaccgttattgttgtcgagagagagaaggtgcaaagaccggtttattatgtcagtgaagctctccacgacgcaaagacaagatacccatatatccaaaagctgctttatgcagtaatcatgacatcgagaaagctacgccactacttccaagcccacagagtcacggtcgtttcctccttccaccttggagaagttgtcacgcccggaatttctatccaaaattccaaacgcttacatgtgtgttaaaccctcgtccaggaatcaaccgaggcacacaatgacaatttgataatagagtacaaataaataactatttaatactcgcaaataacaaaagattacagaggtagatagttcctctcaaaaaataacattctacgcagcggaaaaaaaactataacaaactacggaacagctatggcgactccactccacaggcatcttaaccaagaacaagctcaatcctccagatcatcaccttcactgagatactcctcttctgatgaatgaatattgcaagaatgagcatatgacatactcaacaagtcacacagcaaatatgcaagtgcacaggataacgaaggatggcataatatagctcatttgcagaaacagcatttaataaatatttaagagaatgataaaaacagttgaataattaatcagtattaaataaacaccatacaacacacccatgttgcataggcccaaccacatttgaacaaccaaccccagttgaacaaattaaacctccaaaccaggaattatccattccaaaccaggagtcaaattaattaccacattataatcattaatgagtagtgtgagactaatcacgaaaaacattgctcaactcacccataaccgcgggtacggctattcgaatagtttaaactctgatcagaggtgtaccactgtacccacaagacacaaccccacatcatgtcaccatgtgcctcaataccaccacggtacctcggaaaggagttgtgacaataccccttgcacaacataacccattacagcgcacctttcctggatcataatcacccccttataaacaaggcatggactccccagcgacccccatggacttctcgccacttctcagtctggcgcactataatgaatcacgctatacaaaaggtaaagccgttgcccacgcttgcttgtggctggcacgttaaatgtttcacaacagtagctcgcgaaccggtccttaattgtcatgagcacaaccaacaaaaccatatgctcacaacccaccttaaccaggttttaattatcaattaattaacatcacacgatcaaccatcgtgagctaccatttaatataaccatcactaataataacagtataacatagtttataattaaaccctttaattagctacgtttctaggcatggctaagcaaacttacatatagcatttagctgaaccaatccaatatataaggttcatgctaatcaaattataacccataggaaaataaagtcatctccggccaataattaattgggaaaggttcaccacccgatgacattcgaaaacaatgcacagttgaaataaaataatagctttaaacgggatcaacatgctcaaagggttgtttgggatctgtgtgacttgccttgagcttccgcaaacgcttcggaaccttcctcaacggaaacgctctcctccggaacgtcggaaactaaagcaattaaacaaaaatcaacaaaacagtacaaaaacaagcataaacagtacatgtggatatttttaacatgtagatcttgattttagaaaaatttagcaacttgaaccacctgaaacggatctacggttatttagttatgattttccgaagttttaatctattagaaaattggaaaaaaagaaaaaagaaaggagatgatgacgtcagcatgacgtcaccccacggcagctggctagggtttgcgagctcgccggagatagagaccttggccggggatttggagggcatgtacacgtagaggacgacgaggcgaacccaacggtactcaccacaacgacaaacgacgaacgatgatggccggcgacgaaaaggacggcggcggcggctcggcttgacggcgacggtggagctccggtggttggcggcgaaaggggacgggcggccgaggttcccctcaccacggcgcacctaacggcggcgacggcaagcggcggcgacgttggaggcggcgcggcggcgcggctggagaaagccgacggcggcggcgagctaaagcaacgcggcggcggcgctacggtgcacgggagaggacgagagagggggcaaacgaaagagggcgacgatgtggtcctatatatagcattggattgaagagatcgaactccaaacgagaggaatcgactcgggaaaaatccaaactcggttttagggataaactcgaaaacgagtttgattcgaacaagatactcaacggattgctccgtttcttgaggggaaagatagaggagaacgagaggaacaaaacccctcaaaaacccggaagaatcggggtcggattggagcggaatcggaggcggaaaagggcggctcgggctcggcttcggccggctggaggtaggagatggatccgacatgtgggccccacatgtcggtctcccgagaggagggcacgggcggctcggctgggccggcttcggccgcgcgggagagagagagtgttgggccaaattcggcccaacggcttaaaggaggggatttttggtctttttaaaataaaaacaatttgtgaaatgttgtttcaattattaaaaatacttcccttgctcaaataattcccagaaaaatctagaaaatagaggagcaagcatagtatttaataaaattttatctagctcatttttatgttgaaaattttcctagaaaattagggtttagtttgtaggcttttaaaaataatttctaaaaattccaattaaacatcagtttatatatttaggatttttagggcgtgacagaagtcgtgagaaacaaagacatcgtcggccgcattgcgaaatgggtagtcgagcaaagccagtttgatgttcactttgtgccccgaacagctattaagtcctaggtcctcgccgatttcgtagccgattggactatgcctgacaacatgtcagatagtcagactgacagcgagacatagacaatggcgttcgacagcgcactcaatagccaaggagcaggggtagggttcatcttgacatcacctttaggagatcagttcaagcatgcaattcacctcaacttcagggcgaccaacaacacagccgagtagaaaggattactcgccatgataagagcagcagccgcactaggagccaaccgactaatcgtgaatggggattcagaactagtcgcaaaccaggtgcacaaagactacaagtactctaaccccgagttacccaagtacctcgcagaagtcaggaagctggagaaaaggtttgatgggatcgaggtccgaaacgtataccgcaaggacaacatcgaaccagatgacctagcacggcgtgcatccatacgagagccactcgaacctggtactttcttggacgccctgacaaagccatcgatgaaagaagaaaacgacgaaggtagcatagttgtccccgacatcagttcgggggctacaggggcagaacaagtcgttgccgacatcgagaccacagacgactggcggaccctgctcaacaaattcctgagtagcgacgagttgcccgaggacgacgcagaagccgagaaaataacccgacaagccaaaaaggggccaaacggggtacttctcaaatgcatttcgttcgacgacggcaaacatctcctcctggatatacacgaagggatctgccggtcagacattggtcggaaaagcctttcgacaagggtttttctagccaactgtcacgccctaaaaatcgactaaattaaaaatgcatattttaaatcatttttagaaattattttaaaagcctacaggctaaaccctaattttctaggaaaattttcaacataaaaatgagctagataaaattttattaaatactatgcttgctcctctattttctagatttttctgggaattatttgagcaagggaagtatttttaataattaaaacaacatttcacaaattgttttatttcaaaaagttcaaaaaacccctccctaagccgttgggccgaattcggcccaatactctctctctcccgcgcggcccaggtcggcccagccgagccgctcctcctcctctcgggagaccgacaggtggggcccacctgtcggatccatcccctacctccagccggccgacgccaagccgagctcgagccgcctcctttccgcctccaaatccgcctcgatctctcctctccgagtccggatttttgaggggttttgttcctctcgttctcctctatctttcccctcaagaaacggagcaatccgttgagtatcttgcccgaatcgaattcgtttcgatttaatccctaaaaccgagtttgaattcttcccgagtcgattcctctcgtttggagttcgatctcttcaatccaatgctatataaagcatcccctcgtcgtcctcttttgtttgccctctctcccgtcctctctcgtgcaccgtagagccgccgccgcgcgctttaagttcgccgccgccgccggccatcttcggccgcgtcgcaccgccgcctccgtcgtcgtcgccgcttgccgccgccgccgttaggtgcgccgtggtgaggagaacctcggccgcccgtcccccttcgccgccgaccaccggagccccgtcgacgccgtcaagccgagccgccgcgccgcctcctctcgtcgccggccgtcgtcgttcatcggttgtcgtcgtggtgagtaccgttgggttcgcctcgtcgtcctctttgtgtagatgccctccaatttcccggccgatcgccgtagctccggcgagctcgcaagccctagccagccagccagggctgacgtcagcatgacgtcatcatcggg

SEQ ID NO: 5078 - DNA, 46661 bp, Oryza sativa
cacaacccaccttaaccaggttttaattatcaattaattaacatcacacgatttaccatcgtgagctaccatttaatacaatcatcattattaataataatataacatagtttataattaatcccttaagttagctaatgtttctaagcatggctaagcaaacctatatatagcatttagctgaaccaaaccaatatataaggttcatgctagtcaaattataacccctaggaaaataaagccatcttcggccaataattaactgggaaaggttcaccacccgatgacattcgaaaacaatgcatagttgaaataaaataatagctttaaacgggttcaacatgctcaaagggttgtttgggatctgtgtgacttgccttgggcttccgcaaacgcttcggaaccttcctcaacggaaacgctctcctccggaacgtcggaaactaaagcaattaaacaaaaatcaacaaaacagtacaaaaacaagcataaacagtacatgtggatatttttaacatgtagatcttgattttagaaaaatttagcaacttgaaccacctgaaacggatctacggttatttagttatgattttccgaagttttaatctattagaaaattggaaaaaaagaaaaaagaaggagatgatgacgtcagcatgacgtcaccccacggcagctggctagggtttgcgagctcgccggagatagagaccttggccggggatttggagggcatgtacacgtagaggacgacgaggcgaacccaacggtactcaccacaacgacaaacgacgaacgatgatggccggcgacgaagaggacggcggcggcggctcggcttgacggcgacggtggagctccggtggttggcggcgaagggggacgggcggccgaggttcccctcaccacggcgcacctaacggcggcgacggcaagcggcggcgacgttggaggcggcgcggcggcgcggctggagaaggccgacggcggcggcgagctaaagcaacgcggcggcggcgctacggtgcacgggagaggacgagagagggggcaaacgaaagagggcgacgatgtggtcctatatatagcattggattgaagagatcgaactccaaacgagaggaatcgactcgggaaaaatccaaactcggttttagggataaactcgaaaacgagtttgattcgaacaagatactcaacggattgctccgtttcttgaggggaaagatagaggagaacgagaggaacaaaacccctcaaaaacccggaagaatcggggtcggattggagcggaatcggaggcggaaaagggcggctcgggctcggcttccgccggctggaggtaggagatggatccgacatgtgggccccacatgtcggtctcccgagaggagggcacgggcggctcggctgggccggcttcggccgcgcgggagagagagagtgttgggccaaattcggcccaacggcttaaaggaggggatttttggtctttttaaaataaaaacaatttgtgaaatgttgtttcaattattaaaaatacttcccttgctcaaataattcccagaaaaatctagaaaatagaggagcaagcatagtatttaataaaattttatctagctcatttttatgttgaaaattttcctagaaaattagggtttagtttgtaggcttttaaaaataatttctaaaaattccaattaaacatcagtttatatatttaggatttttagggcgtgacagaagtcgtgagaaacaaagacatcgtcggccgcattgcgaaatgggtagtcgagcaaagccagtttgatgttcactttgtgccccgaacagctattaagtcctaggtcctcgccgatttcgtagccgattggactatgcctgacaacatgtcagatagtcagactgacagcgagacatagacaatggcgttcgacagcgcactcaatagccaaggagcaggggtagggttcatcttgacatcacctttaggagatcagttcaagcatgcaattcacctcaacttcagggcgaccaacaacacagccgagtagaaaggattactcgccatgataagagcagcagccgcactaggagccaaccgataatcgtgaatggggattcagaactagtcgcaaaccaggtgcacaaagactacaagtactctaaccccgagttacccaagtacctcgcagaagtcaggaagctggagaaaaggtttgatgggatcgaggtccgaaacgtataccgcaaggacaacatcgaaccagatgacctagcacggcgtgcatccatacgagagccactcgaacctggtactttcttggacgccctgacaaagccatcgatgaaagaagaaaacgacgaaggtagcatagttgtccccgacatcagttcgggggctacaggggcagaacaagtcgttgccgacatcgagaccacagacgactggcggaccctgctcaacaaattcctgagtagcgacgagttgcccgaggacgacgcagaagccgagaaaataacccgacaagccaaaaaggggccaaacggggtacttctcaaatgcatttcgttcgacgacggcaaacatctcctcctggatatacacgaagggatctgccggtcagacattggtcggaaaagcctttcgacaagggtttttctagccaactgtcacgccctaaaaatcgactaaattaaaaatgcatattttaaatcatttttagaaattattttaaaagcctacaggctaaaccctaattttctaggaaaattttcaacataaaaatgagctagataaaattttattaaatactatgcttgctcctctattttctagatttttctgggaattatttgagcaagggaagtatttttaataattaaaacaacatttcacaaattgttttatttcaaaaagttcaaaaaacccctccctaagccgttgggccgaattcggcccaatactctctctctcccgcgcggcccaggtcggcccagccgagccgctcctcctcctctcgggagaccgacaggtggggcccacctgtcggatccatcccctacctccagccggccgacgccaagccgagctcgagccgcctcctttccgcctccaaatccgcctcgatctctcctctccgagtccggatttttgaggggttttgttcctctcgttctcctctatctttcccctcaagaaacggagcaatccgttgagtatcttgcccgaatcgaattcgtttcgatttaatccctaaaaccgagtttgaattcttcccgagtcgattcctctcgtttggagttcgatctcttcaatccaatgctatataaagcatcccctcgtcgtcctcttttgtttgccctctctcccgtcctctctcgtgcaccgtagagccgccgccgcgcgctttaagttcgccgccgccgccggccatcttcggccgcgtcgcaccgccgcctccgtcgtcgtcgccgcttgccgccgccgccgttaggtgcgccgtggtgaggagaacctcggccgcccgtcccccttcgccgccgaccaccggagccccgtcgacgccgtcaagccgagccgccgcgccgcctcctctcgtcgccggccgtcgtcgttcatcggttgtcgtcgtggtgagtaccgttgggttcgcctcgtcgtcctctttgtgtagatgccctccaatttcccggccgatcgccgtagctccggcgagctcgcaagccctagccagccagccagggctgacgtcagcatgacgtcatcatcccctttcttttttcttttttccaattttctaatagattaaaacttcggaaaatcataactaaataaccgtagatccgtttcaggtggttcaagttgctaaattcttctaaaatcaagatctacatgttaaaaatatccacatgtactgtttatgcttgtttttgtactgttttgttgatttttgtttaattgctttagtttccgacgttccggaggagagcgtttccgttgaggaaggttccgaagcgtttgcggaagctcaaggcaagtcacacagatcccaaacaaccctttgagcatgttgatcccgtttaaagctattattttatttcaactgtgcattgttttcgaatgtcatcgggtggtgaacctttcccagttaattattggccgaagatgactttattttcctatgggttataatttgattagcatgaaccttatatattggattggttcagctaaatgctatatataggtttgcttagccatgcttagaaacagtagctaactaaagggattaattataaactatgttatattattattaataatgatgattatattaaatggtagctcacgatggtaaatcgtgtgatgttaattaattgataattaaaacctggttaaggtgggttgtgagcatatggttttgatggttgtgctcatgacaattaaggaccggttcgcgagctactgttgtgaaacatttatcgtgccagccacaagccagcgtgggcaacggctttatcttttgtatagcgtgattcattatagtgcgccagactgagaagtggcgagaagtccacgggggtcgctggggagtccatgccttgtttataagggggtgattatgatccaggaaaggtgcgctgtaatgggttatgttgtgcaaggggtattgtcacaactcctttccgaggtatcgtggtggtattgaggcgcatggtgacatgatgtggggttgtgtcttgtgggtacagtggtacacctctgatcagagtttaaactattcgaatagccgtacccgcggttatgggtgagttgagcaatgtttttcgtgattagtctcacaatactcattaatggttataatgtgataattaatttgactcctggtttggaatggtaaattcctggtttggagggttaatttgttcaaccggggttggttgttcaaatgtggttgggcctatgcaacacaggggtgttgtatggtgtttgtttaatattgattaattatacaactgttttactattctcttaaatatttattaaatgttgtttttgcaaatgagctatattatgccattctttgttatcctgtgcacttgcatatttgctgtgtggcttgttgagtatgttatatgctcattcttgcaatattcattcatcagaagaggagtgtctcagtgaaggtgatgatctggaggattaggcttgttcttggttaagatgcctgtggagtggagtcgccatagctgttccgtagattgttatcgttttatttttccgctgcgtagaatgttatttttttttgagaggaactatctacctctgtaatcttttattatttgcgagtattaaatagttatttatttgtactctattatcaaattgtcattgtgtgcctcggttgattcctggacgagggcttaacacacatgtaagcgtttggaattttggatagaaattccgggcgtgacaccaaccgcgctcaaagacgcttgtgacatggttcagcggtgtgaagcttgtcaatttcatagcaaatacacaagactaccagcgcaagcgctccagactgtacccctcttacttggccgttcttgtgctgggggctcgacatactcggaccattcccacgaggacagggcggctacaggttccttttcatggcgatcgacaagttcacaagtggattgaagcgacgcccattggagaaatcaaggccgacaatgccatcaagtttatcaaagggatattctgcagatacggattgcctcaccgcattataacagacaatggctcccagttcatcagtgccgacttccaggattactgcattggattgggagtcaagatttgctttgcctcggtttctcacccttagagcaatggacaggtcaaaagggcaaatggcatagtactacaagggatcaagacccgtgtctacgatagactcatgtcacatgacaagaagtgggtcgaagaactcccctctattctctgggccatgcgtaccacaccgacaacatccaataaggagacacccttcttcctcgtgtatggcttagaggctatgctccccacggagctacgacatcagagcacacgagtacagaagtactccgacgaggaacatgaggagcagcgaagcgacgatgtgaatctactcgaagaacatcgagaaagagttgacgtcagagcagccaactaccagtaggcccttcgccgataccatgtgtggagattatggttatctcatatctacatggcggttatattccagctggatatgtcgcgtcccaaatcgactctaaaattcatcctcgaaattgtgcaaaagaataattaaaattcatgtgaaagcctccaacaattaaaatgtgcaaagataaaagtcaaatgaggcttggaggatttttgtatatttcctaaaagcctaaaatgcttaaacaaattttagtggaattttcagagcacaaataataattgaaaagaaatgaacaaagttgaaaaggtttataaaaagaaaaccctaaaagaagtctgtttccccccccttttccctcttgggccggctcggcccattccctccctctctctctcttcccccgcggcccatcggctccccgcgcgcgcgcgcgccgctgacaggcgggcccgcccgccactctcgctgacgggtggggcccacctgtcatcttcctcctcctgccgcgcccgccgccgcgcccgtgccctagcgccgccgccgccgcggattgcgccgcatcccgccgtccccgcgcgcattaaagagaggggaatcattccccgtgattccctctcccgtttcccccgatttcccctctctctctccctcggattcggtcgaatcgtggccgcattcgtcgccggcgcaatctatggcgcccgagatctccgcgcgcggtttcctctctccccggccgcgctctctccctcccgttgctttatattcgatccccgagctccgctctttcgtttccgccgctcgccgctcgctctcgccgtcggaatcgtgctcgcgccgtgctcctctctctccgccgtcgccgtcgaccttcggttcgccgccgccgccgctccggtcctcctcccgactcggcgacccctccgtcggcttcgccgcatcgtcgccgaccccgtccgccgctccgcttcgcccgtcgaccgccggagcaccgtcgtcatcgtcatcccgagccgcgccgccgtcttcctccgctccgtccgccgtttccgccgccttcgccgtctcggggtgagccgtggaccgtccccttcgtttcccccttccctcctctctctcgggtgccactccgccgcgccgttggtcgccggcggcgaccatcggggcgcgggtgcgcgccgctcccgtcggccgcgccggcgaggccgccctcgggcgcgcccccgcggctgccaggtggggcccggccgtcagccgcccgcgcccgcgggtgcggctgacgcgtgggacccacggcgccggccggcgccagccgcgtgcgcccggtccaccgtggaccgtgaggctgacgcgtgggccccacttcccgtggacccggtccgcgcgcccctcccctcggctgacgcaataaatccgatttttaattaaaatttaaatgaagaaattcgcaaatatccatttaaagagcatataaacttcaaatggctataacttggccatttgaactcggaattggaccgttcaagtctctaatttttccttaagaagtcaagaacccatttttgtgctttgtttctgctgttatgtggagtttattagagtaaaagccttttcttttccgttggtcgtgtagacgctgcagcttcggaagatccgctcttcgtggaagttgaagccgacgtttgggaaagcgagcaaggcaagtcacatcatccttgaacatattgaatcccagtttataaaattattttaatttaaattaatgcattatcgctttatttaaattcccgcgttatcactgttttatttagccatgcctatttacctttgttatgacctcattattattgctattgttactattaccttgttcaccctaggataaacaaaaccccaactagtgggtactctatttatggttccactagtatgaatttaggtagatgcttcgctgattaattaggcaatattaggtggttttataactttagactttgggaattctcatatcatttggacactatgaaattgttggattatggtggaattggacatacacctctcttcctctttcaaaacccctaaaacctgttttcggtggggtttgggtgcatgccagttgtgggaagtagcaccccggccactataaggattaagctcgggcctctgttgcaaagcactaccgtacttccacatgtctagtgggtaaggcttagtttgtggctcagtctggttataaacaaaagtacacggattggagatggatgaagtcgggggtcgatggacattctccagggcaaatgaaggctacacgagctgcggcccggtagtcgagatgtcatggcacagggccggtgtcctgctgctgggggctcagtcctgcctgcctgtcccgggggttccggccgtaggtgggattgggtcggtactcttgtctatggctaggatgggttggaaactatgtcacgtcttccgtctgtataccgtggtggtatgtggcacgtggtagcacgtgaggaagatgtgtcttgtgggtaaagatgtacacctctgatcagagtaaatctattcgaatagccgagccctcggatatgggcaagcctagcaatgtacccaagtcagtgttttaattcttaaaatttgctcaacaactaaaatatggaatggttggcctgggttggcttgggacgagctggaacccaggtcgggttgccagttcggtccgaatcatcgtaggccttgggttaaggcaggttcgtgagggttcacggccttgattaataatattgtgtagttctaagatcgtgtttacaaaatagccctgagcaactaaatgtctttaaatgctgtttactgcaaccctaaccctttatgttataattcccttgtactcccttgcatttattctgcattcgtgggtgtgtcttgttgagtacggtggttgtactcagtcttgcttaattttcccaagcccagatgaggagttcctggaagatgaaggctttggtgtctagctcgtgcctgccgtcaagcgcctgtggtcgtcgccctagtcttccgctgtttttcgttgtctttgagtgtgctgggccttcgttgcccatgtaataattttatttacgcttccgcttgttaaactctgaattgtatcaacttttggtgtaccttgcctcctgggacaaggaataatacacgcacgtcaggaacgcctgttgggtgatttccggtcgtgacaggatatacgataccaaatatagatagaatatctttatgaggactcgggttagattctaaacttgtatgccaggaaaatacccgggatcctagtcggttacgattgtattttatctgtaatcccatattccgttaggatatggactgtactttgtattacggatcccttcccctatataaggaggggtccgggttcctctcggggcgattctttttctcccaatcatacaatcgataacacactcggcggaatcatccccggacaggagtagggtattacttcttgaataagaaggcctgaacctgtataaaattccttgtctccaaacccatccactttcctagcttgatagccacctccttttattattgccgaaatcttgtttcgacagttggcgcgccaggtaggggtagcgtcaagttctcgccgactaagtgcgatgggtttcttttctggcatcgacgacttcgccttccctcccgggcaggcgttccagttcggcagcctcaacttcatcaccaacgacttcggcaagatctctctccttgactcggactcaaaccagtcggggagagaccaggtccccgtggcattcggaattccgaactcggccgaggcctactccaagatcatctctcccgagtcggctttaaaccactcggacgagatccaatctactctttcgcgaccagatcaagacgacgggtcctatccctcaatcctgatgaaacttcctgatgatttggccgttgtcttcactgccaagacatctgccacccgaagatctaggcgagctccggcttcggccccgatctaatctagatccagagaggttggcgttatactccaacctcttgggacagtctcaacggaagagttggatggttaccttagctcccccggcttcagttctcgaccaaccgagatcctcgactatgacaatttcggctaccactacgaccacggtgacctcgacaactttgacgacagctatgaggataactacacgcccctcttcttcaacgtattcatggctgacaacgaaacggaggaacagcgtcaagcccgagaagcagaccaagatagcgcacggcaagaagctgaacgtcgccgactagaggaagagcgacagcgacaggagcgagaacgactacagcgtgagcaacaagatcgcgaacggattgcaaaggaggctgaagatcgacggcaacgcgccttggaatctggacgctgagtgagagagctcattgggcaacaagacgtcgatggaacagcggtctttcgcaccccccagtagaacgcggttgcagctatcactctcctcgacaccctcgtcaaggaagacgtactcaaccaagctgatcatgttgtcaacatcttgaaccagacgaagaccatgatcgctgcctcggttccagccaactctgcaagcacccacaccccgactggtagccgagtccctcagctccaatctcatgattatcatcagccaagcctcagcatcatcggcataggatctagtcgcaggagcaggggtcacgacgaacgatctgttcactcgcctcccgaacgtcacagggagcgccgagtcgaacggcctcgctctccacctcaccagcgtcccgtcgaccttcgcgacacgatcaaccagcgccgtgcagcacgaggtcaccgccattcaccaaatcgctacgacgacgacgtggatggagtagctgccttcactaatgacctgcgtcgagtggattggccagccggctttaagccgactggaatcgagaagtatgacggcaccactaatccggagtcttggctcaccgtctacggactcgctatccgcgcagcaggaggagacagcaaggccatggcaaactatctacctgtggtcctagcggactccgcccgatcctggctccacggattaccccgtggcacgatcggatcatgggcggaacttcgtgatcacttcatcgccaacttccagggcacctttgaacgccccggcacatagtttgatctctacaacgtcgttcagaagtctggagaatctcttcgagattacatccgacgcttctccgaacaacgcaacaagatctccgacatcaccgacgacgtcatcatcgccgccttcactaaaggcattcgccacgaggacctagtcggcaagtttagacgtaaacctcccaggacggttaagcagatgttcgaaaaagccaacgagtatgccaaagccgaagatgctattaccgcgtccaaacagtcgggcaccacttggaagccaaagaaggacacgccgaccgtaggagggagtggaagtaacaaccacaaggatcgcaagcgtaagcccaaagagcttgtggcgaccacctctccatcttcccgacaacgttcccgcgtcaacaccttcgacaagataatgaactcccaatgtccgcatcatccaaactccaaccacgtggccaaagattgcttcgtctacaaacagttcgcggagcaatacgtcaagaacgcacgtaaaccttcagacggagatcaaggcacatcaaagaagaaagatgatgaagacgatgctccgactggttttccagatcatcgcaaagaacttaattacatcttcggcggaaccctggcttatgagtctaagagaaaacagaagctaacagaacgggagatcaatgcggttcagcctaacacgccccaatatcttcggtggccagagatagcaattaagttcgaccgctcggatcatcccgaccgagtagtccacctggggcggtaccccctggtactagacccagtggttcgcaatgtcaagctccgacggactctcatcgatggtgccagcgcactcaacatccttttcgctaagaccccggacgatatgcagattcctcgcacggaattaaagccgagtaatgcacccttccacgatgttatcccaggattgtcagctacaccagtcggccagatcactcttccagttaccttcggcactcgggagaattttcgcacagaaaatgtttgtttcgaagttgctgatttcgagacagcatatcatgctatacttggacgaccggctttagctaaatttatggccgtcccacactacacctacatgatgatgaagatgcctggtcctggaggagtcatatcactacggagcgacatcaagcaggccgtcacatgcgacaaagaaagttgcgagatgccccaaacccacgagactactctcgcccgcgaagagatccgactggctgcgaccacggcaagcgagggagaagtgcctgcaaccaagctgacgaagaccgaagaaagtgatgccaaaacgaaaaagattcccttagatccctccgatcctgataagactgctgtaataggcgctgagttagattgtaaataggaaagcgcgctcatcacctttctttagaataataaagatatttttgcgtggaaaccatccgatatgcctggtatccccagagaggtgattgagcactctttacatgttaaggaagatgccaaacccatcaagcaacgactccgtcgttttgcacaggacaggaaggatgcgatcaaggaggaattaaccaagctgttagcagcgggcttcattaaggaagtccttcatcccgactggctggctaacccagtcctggttcggaaaaagacggggcaatggcgcatgtgtgtcaattataccgacctcaacaaatcttgtcccaaagacccttttgggttacctcgcattgaccaggtggttgactcaacggctggctgcgagttactcagcttcttggactgttactcgggatatcatcagatccgactaaaagaatctgactgcttgaagaccttgtttattacgccctttggggcctttggggcctactgctacatcaccatgccctttggattgaagaacgcaggagcaacctatcaacgcatgattcaaaaatgttttcaacccagatcggtcacaatgtcgaagcttatgttgatgatgtagtcgtcaagaccaagcagaaggatgacctgattgcggatttagaagaaacttttaaaagcattcgtgctttcaagatgaaactaaacccggaaaagtgcatcttcggagtaccgtcagggaagttgctcggatttatggtatctcaaagaggcatacagcccaacccggagaaaatcaacgccatcctcagcatgaaaccgccaagctcccaaaaggacgtccaaaagctgactggttgcatggtggcgctcagccggttcgtctcacgactcggcgagcgggggatgcccttcttcaagttgctgaagaagactgacaatttccagtggggacccgaagcacagaaagcctttgaagacttcaagaaacttctcaccactccaccagttttggcctcgccacatccacaagagccgctactgttatatgtgacggcgacctaccaggttgtgagtacggtcctggttgtcgaacgtaaagaggaaggccatattcaaaaagtccaacgtccaatttattttgttagcgaagttttagccgactccaagacaagatatcctcaggttcaaaagttattatatggtgtcttaattaacgtaggaaattatctcactactttcaaagtaactcggtcacggtgatcacatcatttccactcggagatatacttcacaatcgcgaagcaaatggacggattgcgaagtgggccttagagttgatgtctttggacatatcgttcaagccacgaacttcgatcaagtcacaagctttagctgatttccttgccgagtggaccgagtgccaagaagacatgccagaggaaaagatggaatattggacaatgcattttgatgggtcgaagaggctcacaggcactggagctagggtcgtcttgatttccccgactggagaaagattgagctacgtattgtggatacatttttctgcatcccataacatggcggaatacgaggcgctactccatggattaaggattgcaatctctttaggcattcgccgattaatcgtccgtggagactctcagttggttgttaatcaagtcatgaaagagtggtcatgtctagatgataatatgaccgcttaccgacaagaggtatgcaagctggaagataaattcgatagactcgagctcacccatgtccttcgacataacaatgaggcagccgatacactggccaattttggttcaaaacgggaagcagccccttctgatgtgttcgttgagcatctttatgaaccaaccgtgcccaggaaagaagcaattgaagccatggatactcaaggcataagcatgattgaagccgactagagagaacctctcataaaatttttgaccaaacaagaactccctcaagacaaaaatgaagccgagcggatttccaggcgcagcagactttacattattcatgaagctgaactgtacaagaaaagtccatcaggaatactgcagcgctgtgtatctttggaggaagggagacaattgttgaaggatatacattctggtatttgtggtaatcatgctactgcacggaccattgtcggcaaagcttaccggcaaggttttttctggcctacagctgtgtccgatgcggacaagattgtgtggacatgcgaaggttgtcaattttttgccagacaaactcatttgccagcccaagagttgcaaaccatcccgttgtcctggccctttgcggtctgggggcttgacatggtcggcccgtttaaaagggcagtcggcggttacacgcatctctttgtggctatcgacaaattctccaagtggattgaggctaaaccggtcatcacgatcacaacagataaagctagagattttttcatcaacattgtgcatcagtttggggtacctaatcggatcatcactgataatggcactcaattcactggcggagcatttaaagacttttgtgaagacttcggcattaaaatttgttacgcatccgtggcacaccctatgagtaacggacaagtcgagtgcgctaacggcatgatacttcaagggatcaaagcacgagtttttgaccgactacgtccctatgctggtaagtgggtagatcagctgccgtccgtactttggtctttacgcactactcctagtcgggctaccggccagtcgccgttctttttggtttacggcgtagaagcaatgttgccgagtgaagtggaatttgaatcactacgatttcggaacttcaatgaggagggctatgaagagggccgagtagacggcatcaatcgattagaagaagcccgagaagcagctttcattcagtcgactcgatatttgcaagggttgcgtcgttatcataatcggaatgttcgatcgcgagcctttttagtcggtgacctggttctgatgaaaattcaaacaacacaggatcggcataaattatctcccttatgggaaggaccattcataattgctgaagtcactcggccgggttcttatcgactcaagcgcgaagacggtactctcatcaacaattcttagaatattgaacaccttcgtcgattttacgcttaggcatttcgtttgtatctttcctctttgactgctaacttcaagtttttccttgaagttttcagtcagggggctactataataataatggagtgtgatttttatcaatccaatttgcttacttgatgtatcattgccctgtttgatttcttggcttagtcaatgaggactgaaagttttttaacaacttttgcgggttttaggctcaacaaggtttgacaaaaacttttaagaaatcaggaactaagttaagatatcaagcacagcataaattcatcagtattgtacaaattgtgcctccatcatcattaattatcaacatcattggtacattaatcagtatcagtcttttcatcatcagaattatcaggaccagtcggtcgaagatcggtgtcctgaaatctctcaactacatcagctgctatcttatcagcagatttttgtgcatcgctgatgaggtcaagagcagctccttcgctcgtcccgtctgcaaagccatcaatggcatcaacgtcaaccctcggataaagagatttggtcatcgccaacgccagacttgctctcatacttccagcttctttgatgctcttgaaatatgtatccagagcaactctcagcttgtcgaaaattttagaagcatcaagtgcactcaggccgttgttattgaagaacatcgcttgaacaattggggcagcagcgttagcaacctcatcccgggctccttcaagttttttgatcttgccaaccaggacgtcgaattgagcttgagatttgatcttgcggtctgcatcaacagatccacattaataagtcagcatatggaggataatggcttttgaggtattgattgttgataccttcaacttcctttaaagccaggtctctttgtcttgccagttctgccttgtcattttccagaatttgaatctgcttccccaactgagatatcttggcagcttgcactacattgattacggttaatcaagattgcaaagataacagtacgagtcagttgagcagagtttgtgcgtaccttttgatgagccactcagttcaaaatttgattcctggagctcagcgatccgatctttcagataatgttcattcttcctggcaagttctttcgcttcgtgcagttgattcctggtggcttcgagggttccgagatgagggactaacctttctaaggttaccgttttggcttcgttcctaagatgaatcctctgcaagacagtttaattagcgcatgaattaaatggcaaacaagatggttgagatcatgtaccagagggcttacatttacaatgcgggttgcctgaccaagtgccttcttcagtaggcataactcttcgtcctctttttgcttatttatcacgatcccttgaggctgcatgttgtcatcccaccacttgaccagaatcggagggcatgaatcctcagctgcttgtatccggaggatttcttattcatcaccaattattggccctagtgtatccatgaatgaagatgaagcagccaaataaagtctgttggatcaagatgatttcagatagcgtgtctacctgtgatgattcccggtcggggatgagtggactttggtgtcttcacaggagatttggtttctgattcactgtcagcatccttcccgagaggactgttcgtttgagcttcaacctcaggaatcttttggtttggccctgcatccgactggtttccagtcgggggctcctggttagcaccgacttcagattcggccgactggttcccagtcgggggctcgttgctgggttctacattgtcggttgtcggttgtttgtcactcggacaatcctctgcagttggcccggtttcttttgaagggtttgcctttatgtcagccggctcggggtctttttcagaaggatctatgtcagacggcttcctacgagtttgagttatgctgttagtattatttcaacagtgggtaagctgcaagacaaggaagatggccaaatgatttgtacctggaagactttctgatttttggcaaaggatgactggaggttttcttcttcggattagttggcttcggggattttccggtcgctcctttgtcttcgagccttccggtgtcatcgccttcctcgtcgcttagaaccagcttcctcttgcgagcatttgactggccgactggatcagaagcacttggtcgagcgtcagatcgaatttttggtcctccactcgcctgaccagtctactggcgaggtaatcgacgttgagcaattggaggatccgatttcatcaaagcaaattcctgggcatgatatttcgaactttcaattagcttaacagagggtaaaagcatacttttgaggaaggttgaaatgtttgagtgcataccggtggaggagggttgaatgcattgaatggcacaacgggcagcagatgtgaatagctgacaacaatagcgtttgagaagatcttgtacattctttctttcatgaccttaaagtcaagagaatctggatcttcccgatttggatcatgcttgccatcaaactcaaaagctatgcgggatctctctttgattggagctaatcgacttttgatgaagtgcggagtgatctgttctccctgcaaaccttgttccttcagttttagcatgcgttccatcaattccactgcctgagcagcttcatctcacataggcaatgagttccatgtgtcctggtaaaccggaggaagacagcagtactcagggagtgcgggctcaggattttgaacatagaaccagtttacatgccagcctttgtttgaggttttgaagggcatggagaaatatttttggctcaaggttcctctgagttggaaaccagctcccccaacaacgcacggtttgcttttgtttggctggggcttgaggaagaagatgcggcggaacaaggtgaaatgaagcctaatgcctagaaaagcttcgcaggcatggataaaattggcaatatgcactatggagtttggattcaagtgatgcaagctaatcccgtagaagttcagaatcccccggaagaatcttgaggttggaagagaaaatccgccatagaagaaatgagcaaataccacgatttcgtgtgtgtcaggggtccggaatgcttcgccgaacgccggttgccacccgataatctccatcgctgggagaacgccgtgcgccaccatctccttcagattatcttctgtcacatcggagggcgcccactgactctcgaagctttctctttcttccgccatgaatgtgaactggatggtttaatttggtccgagatatggctggagaggaatggggaatcggagtggtggacgcggggagaaatttcgtgaagtttttgagggtgggttggagcagattgatgaaacctagcttcgtcggcgcggttctgtactgtagcacggagtggggaatggcgagagtctcggcggggaagactaaacgacgtttggacttcggtgtttttagggtatcgggagtactaatgggcctgggcctgtacagtacttcagcccaattatgttttcagcgtggcctgttgtgatccctagggacttaggcgccttttgctttggcaatatgtgctcacaatgatgcggcccgatgctgttaaaatcctttttaacgcgattcaataattctttggaattaatatgatgcacatgaaaaggtgcccgacagaaaggtattataccatttttgtaagcttttttaggctacaaaagctgttgggttaatttgggatgactggttcattagtagtcatcctcctagcatgttatatgtttattttgattatggtaagggttatagcctaggctaatgaacttcttaattaccatgatctttatcatatttggtggatcattttaagagtttcttactcggattcctaccaaatatatctatttttggaccttttgagtgtttatcattcggcccttttcatatttttttgtccttgatatattcaagtgagaagcagtcggctgagtatcttattgagtaccatgcatgcttcgatataaaatcgctcggttcttgactatatgtttagtttttcaactaatcacatagtcgggggctacacctaattaggtgcatctacttgatgcaccatgttttattttcgcccttcacagtcttttagcattcggcaagccggagcaagttgaattgaagcactcagattattgttttttgtttcgagaagactattttggtcaactgcgaaggtctcgggggctactgtggagattatggttatctcatatctacatggcggttatattccagctggatatacggtaccaaatatagatagaatatctttatgaggactcgggttagattctaaacttgtatgccaggaaaatacacgggatcctagtcggttacgattgtattttatctgtaatcccatattccgttaggatatggactgtactttgtattacggatcccttcccctatataaggaggggtccgggttcctctcggggcgattctttttctcccaatcatacaatcaataacacacttggcagaatcatccccggacaggagtagggtattacttcttgaataagaaggcctgaacctgtataaaattccttgtctccaaacccatccactttcctagcttgttagccacccccttttattattgccgaaatcttgtttcgacaccatgagaagcgcatcagagcatgcacactttcgatcgacgattacgtcctccgatgggttcaaagccaagcagggcgcaacaagctctcacccaaatgggaaggaccatacacgatcacacaagtcttgcggccaagtgcattcaagattgcagatggtgatggatgcgagttagcaaattcctggaacattgatcaattacgtaaattttatgtataaatcaatagtgtccatatttgtaagacatcttacgatttcaataaagttgatttcaggtaaagattacggtcaaagtgttccttcccgacgatcccttaccatgacgacacctagagttgaaacctatcctcatgtccgtttacaccgtcctgacaaggcctctgaggaacctaagggaacttcggctggggacgcccagagcggataaggccttgtcggatcatgtagagacaaacgaccatgtaagaccttgtcatgtaagagttctcaccgtgcgtattaaccaagccgtgtaatcggaaattgagttttccaacatcacggctgggcgctagggtcagtgctttttcaaccaaggcaggtcaagggtccaagagccttgtcatccgagaacgattctctgacaacaaggctgggggctagagagagtgtatggctcaactgactgatcaaagtcgcaaagtgagaaaacgctcatacacaacacacctagagtaagaaaacttagttagatagattccttctctattttacaagtgtttcttacaagtcataaatattccaaaatattccatgtttccttgagatattttttacaagattcaaaaactaccaggacggccaatgccaatccatggactgaaaaaccttctctgcaagcggtgccatcgattgcgcgagaccgtcgatctccgcgggagtcctccgagaatgcgagaactgttcgtggaggaactcgaggtgtagctgcgggtggtgatctcggatgcaggccagcacatgtcctccggcgtaccggcttgatcgacgacactcctgcttcagggcctcgtcgagacgtttgccgatcccttcgagctgtgcacaagccccattcagccacgagatatatccggccgccgactcctcgggatctccacggggaactcgaagctccttgtagactcccgtcattgccgtgcagcagctcttaaggtatgagttgaaccacacctcgcgacctcgaagagcttccacggcccggtccttcttcacttccaccatggtcctctcgagttcagccacctcgagcttcgtattccaatattggattcgacgatctcggtcagccaacgcatcctcgaggtctgcccagcacagaaaggactaagtcaggctgttcttctctcccaagaacacaacaaatcaagtcaatccgaatataaggagtgaaggagactaagacgcgatcctagggacgtcatcgccatatttgcctctgcggacgggctttgactgacctcctcccgcgacacgaatggctcgagcgcaagcgccgaaatgatcaccggcatgccaggctgcccgcgctgctggacactctcgatatcaacatctctacaacgacaacaaagtactttacagcatgatgtttaagaggtacaggggaaaacaaatatcctactcttcaaaaagggggaggacgaactcccccaagtcactgacttcttccatcacgcacttgcgtgtgtcatcagcggccccctgatccaaaaccttcttaaggtccaggtcagggtgcgccagcctcacgcacgcgaggacgtggcacgccccgttgaagaccccgttggacgtctcctcaccaagcctggctgcgtgcttggaggggatctcctccatcgccgtggccaactccacgagcgaggacgtcagtgagaactcatcagggttcgccgggatggtagtcgtgacaccacactccccagcgagctggtgtaggccggtgtacgatattcgcagtgagcctcggatttctgacagattgttctcgagctccgatatccgatgctcgagcccttgccgctgcctctcgttgccggccaccagcaccctcatcttcaggaggtcctcgcgggcctctgctaggtcacgtgccagctggtcggcacgctggtttgctgacgacgttgccgccttggtcccaccttgcgccgccttcgcccgcgccgccctacgaagagtttcctctctttcataaagctaggcgatcaagatttcgtgaatgagaagacttcaaaaacgtccacttacttctcgctgatcatcaccagcctttgccttcgctgaggtgggggagacgcgtccgattcctaagtaagatacgacggtgtgaggaccagtcattctgactacacgttaaaaaataagagggaggtttaccgctaggtttggcgccttacgacgggtcccgagtacggacgagaatttcctccccttcttcaaaacattgctgccacttgtggtagcagcagcagcggcaacgtcggacgcttctttggtgacgccctccttcaatgacgccgccacctggtggtccgcgagtggttcgatgacgtctgtcagagggagagcctgcataacgtgaagtcacaacgcgatctcgaggagaaggatgcaaaggagtcatcgagtacacttacattaattgcggcggcacgttcggccggacccttctcgcaaagggggatcgggatgtcgcccgccactgagggggcgctgatcatcacctggctgacgcggtgtcccacggtgtcactttccagacctgtaaatcaaggacaagaactcggtaagtcaggagaaacagacgcactcggagtaaaattcgaaatacaagaaaaaataccccgaggagaaactcggatcgcgtcctctggcacagagtagtcaaaggctggatgggcgcaggcctggagcggttggatccgcctacctacaaagtcggcaacgacttcgtaccctggcaacccctgtgttcagaggtcatcgatgatgtcgatgaaagaccggagagagggagtcagggcgggtttggcagtccactctgggattttgtctagttgttcttcagggacaacaaggacgggatccgagttttctatctgaagatagaaccatctcgcccgccatttgctgcaagaagaggggcactggaaggggatgtaacgcgacttcaggcaatcccgaagtcggaatccgacacatccagatacactgttgggttccatccgacgcaagtcatagtaaaagcggaagagatcaaggaagggctctaccccaatgtaggccttgcagatataagaaaagattctaaggaatgcaatggagttggggttcaaatgaagcaaagaaaggccatagaagttcaagacgagaagaagaaattcggaaggcggaggaagaaaaccgcaagaaatataatcttcgaccacaaccatatggcccaagatgggttcgggttcaatacctcctgtctccctctgcatggtcccgcgaccagggagggcgccgtcgtcctacaatttcttcaaagacgcggtggttgaggtggacttgtcaagatccatcgccgccggaggatcgccagagaacaaagcaagagaaatgggctagggttttctgtgcggagagcggagaagacgaggagcgctagaaggcaggagaagttttctggcaaacggacttttaatggattcccaaaatccctttaaataagcgcactaccgacggtgcgtattccaaggaaaggagagagattgccgccgggaaattctgggtccgttgcacgcagtagttttcaagacttcaatttaaattcactcatgaccgttgaacttcatgcggcgttgtcgatgactctttgtctctacggttctcatgccaagatcgaccagatgagaacgacaacgatttcgacatcagaagtcgtgattgattacatgagttcatttaagcagaagtcgggggctactatcagggttacggataaggtataccctttatccttggataaacgatgagtactgatacggtatgcccgcgcttatacggataattcctatatgcgttaaggaaatatatcacatgatagaaacataatccacgtatggaaggagtcctactcggacgagactgggtctttaccatatcgtgaggggttcgatatctccgagtcctacttggagatcaactgacccgcggtataaaagggaccccctgggcaggacctaaggcatcgaatatcaccgctaacacatccaccacagcctacgaagccggagcctacaggagctaagtcgtcgggtgatctagtcgaaccaactcgactacggtctcgtcggtaccatcgagttctgttattccctttgtaatatgtggtttccatcatataatctcataccaactggattagggctattacctaccaaggggcctgaaccaatataatccttgtcttatgtttgcttgatgtcgtactacgtagatcctcgtaccaacgtaccccaataccctctatatccggtctacgggtatcccgcgtcgacaatattcccatgcatttatgtcaggtctacctttaaaaatggtaaagcatgaaaaaatggttaatgttttggaggaatcccaattgttatcctacttcagacactgattctaaattcagagtacaaactagtaggttatgtatattaactgatggaaatataatagtatcactatatgaacaaggatgtaaagatattcaataatcagataacctgcttgctattgaaccattgaacttgattgtgcaatctatgtccatgcctatataatggtatgcaccatagtgcatttattcattctccaaaattgtttacatagtatggtaccataaatattacaccctggtccctgtattagcaggtacaactttgagcatgtaaaaggatgctccctcactagaaaattctacggcatatagttttggggctcatagaccaaggaagccaactattttatcttaatacctccatttattcttgttgcatgcacggtattaatgcatcacctcactaaaatcatctaactgcatgcatgcatacaggcctctttaagcatgggcactgggtaaatcatcgacagggaaggaaggaaggaaggaagggtacaaggagatctgtgcgccaaccgccccctgttgaggtaaggtgaggtgaggatggcgatgatgaaccggacgcgggatctgctgatggaggggttcgagggcctcgtgcgggagggctccttcacctggggcctcccccgccgcggggcttcgccggtgggcgacggcgatgaccccgacagctcgtcctcctccggcaagcaggcctccgtctccggcctctcccccaaggccaacgccgtcgtctctcgatgcgcccggtaatgacctagacacatgggtgagacaattgccttctactgaaattttgcctcgccttcgggatttcttgggtttctagggaagggaaatgctctgggacgaagcattttgtttctgatatactaggttaattgaatggaaagccactgcgttggatgtgacaattcttagaaaatctgcaaataagtggttgttcggtggctttatcagcaaccaatattacattgcatatgtttgaagatcgattattataatatgtagtgctcaggatgtgcagtagggcctatgagttcgtgtttgatctgaatgggtttggtttatgatgtccaaagtccagacatgaactgttgtgtgcaatgtagttcgttgcgtccattgtatacttgttccaagggaattctaatatagaatcaaaaccatagctgtttaagatctccctaaactgggtttttgttaagatatctggatgttggtaaatgaataacttgtgtgagctaatatagtttatgtcctttgagaacgatctgtaattcttttattagcttgattggaaacatgttgatgagcatcctgcttcacggaaccaatatgatgttgtttgcatttgctactgttctgttaagctaataggcataattatgtaatactccatccgtcccaaaatatgaaattttatataattagtattttcattgttatttgatgataaaacatgaataatactttatgtgcgacttatctttttaaattttttcatatttttttcaaataaaacggacggtcaaaacttgtacacggaaatgcataaataaacttattttgggatggagggagtattagttattcaaaatctctatgtcatgtaaaatcaattcccttttcatgcaaaaacatatgtaataccagtttttctttaattaggtgctgaacttatgccttttgtgttaattacatttcagggtacttggtacttccacggatgagcttcgatatgactttgatatgcaagcatctgattccataaagcagcaaataaattatgcaagaaattttttggaatattgttgtttgagggcacttgcacaggcctcacaaattgcagggtatctttctgacaaaagctttcgtcgcctgaattttgatatgatgctagcttgggaggttccctcttcttcaagccagctcactgttaaggttacaattttcttttctttacttgcttaaatagttttcttttgttcacaccttatataatttgttagcgttgcattaataaattttcccaggttacttcctcgtattaagggcttttaagaatctttctacatattgaatttcatctcctttcccttgcaggttgaagtagagagcacagtcagtttagaggctttttcaagaatagcacctgcaattccaacaatcactgatgtggtaacatgttcaaatctatttgatgtactttcatcatcaagtggaggccggcttacatttccagtatatgataagtaccttacaggattggacaggtcactttctctactggtctgtccattcaattttatttgttcatgttttcgttatttacacatggttagcaatagacagtgacgaactgccttttttaatttcatatcagcagaataaacaaattgaatgttatggaagttctcttgatgaaatgtctaccactagtaatatataatttatctgacaaatctaaatagttactatatgcctcttagttgtcaaagattgaatgcttgtaagcaaatgttgtaaactgatgtccttttgagaatacggggaggcagggagtattacttaccataattatcatacacattgacttatactttctcttttgcttaccttccaatcgtacatatagaacttagatttacatggcgcggtgtagcagaaacaactagtttcttgtcccatgatgaatatttttttccaaaatgaaatgcttctcttcagtgcttattcttatcagggataagcggataatccactttcttgatttaatatagtgaaaatttgggcaaccattataggtctatagctcttcatttctagatgtttaacctgctgttacaaccttacaatagatgccattatcttcctactttgcactgagaagtatatcacctgtttgagttaagattgatgtagtagatccccttcttaactactccctccatagaaaattatagggcgtatttcctcaagccctctgttgaagattatagaaacacacatacttcccaatccatattttgttggtaattttcccatagttcccatacttaaagaggcctgtatgcttgcatgcagttagattttagtgtggtgatgcattaataccgtgcatgcaactagagtaaatggaggtatttagataaaatagttggcttcctcggtctatgagccccaaaactatatgccgtacaattttctagggagggagtacccttttacatggtcaaagttgtacctgctaagagcaagtttaataatatagcgcactactagctccaattcatttatagccaatctaatagacaattcataaaataattgcttactatactattaatatatggtcccacctgtcatacacacattacgtcttggagtccgtactgcagctggctacagatctgtagcccgctgctcttctctcttatcttttatctcattaaaatatgtctgtagctagctaatattctactattgttcctgctctaatacagtgaccagggtgtaatgtttgtggtaccatagtatgtaaacaatattggagaatgaataaatgccctatgctgcataaaattatataggcatgtacatagattctacaatcaagttcaatggttcaatagcaggcaggttatctgattgttgaatatctttacatccttgttcatctagagataccattatatttccatcagttaatatacataacctactagtttgtactttgaatttagaatcagtgtctgtagtaggataataattgggattccttcaaaacattaaccatttcttcatgctttaccattgttaaaggtagacctgacataaatgcatggggatatggtatagcatatttgccaatttttgttaccaaaataagttcagttatgctcctttttctgaaggtagggtatgcaagcatataactttctgttggatcttgtttcataaagtcaggactgagagtatgttttatctcatgtagagcgattaagaaaatgaaaggacaatccgagtcctcgctattatctggccagcggtctcagagaggagaaaggattgtagaaatagatggaacattgacgactcaaccagtacttgaacatgttaggatttcgacatggccaggtatgtctagttttctcagtgaggagaaacgatttcttgttgtttacatgctggcatgtttttttaacttgccttgttacggttttatatcactgggtttcagcttttcctttgctggcacaggaaggttaacacttactgatcatgctctttacttcgaagcacttcgggttgtgacctatgataagcctaaagcttatgagcttgctgaagatctaaagcagtctgttaaacctgagctgactggtccatggggctcacggctatttgacaaagctgttatgtataaatcagcaactttgtaagttctttcacacgtagcaaagctaataagcaatagagtacatctatactactaaaaatgtcagtagtggtggtgtccattctgcaacaccacccctaccactgatatgtaggcccaataatctatagtattacaccaacctccaatgagtcctctcctgtttcgctgttggtttatcttaaactttgaaatcacctacttattcactctacactacaaatgtcagtagtggtggtgtctgttctgtcacactacccctaccactgatatttacgccccacaatccatagtattacaccaacctccaactagtcctctcccatttcactgatggtttatcttaaacttcgaactcatctacttattcaattaggaaaaacataaaagtgttaatttgactaaatatgtgcctaattgacttaataagctagaaactgaattccttttccgttgcaacgcacaggttcttggccagtaaacgtaatagctgattcctatagtggtattttgctaattagttttaatttacaagtcattgctatccattcctttttattcggagatagtagcaacatgtatccctataaccttatatctttatgactagcacatagatttgctcttattacctttagttacatgttttttctttttgttaatgcaaatgcagaacagaaccagtgatcttagaatttccagagttggctggccactttcgtcgtgactattggctggccattatatcagaaattctttgtgtccacagatttgttaggaagtttgacataagtggaattgacaaagaggaaacaattttgaaagctgtactaagcattctgcggctacaagctattgaagagttagccattccagtttctaatcgattcgagtctcttttgatgtttaatctatgtgacaaacttcctggaggtgatgtaatacttgaaacactagctggttctatatcattgagaagatcagctcaagttaaccaacctggcattagcagtgcaaggcattcaatgtccccatttactgttctgtcgaatcttggagtggtatcaccaattaataagggtgagagactctttgttggcgagatagttgttggggaaatgagtgccttgcagaaggtagttactgagtcaatgaacaactataagaaggttgaattggcccaagccacagttgatggagtcaaagttgatggcctagatacaaacttggcagtgatgaaggtatactcacaacagaattagccttttctcaactgttaaagatctgttcaattctatgtttggggtttagttactccctcgtttttcatgagcagtcttcctaatctgtgacggtgcctaattaatcagaataaattgtggtttatccaaattgattccggcaccattttgatctgttaaattattcagaacaaatctaacatatttagagcttgtgcatcacaaaaatataaagtaatttttgctgaagtatatatattcatggaaatcgaaagtaatctgcaatcctttatttgtgaccatcattcaccaaatgtggtttttagacctcaccgagatccttattccaatgtaatatttttgctgaagtatttcgttgcagaaatttgcctgatcctacctatattttccagcttttgcatatttctgcatgatatataaaattccaaaattatttcctctattttggagattgtatatgaattagagcttaccatattaccacttgttttgaaaggtgtgaatgtagtaatttgaattttgatgaagagagtttattcgcttatggaaatttagaaggtatacgcatattcactgcaaatcccattgtgtatgtactccctctgatcatatatatttgatgtttaggacaagatttggtccaacttttcaaactttgatcatcagttatttctcaatgcttagtttaaaaaggaaaaaaatggtaagcatagattttccttgaaaagtactagcatattttttttatgattttataaacttattctagtataaagttgatggtcaaaatttcaaaagtttgaccaaatcttgttttaaacatgaaatatttatcaccagaagatgtatattgcttttagccagaaggtttttgttcacagtattttatactatgattgcttgaaacatgtctagcaactatacagattcatgtttcgttttttttttgtttaatcctcacttgcatttaggaattgctatctcccgtaagtgagctatggaggtttttggtgttgctggcatcttgggatgagccgattaagtccatggtattttgcttttcatcgtcttatatcattatcaggtatgctaaactcacatggatattttctttttgactttattctgcatgatgcttttttaactgtggtacactattgtgatttttttttataattttgtgcaacttactaatataatgcaatataaatatatatcactagctcctttggagtgaatgttgcttcgattgcctctaatataatccttcccaaatttaactagttcacgtgctttccatccaccttgctgctgctccgttgacttgaattcaaggataccatatactcccatttgagttgcaccatggagtgatgtcatctgaggtggtggaacagtcgatggtgctataggaagctcctcatatatattaaggccttgtttagttcccaaaaagtttttttcaaaaacatcacatcgaatttttggacatatatatgtatagagtattaaatgtagattaaaagaaaaactaattgtacagttaggggggaaatcacgagacgaattttttaagcctaattagtccatgattagctataagtgctacagtaaactacatgtgctaatggcggattagttaggctcaaaagattcgtctcgcggtttccaggcgagttatgaaattagttttttcatgcgtgtccgaaaacctcttccgatatccggtcaaacgtctgatgtgacaccaaaaaattttcatttcacgaaccaggccctaagaagagcggtgtggatgttcctcatttctttattaaacacttgaatgatgattatgccttcctgcttataattacgatcagcgtaaaacctacctgatttaggaaggaggttaaactgggtagagggtggaagccaaacactagaaaagtcctctccttagtgcttattacactgcattgcaatgcatacaaaaagtgattctcaacagtacatcacaaattcatcagtaccttattgcagtgacacattcagcctagtaccacaccatttctaaatgctgtatccaacatcaatccatcctaaacagatagcctgattacctggtgaaaacaaccgtaaccactggattttgacattggttgaatactgagcatgtattaaattttttcaatgaacaattaagaatcatggatcagctgtgaggcatattttcatagtttacacttgcagcaaattacagttaataggattttagcattgctaataattttatctctaataattattacctaacaatcttagctataatggcattcttttgtaataaaatattttccttgaaatccaaggggacatgcaattcttgctgttcctagaagaatgtgtccataatatgatgaatatttgttcttttgtgatgcatactacacaatttttgcattcttcacatttgtaaattgtaatatcctctgtttctgtgatggcacagggggtggttagtctattttcttgttttggtgctcttgttttcggcaactttcatgttctttacaagactaactagccatgtaaatccaatgatggaggtcaaagtgacatctccacctccaatgaacacgatggagcagctcttagctgttcaaaatgctatttccaaagttgaagagcttgttcaggatgcaaatattgttcttctgaagattagagctttattgttggcttctccctcccaggtaactatatttcttagttcttattcttcaatccttttagggagctagtactttgttcattcattttttgtgcttcctaggctaacaatatatgtgcgctattcgttcagcttgttgatgaatgatgctatggaaagaaaataatgatatgtgaacacaagaaaaaaatagatacaactagaaattgatgaggttaactaatcatttgaaatcaaatttactacccactctgttttttctaagcgtagtacaacatatgcatctcgtctgatgtactgctaattattccacacatttagcatatcaacattttgtcttccaattatttttcttcatggtcgatagagacttttaaaattttccaattaaattccttttgtaatttcaaccctcataacagattatgcatgtaacttaatgtttcaaatttgtgtagttctatagaaacgagtggatatgcttctgtgtttatgttacttttgagttccatttgattttttttcccttagataaggtatattcatcaatcatgaggcataagctattgaagttgttttactttctgcatctacaaatattcagataatgattatttattgttattctggaagagcatatcaggtcccaattgctctccctcttaattttgtgaattggatgagcaaacaatcatttcatatttagttggaaggatttgaaaatttgaactgaaaagtagtataaattagaagaaaaaaagtagtcatcaaagaatatatgacgtaatgccaggattgcagatgatatacagtctttccttcttcatccaatctaacttgcagtttgtacaccttactatgtgactctgtacagaccattctgccttgctggacattggtctcacctttagtgttttgattgcctcatagaatcagaagctagatggcatcattaggggtgcaaaacttagatgaatatgttgaaactgttgataaaacttctgcatttttctaaactttgctgaaccttgtgagatccaacatattttgacagatttcaactgctttcttttacctcatatcttgcaccttcaggctatctatactcctttgaaaagaatcaaatggtggtgcattggatctgccacgccacctattcccgttatagtttgtacatattacacgataaacttcttaacaatatgtaagaaccaaatctaaatggagagccacatataaaattaaattaacgtgagtattacttatagctaaaagttgtgtaacatatttcatgaaaaatatgcttttacttattataggaaatgttatgggttttcttttcgttctatcagtggctagttgtttgtaaaagataaacatagcacatagcaccctttgtttcagggtctcaatgacacctgaaacaaacttataaaatgcatcaacctgggatgtttctttcctagccatgcctcaatcaaagacaaaattataaaaaagaaacataaaagctttaataaatgtgagactatttcataaaacgatgagttgtgccattctagcgcacatggtacgtttgaaacagtatgatgagaagccatgctgttgcaattgcaaatcttgccattgccagattcgctagcaaatgctatcttgcgatttaggtatcatagcaagatccccaatatgttgttttgaccttgcacatgtgcacgtcgcttcgctcacctacattattttggttgtcaatttcacaggccactgataaaactatacttgcgttggtagtgatggctctgagccttgcaatcgtgcccacaaggttgcttgtcctgatgatgtttctagaggtattcacgaaccactccccacctaggagagcaagcacagaaaggtggaccagaaggttaagagagtggtggttcagcattcctgcagctccagtagtcgtggagaaggataaagaagacaagaaaacaaaataaaaaatgtatatgtatattcaatgtaattatgtgccttgtttggccgatgggttggggtggatcaccaacgctcgtcttgtacagtagcagttagtatttttaataaaaatgcgagttctcacctagaaattaattgcttacctcgtattttgattatttcatatgtagtatcatcgggtgatcagggatgttttttttatcaaaacacagtgagggaggctcccacgatatatattaaagaataaaagagtatatacaatggcaagcaaaaacaaaaaaaaagaaatattacaattgatcaatccatgattgcactaaaggtttatgcacatccttgagtctagataaatgtagactcgatctgacttcaagtttttcttccaagaagaaactgaaagcagaatgccctgaaaaattagaccattcctttccttccaaatattctaggccacaagcagaaagagttccatgaaacaaggaaaaggaaatgaagcattttgagtttgaatcatttgatgaaagtccaaagaggtcgaccaaatccagcccaaactactccaacaggcaaaactgaaactgctgaggaaaaaaagatgatctctggtctccttgacatttagagcacaattagaacaatttgctgaggcattcagaggagcacaatgtttcctatccaaaagatccctggtgttaactatgtccatgaaaaataaccagcataagactttaatattcatgtttattcagctctgccagatccatttgaaagttacgggaggagataaaagaccagaaaattgagcttataaaatttctcagaagaataatttgatgaacccagatataaacccaagtgtcaattgaatcaaacagagtaaccagttaaagatcatgcaagagaatctcatattcatcaaacgcctgatgggataaaggaaagtgaaactggtcatcaggatcccttgacaagtgccgagcaacagaatcatatttatgtttagcaaaggagcacaatctagggaatttattagatcttacacaaccttcccaaagatcatcccaaaagagaatggcctgtcttgagccaagcactggcttagctattcccctgaaaagtatatcaaactgaaacacatccttccaccaaaatgaaccacaacatgttgccgcatgagggacctcaaaagaatagtaggaagaccatatcagattcacccaagggacatttatctttttgtagaacttatgcaaatgcttaagcaacaaagccttattctgaattctcagaaaaattacacaaagaccccatttttcttctcggttgcacaatttggacgatgcaaccaaatatttcttggtagaattaagatcacttcctctccaaaggcaatgccttctggttctatcaattgcatcaattacagagatgggcaatgatgtgcactagggttcccaatcttccgaaaaggttctgataaacaacaatttgggcggaatcgcgacacaaatcaatccggcttcttgaacgcgcacgctcttgagccccgtaatcgcagcaccacgtctcctctggttatcacccgtgttgaaacgcggattacctcgccgagaaggctaatctctgtttgccaattgaagaacacaaacaagaacgagatagaaaacaaccaaaattgcagatgaatgattaagctcacgagttggggtcttacaaaccgatctagcggcgaaactgttcttgacagattaatctaaggaaaacccaaaaacctaaagatggcggcgggtactgatatatagagtttagggttgtgcaaccccctctcaacgcaaccctaatgggttccaacacgatacacgggccaaaggcccaaatacggtgacacagcaccgctacagattctggacgtcaacttgtttggtcaatttacattgacccgaaaagaatttggacatgggaccaaaaccattggaaaggatatcttgttagctttccatccatataaagaatgccccaatccgagcacgtatgcgacctgggcgcccattttagtgcagactggtcctggactccgaattgcacccggcgtcgacttggtttgggcctccaccttgacttggtcgtactcgatgatcctccatggctctaagtccttctccaagtgtctccttgtcccctccattgttcctaatcacaatataatcattaggtagcaatctattctcgaattcatacaaagaagaacataggaacgaactcacctctaaatttaattgtcgcgcacaagctcttgttatcgctcattgaatgaccgttggaggattgttgtgtgtatccgaggtagtgatgtccccatcaggcaaagacaaagagcacatgtaataagttggaagggatgacataatagaattgaccaaagtgagtctgtctccataggataggaaggctgagctagctgttaatcttctctcaattctatcagtgagtggggagaaatcgaccactttgggtctagacgttcctaggggtaagccaagataagtaaatggtaaggtcccaattgagcaaccaaaagttgaggctaacatgcacgacttctcctctgagatatttaatggaatcatacaagatttggcaaagttctccttgagtccagaaggcaatgcaaaagaattaagtaaggccttcagagcaaagagctatggtgctgaagcttccatgaaaataagagtatcatcagcatatttttatttgaggtgaacgatggcagaagacctgccggaatttaatttaagggagtcaaaaaaaaatcacccaggaaggcctgggaaacgttacaacaaaagacaattagggtggccagaaagccactttgcgcaaatccaagtcttgttttacccgataagctactgacaactccgaactagataaattttggaagattctactatttctttctagccaaacgttccaccaagttgtcaggatagcacctcgagcgagtaattttttatcttctgttcctgcatccttaagctcatcccagcagcaggtagagacacaggatggaagggaattgaaaaccgggggcaggttttgccacgaatgtactgtagaccatacttgtctcataaacgggcattccgcgaacagatgattggtgtcttcgaaggcggaggtacacaagcagcaaatccaatcacacggccaatgtcttatgagcaagttttgagccgtcaaagttctttgatggaggacaagccacccgaaaaattcaattttaggctcagcccgggctttccagagtgaggtaaaatcgcttgtagtgtatgaaccagcaaattggtataagtaggcactcttggttgtataagttcgagattcagtccaattccagactatgtcatagacattttgagtgagttgaacctgttggagcaggccccccaattgcaccagctcatgtaattcttcgactgaggtaatttgtctgaaggatgaaagccagttattgttcgtcaactcgaactgaacccttctattctttctttttgctaaagagaaatagaagggggctaactcttttgggcacctcttgtgcagccaattatcatgccaaaaactagttttagtgccgttctccaccgagattgtggttgccgcctgaaacaattttttatctaaatcatcgcaggggatattcataccaacccaaggtttgtcgtcggatttccaagaaaaccacagccagcggaggcgcaaggcccttgcgaatctttcaaggtcaggaagaccagccccccctagagattatggtctgcaaactagttgccagttaatcaaactgtcacctggattagtatgatcagggtcctcgcctttccaaagaaaggatctgcgaaaacggtcaatccttttaaaaacccacttgggagcgcggagggccgttagatggtgaatcggtatagagcttagaaccgaatggcctagagttttacggccatcagaggtgaagaaccgccccttccatcccagtagacgtgacccaatcttatcaataagcgggatgaaatcaatcttccttagttttcgatagtgaagaggaagtccaaggtatcggcaggggaaggatttaatcatccccgggaaacttgaaagaagattgttcaaatctatctcatcacatctaataggaaagatttctattttgttgctgtttggatggagcccagaaatttttgcaaagaaatcaaggatgtgagagggaagacagttcggcactatttggatttgcaaaaactgccacatcatctgcataaagagaacatctgaatcttgcattgcgtccatttaccggttgaagaatagtagcatcttcagccgctttaagaattcgatggaaaggttccatggctaaaatgaagagcataggggacaaagggtcaccttggcggagtcctctagcattgttgatcaagtgacctggcgaaccatttagcaggacctgagaaggggatgttgccaggatatgagagatccagtttatccatctgttcccaaaatcgaaatttcatagagcttcaagtaagtagggccagcaaacagtatcaaaggctcttgctatatccaccttgatgaataagctttgcttttttgatctatgaagcagctgtatcatgttttgaacataaagaaaattgtcatgtaacgctctcttccgaacaaatgcactttggttctgggaaaccaactcattaagtcttggagctagtctattcgccaaagttttagtgattttccttgcaaaactatggaccagactaataggtcggtaatggtcagcgccagaagcgtcatctttctttggaatgaaacatataaaggccgaattcagtttttccagttgagatgtgttaaggttcatgaacgaattgattgccaccatgatatcatccttgataatctcccaggagactttgaaaaaggatccaataaaaccatccggacccggagccttttcgggaggtaatgagaagatcgtcgcttttatttcctcctccgagaaatcctcctctagttccgaaagatccaaggactggagccctaaagcagcccagtttagacccaatgatctttggttatttgtcccaggtctggatttgaaaaaacggaacagctcgtcttccttgtcttgtgccgatattgccactcctgagggagtttgaagtgattggatgtaattttttcttctcctagagtttgctttgatatggaaaagttttgaatcaacatccccctctttgagccaagtgagcctcgagcgctgcctaattttaattttattaagggttgagagacctagaaatcttgatttgagattggagaggagtaggttctcttgatcagatagtgacctggattctcgagctagctaaagctggaaaattacttcagctgcaacagctaattgcaatttgatgtctcccacattgcagcggctccatctcttaaggtcacgggctaaacgccgaagctttaggcgaaagatggctagtcggttagatgacaaaatcggcttttgccaagagtgttggaccacttctagaaaacctggaacttcaagccagtaggattcaaatatgaagttggaagatttgctcctcttttcattacccagtaaaaagagaggtgtgtgatcagagcatgcagaggacagagggtgcataatggagctctcaaacatcaagtcccaatccacagaagcgaaagcacggtcaatctttgtttgtgcaggatttgatccctcacctgcccaagtgaaacgccggcctggaagaggtaattcttttacctggatcttgtctaagagtctgcggaaatgttgcatcatcgctctgttaaggcggctattgtttttatcacaggctttgtaaataagattgaaatccccaataattaaccaagcaggtttcaaagagacttgaatattttcaagttcagctaagaagtttattttgtcagcatcaagttgtggtccatacaccacagtgatagaccaatttagtccttcttctcgcatggacaccgtagcagagagggagtactgaccaagaaccacttcggagattgaaaagaaattttcatcacatgctagaagtatgccgcccctagtaccatctgccggcagaaaagcatgttgctgtacaaactggtgacccaaagtgttgagaataatttgattggagatagcagaaagtttcgtctcctgtaaacagacaatcgtcggtttatattgctagatgcaaactctaacagagtcttgctttactttggcattcaaacctctcacattccagttaaacaggtaaacattgtcttgtgacataggaccaaaagggcacagcaactctactctcgcagaaacactcccaacgacgatgagagaaacacagcaagagaggtacaaaatagggacagcccaatacaacacaggaaactagacagtaggaagcagcttgacatagtggcaactgagacttgaacatcagggttggagacgtcatggatgttatgctcgatgacatctcagtagtaggggcgcttacaggggtgccacgaccgccttcttctttgcagccttcaagcggatggctttgcatccacccttctccactagctcggagattgtcttcaaagaggctggggataaaggcttgttgaagtgctgcaagtaaagctttttgacattatcatcaaaagaagcgtgatcatccatgaaaccaaattttttagaaataatttcttgagcaaaattctctaacttcgcgtctgaacgccgcttggaaagcaaacgagcactatgtctttgcgctgaagcaattgcaggaactgctactttaacacaggcatggcggtgagtgttgacgtcgggaacaggaagaagcgccggccggattggggtcgaaagctcagcaaggaaaccatccatctgatttccggaacttttgatctttggatttggactgacgagccaagagccatcccgaggggtggtcctttctcccttacatctgctgatgaagaagggttgccgacagacatcccgctccccgacctagagccccatcgcaatccgccgccctctgagcccaaagaaggctggacctacaatgtcctgatccatgtcgacacacttgaagacctccactcgcgcaaggcccgtgcctacaagtgggactacgaagttcaagatgatgggtcaaggtacaaggagtatccgctgccttgcagagcggaacctgatcctgctcggggtcccagggacgacaatgatgacaacgatgaccagtccagggggcgccataggagtcgttccctttggaatcgccttggtggacactcctcaagtcgcagtagggaacctgataggagggatgtgcaaaggcgtgaccaagagaatattggatgttcatcagcatattggatcactgggaaattatcatccccgtgaacagggataggcaaagataatatccccctctaatgtgcttatagcctgaagaagatctgctcctatggcaaacagaaggggggacaaaggatatatcgatccccttgtcttacacccctcttacattgaaaaaatttaccaggaacaccatttaatagaacaactgttgaggtagacgagaacatactcgtgatccattcattccattggggagggaaacccatagctgtcatttcattcagaatagcatcatgatcaattgtatcaaaagctttttcaaaatcaagctttagaagaactatctccctcttagacagcttacattgatggatgtattcgaaagcccatgctaagtagtcctcaatagagtttcctttaataaatccatactggttttgatggaccagctttgtcaggattgattgaattctatcagcaagaactttgcacataattttcactgagaaattcattaaggaaattggcctaaaatcattaggaggctgaggagccattttctttggaacccatgtgatataggaatagttgattgcagaaagatcagctgagttcccacaaaagtctgcacaaagccgatagaaatcttgagcaattagtccccaactggacttgtaaaagcatccattaaagccatctggtctaggagcttcatcaccagggatccttttcaccacttcatctatttctttggtagtgatttgtaaacaatgggacataaggtcacatttatcctcaataagttcactcagatcaaaaaccattttaggtttcatagaaacacccattctttccctaaaagcattccaaagaatggcagctttcccctcatgatcagaaacttggtttccaacagaatcaatgagagaagagattgcgttaattctaaacctctcagtagccatagcatgaaagaattttgtgttttctctaccaagaagaaccatttgtttatatctctgcctccaatattgctcttgccagttcacgaagttcttccaaacgatcaaacgaaagaattactttattacaattctcaatagccttagagagccagaagaaagaagaactccattttttttaagaaaccttctgagcttcttgaacttggcatagattagtttggtctgatcctgaatatacccaatatccacccaagcattagagacctgctccttgaaaccaagctaggaaatccaaaaatttttaaaacgaaaaatattggattttgggatcattgtagcaatctgaattttaattggggcatgatcaaacacatttttggctaacaccaaagcctgagtgttggggtatctagaaatccaattggagaaggtgaagacccaatcaagttgctctaaaaggggatcaccctgcatgttactccaagtaaaagcacggccttgaagagggatctcaagcaaactgagaaaaatgatgaattcattgaaaataaagatatcattcatgtttcctcctgtcttatttctgttcaaaaccgatctataaaaattaaagtccccaaggatcatccaatagtcattatcaatctggagatcatgaagccaatcaatgaactcatctctctcaggaccatgggatgggccatagacatttaccaaaacctattcctccccatttattttaaaaataaattgaacctctagggcaagttgagtctgttgcaataatacccccagaagctccaaccgaaggagaaaacaaataattatcaaagcgtcttagagccaaggatctaatgaaactatggtcaaagtgatctttttttagtttcctttaaacagtagatcgaacaagaactctcatcaattttctgcttcacggcttggcagcgaactggagaatttaggccacgaacattccaacataggacattgcaagatatatttggaggattcatatatcaaatatagacaggttacccaatcccatgcgaagcatggaacaaaagcaaggaagtgtatatttaaaatttataaatgatctctgatggagacaaaacatatataaaagttgtagatatagatgacatctacaattttgtagttgataaaattttcggttgagcacatatatgctgctaaatatagattataaatttggataacaataatcacaaaacaatagcatggtaagaatctttagaagcatgtctatgaatatgggttgcaaaaatcatttgatatgtgggaagcgaagtgtgaccttacaggggcgtaatgaaaatatcaaatattttttcatgtttcttagcgcctataaaaataacgagacaattgcatatttgaccctgttttgaaccctaactaccaatttgaccctacttcttgaagtttgcttatttaagcctccttttcaaaaacgaagctcccgtatgaccctgttctgttaagggcatctaacggtgttaactgaagtacaaaatgtctcttctgcccttactcatttgaccctattacatgtgggacccacccgtagttctctcttctcctctcctctcttctcttccttctcctctcctctcctccattgggcggcgactgatggggcagtggcggcggcggcgctctgagggggcgtaaggagggagcggcggcggcggcggcggtggcggctgacggagggggcgagttgcggcggcgcacggaggtggcgagcggcctcgctggctcatggagggagggaggaatgacggcggcgcaggcgaggaaggagggaggcggcagcggcggtgcaagcgcgcggaaggagggaggaggcggcggcgccaggtctgagggggtggcggcgccggctccgggtctttgtcgtcgtcaacacagccggctcctgctcttcgtcgtcatcatcaacagggcgctggcgccggctccggctgttcgtcgtcgtcgtcagcagggcaccggctctagctcttcgtagtcgacgagccaccactgccactcctcgtcgtcgtcgtcgtcaccagggccggcaccgacttgtcgtcgtcgtcactagggcagtgccgatctgagggggtggcggcgccggctcgccgtctcgctgcaagtcgccgctgtcactgcaagtcgccgccatcgccgcaaggagagaaatgtggatagggttgggtggatggagagggttttctaagggtattctgggtattatgaatattagttgtatttctttttcattttaaatcaaaacttaacggactaatggaaatagggtcagacgggaaactcgtttttgaaaaggagggtcaaataagtgttgatgaaaaacaagaggcctaggagatc

SEQ ID NO: 5079 - DNA, 30028 bp, Oryza sativa
  unsure (1)..(30028): unsure at all n locations
attaagcaaaacgtgttttggaaggtattccagccaaccgccatttaagggggccaaaaacaagtttctccccacccccagttcagtgccaggggggcgaaattctatcccaaatattcccagattcccaccggcctcgaaggctccattcctttttattgaaaacacacttccctcccgcccaaaaccccaagaaaccccccatcgatccccttccatcatcaacctccggcgattcgcctgccatggcctcgccgtcgccgtcgccgtcgccatcgagcgccagcaatcagcgccgctccctgccgccctcaccagcggcggcctcctcggtgggatcctcgcccgcattcccaccccgcaagaggcgccggtcggggcgcccgcctcccttcctcgggttggcctgctacgacggcttctacccggccacggagccccacccttccgccgagcgcgccatcgccctcgctcgcaaggccgatttcgagtacggcttcgtgccgtgggtgccgaagaaggaggcctggggctggttccccctcgacgcccgcgacggccgcgtcctcatccagtccaagtacttccccgatgaccccgacggcggcgacttcccccgcccccgcttcatgaactacgccgtgtgcgatcccctgttcaagagatacgtgatgctcccacccgtacccgacgacctaaccgccaatgaggggagccttgttgatttcgggctctgccttgccccctcccaagaggatgaggcggatacatcgttcagggtgatatgcgtggcacggtacaacaccaatctggtcgcgttcgtcttctcttccgtcactaggcaatggggaatcggttcgtcttccacctggagttctttgggcacagaagagccccctaaccgccatggcctgagttgcttcgactgtgttgatggctgcttctactggacagtgccttcggcggacaagattcttgtgcttgatgccatcaagatggagttctctgttatcaactatgctcatcgtgtggaggacggctttcgggcttgcattgcagttgatacagaaggaacccctgggatgctgactgttggtgaatacttggggaatagagagtttcgcttctctcgcatcgcgaaacaaagtgaccgtgaatctcccaatgaacgcctgtcggagaatattatacaattgcccagcaactgcaataagtacttcaccttaggtgcagctgagggatttattttccttagaggcattccagaagaagagaaagtagaagactcttcatcagaggatctttacatggatcctgaagaaatagaatattattcgctcaatgtcaagactgttgaatttgagatggtctgcgcgatggacatggacaagtgctactttcatgtttgcccgtacttccgcttttcaccaccatcggcaaaaccatgtgtttgaagtggtaagcttgttgtcatagcagttatcaatgtggggttgttttatatttattttgtttatgctagcagtagtttgctgtctagtagttcaggtagaggtaagcttcttatttttgggcactcagtttatctcatcctcaatgttgcaatgtagcttgtatgctgccacctgtctgggaatttgtcagtgatatatgttatgtgtatttagatggtcttgtaggatctagctcttaatcatcctgttatgttctgaaggtagtgatggtttggttctgtctggcatagcatccagttgccatgcatgatcatgctctggcaaccaggcaaatagatgacaccaatttcgttttaggatatatcatttatccattctctgctgtgggataacttgcttccaactttaagaattaactagagaatgaatattgtgtatccagaaaatgcgtaagttatacctgtcattaatgttctgatggacctgaacccggatcttcatctgggaaactttgttcctgtcaagtagaacaaacagaaaacttcatcactgcttgctgttcagcacctgcctcttttataaatagactacaatgtactaggaaatttatcttaggtcgcaattccattccattcccaaacccccaaataatctcttcctttcagattatagcatgtacagccattttctacttatcccatttcattttggtgtatcttttgttgttgtttgttctatagaccttttaccttctatattttatgagcaccacattttgtccaattgatcccgtcctatggttatctcgatagaaaataattttattagaagtaatggcgcaagagatctgttggtttatttgtttaaagagttggtgtccatacttgtataggcttctatcttaccaatttcaagtttgttgtgactcatgctcatattctgcttattaccaattcttacttttcttactattgattagtggcgagcagaaaaacatgtcattccatggctcatattgagcattccaagtcaatcttcatcttacctcgagctgaagctcaggctgatatccttgctgatgatcctatcctactaaccccataacatttttgttcgaggggtcatcataattttgtgttgggactgttacgaggtttcctgtaaaaatttggcaacacattggaaaaatatataggacatgtatggtgtggtcgggtggaatatcaggcattaggtgaagatgtgaatatggtaaaaaaaaatccttttgcattcacagtaggtgtctgtaaaatctaattaaatttatctgcagggatgaagccgtgcttttgagcccatactcgtgccatgcatccgtactgcttggaagtgcaggaggttcaaaatggtgctgccattctgttgacccggatgttcttgagccttgggttatatttatcacaaagtagtcactaatgtagtttaatagaccgtattaagttaatgtaagcaagacttgctgctggcaaccttattctcgaacagtaatctgttagtggcttagtgccgtactgttattctgtgctggacttcatcaatgtgcaagactgtgcaacgctctgagatgggaatgtgctggagaattggaatgcagtgtggacggggtatagtatatatgcaatggtgagattcacagcttgctggtttccatcgagaagctagtgccggtggctgtccccgagcgatcgtcgtaatctttggaggaggaccatgcaaaactaggcaatttgccactacaaaactttgttcgtttgctgtgttcatgtagaaaattccttgaaacgccgttcgccaacatgggccacctagtccaagcaaacgggtcgatgggccctaactcagaaaggccccaagtacggccccctagtgctaccatgattacctttctgttcttttttaattaccatcatcactcacgcccaggtctgtctacaactgcgataccgcaattctcgtctgcttccaccaaaattcagcggtgctaaaccccaactcgtgtccaactccatttagaacattgaatcctctccgtatcaaaacaccaatattagaaacacacttgctacagtgttttgcccccgcgcacgcttttcaaactactacacggtgtacttttttgtaaaaagtttctatacaaaagttgcttaaaaaatcaaattaatccatttttttaaaaaaattagctaatacttaattaatcacgtgttaatgaaccgttccgttttccgtgttactgtagcgcgctgggaaaacgtccaaacgaacacagccttagaaacacacaggaacagaagagaactcggctgacgcctgcgaatcctactcgttcgtaccgaacacgatcatcgcggttgctgccagatataaaacgcaacccacacccgttttgccgagtcgagtcgagtcgactagtctcccgtcccgagcgcacgcacgcacgcacacgccttgcaaccaggcgagcgaagcgggcggccgcgcgagccaacgccagccatccaattccgcctgatctgtcctccttgaccgctcaaggttcgctcccctttttttcccctacttttttcccctaaatcccaaaaaactaacaccaataatataaaacaacaataatttagattcaatcgaattttagagataaaagatgagataaaaaataaaaaataattctgttattattcagtacagtagtagaaggacaagtcccagactatatctgtttttttctctctctctctttctttttcattgccctgtttggtttcgtatcgtatgcagctagactactactagaagcccccgacccctccctcttctctttcgcttcgcccccactcttcactcccctccccacccccacccatcaatttcttcgtccgtctcgtgttaagccgcccctccactggcgacaaccaaaccctaggccgccgccgccccgggaggccaccaggtaaagcgctcgttcgtccatcccctccggcgagggccgctctctttgcgcggcggcgggattagggttcggtttggtgttgtttttttgctttgtatgcggattggatttcggggcggcgatttatttgggtgtttggtgtttggtttggatcagggggaggaaaaaggaagaggaggagatcggaagtgggagagggatttatgtcccagcgaggggacaggggcgaggggcacgcgagaagacccggccggtccagcagcttaggcggcggccaccgcggaggcggaggagtcggcggcgcgggcaagggcggcgggggctcctccggccagcctcccctcgcaactaaccgcaggtaacgattgattgattgattgatggattggatgcccccccatgatttgatctggggacgagcgggctccgaggaaaagctagggttttttactggacttttggatccgattgcagctttaggaagtccgggaatggccatggcgggcaccagagggctgtgagccaacccgacacgcacggcttcaagcctgcacctgccccgaccggtctgcagacgccgccgttgcgcccgccggcacctcagaatgcgccggcgcatgtccctgttcccgcaccacgtcctcagcaccatggtgatttatcggcctgttcccttatgttggattacaaattagaacaatgtgaaaaaggcgtcttttgatgtattggttttggtgatcgcatgcatttcttgaatgagcagatccgtctggagcgcgagcacccaccctaccaccttccagcgagaacacggccaatgcgccaccactgaaaggtattcctcatgccgctccaagggcaccatcaaggatttcaagcacgtccacttcacaaggagcaccaaaaggtttggtcctcgtaggggggttgtttgcaccttgtaattgatatccatggtatactactttgttaactgcctgctgccactcttctttacaggtggagcatataatcttcagtttggcagtttcccaatgaatggtggaactggtggtagcacaatggtacgctcttcaaccctgttcttgcagcttgcagttcttatttcaatttggtctagtttctggttctttttttcaccttttttctaatttccaaatacttttgcatagcaattccctgccaggacaagctcagctcctcctaatttggatgagcaaaaacgcatgcaggtattttctccttcccttggcctttaccattattgtttctctgctttatgttagtttaatttggtggtattggctatgatttttagtgcgcttttgttagatatatcgataacagtatgttgtcaacaaatgcaccaaataatttatgctcctatgtataatatgctttcaggagatttgagcaagtcatgcctttttttgcttctattgttgatattgtattgataggtgttattaattttcaatattctaaaagaatgtattattgtgttatctttctttggtgtttaggccctccctgaaggtcataaggttgtaccttctgggcttgttccacaagctccaaaacatcagcagcaacagcagccgttgcagcagcagaagcaacagccgcagtcacagccaccactgcagcaaacaagaaaggatgttgttagttctaatcattcatcgaaacctatcaaccctcacattccttcccaagttaagagctctgtgcatgtctcaccatccgtgcccaatgttgcaccaccaagaccccctgttcagcagatacctgggatgcccatgtcaatgccatttcaccaccaggcacccttgcagtttggcggtcacaacccacaaattccaccacagggagttgtgcccagttcactacaaatgtctatgggattgcatggcgccaacgcaccccaggttgcacagcaaatgtacatccctaccattcagcaccatcatcaactgcaaccgccaacaatgatgcatcaagcagcaggtataccttatggtccagctgctcatcaactcactcagatgagtggtatgatgaatgtgggggtggcacctcagtttactccacaacagccaaataagtatgttacaggcccaactcggaagaccacagtcaaaattactcatccagatactcatgaagaattgaagctcgataagaggatggactcttctgggcaaaggggtttacctagtgtacaacaacaatcccagccggtcagtacttatggatctcctatgggcttctaccagcaaaattcgtataaccagtcaactatgttttaccccacaacctctggtgtcggtcaggtatccactgtatcacagggtcctaggtttgtatccacacaaacagtttcatacatcagcccatcgatgaacacaggtcctggcagtaacaaggacaacctagcagggtctacaacatctggacactcccaagtcacaggcaaaccacacccagctggtttgcacatggagaaatccggggtacaaacggtcacgataagtgcgccgcctggtaaatcagatgtgaacaagttaaaaccagctgaagatgttgtatcacatcgacaaaaggataatgaagctgtttctggggtccgtaaatcaggtgaaaatgagagcaaagcttcaccgatcacggagaagcatcccacaccagtgagccaacccttacaagctctagctgcaaatccagaaactacagcagctgcatcttttgttgtgaattctgttcctggagatgatggaaaaagcaaagaatctattcaaagaactggatcatttaaggatagcaataagaacgccactaaggacaccaggaatttatcacaagaaccacaggtagtcctgtaaaatattctatttttgcaattttctgttgttttgtacgttttgctcaacagcttatatattgtttcgttcagtcagcttcatctgctgaagatttaaaggtgcatacttctgtaaaggatgtatgttgtggtgttagtctcatggaatccaagggtgtgaataaagagtctgaacagaccaatgcagcttccgcttcaccgactgaaatgttaaaaggtatatgcattatgcactttgaaaatcaatgccaaaacagttgtattgtgttgctttgtttaacatgtttgctttggcagctgctgatgcttctagcattgataggagctctgcaagatcgacctctgagagcactgagaatgttcaagaagtaggaaaatctgatgttgctattggtgattctgagaaaagtggaataactaacaaagtttcaccagatcttacaaaggatgatatttcttctggttcaactgggaatgaatcacatgaagtttgcacgctagatttggcggagcaattacctgtgggagcttctaatcctgataatttagatactgcaacttctgtaactgaccagggacagcttctcaaagaacccagctcatcagtatctgatgagaatgttattatggacagatcgcatcagagtgctgaaaaaatgtcagatttggttgatgacactgttgcttctgttgccagttctgaaactttgccagaatctataattcaaaatgccaatgctaaaggtaacacaagtggtaatcaggaaacagggtctgctacatctagcaatattcttaatgtgttgccggtacctcattcagtggcatcagaggatccactgaaaccagaaagtatgttaaaggatcaatcgagtagtgcaccagcagcctctgctcgaccagtttcaagggaaaaacctagcgtggaaattaccagaacaaagtttacagctgtgaaaaagaagaaaagaagagaaatgctttcaaaagctgatgctgccgggagctcagatctttataatgcatacaagggacctgaggaaaaagtagatttcattggtgcctcagagagtcttgatagttcttcaattgctgatcatgagctaccagacgagtcctccgaaaaggaggttaatatgggtgaggacgagggaaagaaaaaggttgagcttgatgattgggaagacgctgcagaaatgtctactccaaagttggagaggtctgattccagcaatcaaacaaccgaagctaatgggaggaagagatattcacgcgattttttgctaactttagcacagagttgtactaatcttcctgttggtttccagatgattgagtacgccagcgttctgttccctaatttggccggaaagtcttatgttgttgatcacccaagtcctggaaggggagctgacaggccagcatctcgtggtgatcgccgtggtgttgtcattgaggatgatagatggggaaagtcgggccatctttttggttctggtcgtgatatgtccatggacaatggccctccaactatgaatcaccgtggtgctccaggagttatgaggaatccacgaggtgggcttattaatgtaggaccggttgcacctcaaatgtctcgaagtggctctgatgcagatagatggcagcagaagggtatattcccatctcctgttacacccatgcaagtaatgcacaaagcagagaaaaaatatgtcgttggcaaagtttctgacgaggaagaagctaagcagaggcaactgaaggcaatacttaacaaattgacgccacagaattttgaaaagctttttgaaaaagttaaagaggtgaacattgacaatgtggcaactcttactggggtcatttcacagatatttgacaaagctttgatggaaccaacattctgtgaaatgtacgctaatttttgtttccatttggctggtgcactgccagattttagtgaggataatgaaaaaattacattcaagagattgcttttgaacaaatgtcaggaggaatttgagaggggtgaaagagaagaagctgaagcagacaaaactgaggaggaaggtgagattaagcaaactaaagaggaaagggaagagaaaagaatccgtgctcgaaggcgcatgcttgggaacattaggttgattggggaattgtacaaaaagaggatgttgacagaacgcatcatgcatgaatgcattaaaaaattgctgggaaattatcagaaccctgatgaagagaacattgaagcactgtgcaaattgatgagcacaattggagagatgatagaccatgcaaaggctaaggagcatatggatgcgtactttgatataatgctgaagctttcaacaagtcagcaattatcttcccgtgttaggttcatgctgagagattcaattgatctcaggaaaaataaatggcagcaaaggcgtaaggtggaaggcccaaagaaaattgatgaggtgcacagggatgcagctcaggaacgacatgctcagtcgagtaggttagctcgtggctcagttgttggttctggtccaaggcgaggagctgcacctatggattatggtcctcgtggctcagcagcagcattggcttctccaagttctcagcaagttggccatagaggaatgccttcgcattcccgagggtttggtacccaagatatccggtttgaagaaaggagtcctttggaccatagaacaactgtccttcctccgcgtaaggatgaagccatcactcttgggccacaaggtggcctagcaaggggtatgtctataagagggcagccactgatatcaaatgctgagctttcttctgctgatagtcgcaggatggtatctggtcccaacgggtataattctgcttcaactgcaagagaggaacctggctcgagaattcctgatcgctctggaagaatagcaccaaatacacagtttgctggaccatcgaacaggcctgccagccaagagggccgttcagggaataaattatactctgaggatgatttaagagagaaatctatttccgccatccgggaatattacaggtaatattttgtagcctctgaattttcatacaaactatttcttcatttttttgccaataactattatgtttgttacaaattttgattataataatgacttactgtcttcttttggcaactgctagtttcttagggtgtgttctttaccaactcttcccaactagactctcattttctacgcgcacgctttctaaactgctaaacggtgtttttttttttttggaaaaaaaaactctacaggaaagttgttttaaaaaatcatattaatctatttttcgagtttattttagctaatgcttaattaattatgtgctaatggatcagtccgttttgcgtgcggggaggtgaagtttgcaatctccacctccgaacacaaccctgtttcgcaattattttaggcaactactagtgctttctagtttaaatttgtcacttctcattatgtggatttcaagtctgctgaggtacccttgtttctgacgttggagtactgggggtttatgaatgctggaattcaaacttaagacttaagggatagacaacattcttgtaacgttgagccagtcacaagattggagggcaattacaacttcttttccaattaattttaatcttgagatatctattactgtgtactttatttaggaagctagggtgttgttcttggatttcagtttttattgagtaacattttgttactattactaaaaaatttagaggaccacaagaacagtttattgtggtcctctaaattttttagtaatatatatgagtcctctgcattgtgtgctaacatatatacaactatttcggcagtgcaaaagatgagaaagaggttgctttgtgtattgaggagttgaatgctccaagtttctatccctctgtcgtatcactgtgggtaaatgattcttttgagaggaaagatatggaaagagagttgttgacaaagcttttcgttagtctttgcaacagtcgaaataatttattgagcaagtctcatctcactgcagggtaattgtttctcttcttttcactcctattgactctacttttgttttttacattttactgtatactgaacacatggttacttccagacttgcgactgtccttggttcattggaagatgctctaagtgatgctccaagagctgcagagtatcttggacggcttcttgcaaggtttgtggtagaaagcatattgtccttgcaggaggtgggtacattgattgaaaaaggtggagaagaacctggagagcttgtacatcatggcattggagctgatgtccttggtgcagttctagagtcgatcaaagtagaaaagggggattcattcttgaatgaggccaaggcaagctccaacctcaagttggaggattttagaccacagcatctcaagagatcgaagttggatgccttcatgaaagcataaagaagctttgttactaggtaagtcgggtgttctataatggctcatccatagtatgatttagatctatatgtcaatcagtgctttattgagattgtaaaatcctcaagttctaatatactgttttggctgaacagcttaccgattcatgggtgttggcaccatggagtttttggcatcagaccagccttttttttattgacaactggaaaggcccatcagatgctgcccctacttggcatgcacccattaattcttccaggagctcatgctgtgtgaattttcttcatcctgttcagagttggttctgatggtaaattatggaattgtcctcgatgtttgttgccaatagttagtcccatttcgagtcggccgtagcgagtatcagggttatttttttgtgatcacaggggggagaagtctttctaaccaatgtttgttgggagtagggagaattctaggttcacagcttgatgcctcccgtggcttctgaccaatatttcattgtgataagactttgtagttgcttataacttatcggcattttcctgatagccaaatgtttcacatgactcacctaccactgccttttgtttaaatcttgctgtacgtatttctgtcgctcttttacttggtatatatgtttgtgtgtatttcttggacctgacgtccatccgatcatcttgtctaacgttgtaacgggccctcgtttattatatggggtgtagaatggttgctgacccttggcaaattagaggtgatctctgtgtctcctttgcgtggatcgcactattttctgatgctccaacgcgaagggaacgggtgcttacacagtttgaggtattggtggaatcgtagattatttccgaaggatcgttgttgggtcatcttctcactctgtgtactcgtgaattggcatccttggaggtacttactccgttaacttattttgtgatgatgtatggctgagacttcatttctaaatccatgggggtatgataaggttttctgttttctccaattcttgtgatgttattatggtatgggtgtgtttagttcacgtcaaaattgaaagtttggttgaaattggaacgatgtgatagaaaagttggaagtttatgtgtgtaaagttttgatgtgatggaaaagttagaagtttgaagaaaaagtttgtatctaaacacggtctggtctatataaatacgactatataggtgcatcttgtagacttttatggttgctttagccccatgtaccgcctcgatcactctcccacctaataagacatggctaaatttaacacggtctaaaattaatatatgtgactttaaattttttatacactataatattgatataaagtcataatcatacaaaagaaatccaagtgttaatctaatgatgtactcccttcatctatttttgatagtaatatttctaaatctgaaaattttatttttgatagacatattttaatccaacaacttatcatcttaatgactttctcggatttaatgcgtgactcttcattctttcacataaaattggctacatgagcattgaggattataaatattaatgaatcgcttgtttacgagaaatgactagtagcatgtttaaatggatgataaatagacttacttatccttggtctgtgtgccaagatgaaatatgactatcaaaagtagatggagggagtagttgtcatctaataaaatttaatttatcacaaaacaattattgattaataaacattaaagctcccatcggatggcctattcagccaaagaaaaagccaaaatttgaattttcaaacttaattttgacattgattttgagatattttcaacgtagtttctttttcagcattggcttttaaatcaccgagaacacatatatattacctccgtcccaaaataagtgcagccgtagatatccgtgcccaacgtttgaccgtccgtcttatttgaaaaatttgtgaaaaatttgaaaatatttagtcacacataaagtactattcatgttttatcatctaatagcaataaaaatactaatcataaaaaattttcaaataagacgaacggtcaaacgttgaacgtgaatagtgcaaaactgcacttattttgggacggagggagtaaaagttttacctaaaaattcatttttattctctaataagccgttttggcttattaaaaaaaagccaaacgatgaggccctaggaccttactcaatggaatacaccctccgtccctaaatactccctcttcttttgatagtaatattttatcttgacacaatgatcaacaataagtaattctacttatcatccatttaaatatgctactagttattcctcgtaaataagcaattcattaatatttacatttctcatgtagccaatcttgtgtggaagaatagaaagtcacgtattaaatctgagaaagtcattaagaagataggtggttgaattaaaatatgcctatcaaaagtaaattttttagatttgaaaatatgactattaaaaataaatggagtagatggagggagtataagggattttggttagattcacatactagtattgtatttagggcccgagggagtattataagttgttttaacttttttttttaagttgggggctttatctgggtttatctgggtcatattaactactccgtacatcacttgcccatccgcctcactcctgcccagtccccctactgctctcgccgccccgaccaccggcggccgccgacacgatgtcctcgccggagcaggagccgatctacgacctacctcaactcgccgacgagctcctcgaggagatcttcctccgcatcgcctcgcccgccgacctcgcacgggcctccgccgcctcgtcaccggccgctccttcctccgccgctaccgctccctccacaagccggctcccctcctgggactactcggccacgacggcttccaccccgccgagccgccccaccccttcgccgccgccgccgcccgagccctcgctcaggccgccgacttcaccttctcgttcctcccgtccccctgccgctggattcaacaggattgccgggatggccgcgtcctcctcgaacgcagcctatccgacaacgacgacgccggtgaaggggaactcgtcccgttcgacaccaggaacatggcggatctcgccgtctgtgaccccgtatccaggcgttacgtcatcctccccccaatccccgacgacctgatcacctccggtgagcaggagggcctcctcgttttcgagaccttcctcgctcccgccgccaaggaggaggaggagatggtgggcacgacgtcattcagagtggtggcgagggcgaactacgaaagcaaggtggtcatcttcgtcttctcttcactcaccgaggaatggcacagctccagatctgtcagttggtctctcttgaccgccgatccctggttgtcgtcgacagctcaggcgcatctatggtttttcccgcgttactacgcgcacttcgtctactgggtgatgcatctggtggatatgttgctcgtgcttgacacatccaagatggcgttcttcaccatcaacttccagtgggatcgagactttgctattctggagacagaggaagacatgattggagcattctgcctgaagggagacttatccggaagaactcacctctgttatgggactaggcgaatcgatgctgattttgccgatagtccaccgttgaacttagacaagacaatccccttgcccttgcccttggatcattgctatcacattataaatgcaacccaggatacttgctcttgcaagggcggcgactacactcgtccagacgcactacggaggaggatgatacagatatgctatatttcacattggagcccaaaacaatgcttctcgagaaggtttgcggaatgagtagaccaaatgtcactgcaaagatatataccagtttcccaccatccttgtcactgccaagtctgaatactgaatatggtaagctttttattatagcatcagtaacatcttgccaagtctggccttggggatcagctcttgtgatgtggattcaatgttgataaagtgtttaccttcctggttgttcccggattgctggtttttgctgtgccaaaatgacctcatatgtgcttgtgcattcttaaccattgtcaccattttgattgtatattgtttgacaatttcctagagttgcaggctcaccgaaactattatctgttgtttgaaaggttttttaaattgaagaaataagaaatgtgatcattgaaacttcagaaagcacatttaactcttatctaaggctctgagctacatgcaattttttccccgttttatagtcgttctgacataaatggaacctattcgtgcagtgtggttactctgggcatatccaaattagctcatccctagatctccacaattgccccaattcatttcttctgccccttagccatttattatagttgtgtcttcatccgagttgtttcgtggtggtgcttgaatggctagtcatacttgggagtagggaatgcagccgtgatgatttgcagtgttgctctacaaattagcagcaaacttagttttgcacaaaatggtttctggtatggaacagcactggcactattagattgcagaccattgctacctacatggcagatatgtataaaaagatatgaatgtgatatatcatatgaatataatttaatgattacccatagcctcacatatatgaaccaatagtgggttcagttatactggaaccaatataactgacttttaccattttgttagcttcgatgcttcttgtcatacacaagcacaacctaggtcaaggaacaagcaatcaacaagatagaccaggaatgggaacattggacttacttttaggtctgtggctttgcttaccagatttatagtctatgtcatgttttatctgaaaatacattcaaagtgatttttttcaaaatgaattggccatcatggtttttgtatctggttttgcatgtaccatgtacacccttggtcccaaaaaaaaaaaaaaccaatcctagctagaattggttttttatgggaaggagggagtagctatcatttatagagtataatcacgttatcctccggcatgatgaatatctggtttttttctgtatgactgtatgtaggcttgtttggttcaatgagaaggagtgctcaggagccaggaaggaatatcttggtagacatgaagctacaactgacggtggtggcatctatcagtattagtttgttcaaacgttgtctagtttgtttaggtagtcctattccacttttagcccttgtgatgtatttttgtatttggttgcaagtcaagtcaggcagatcgtggcttttggagcttttcaggtttgtccaatagaatcctgtgaaattaaggtggatggaatctattaaatgtttggaaccatgttttgtctgtcatcttgagcataaacttctttctaaccttatgcaattgctcggataaattctgttgagttctttaacccactggcaaattcttaattgtcatattgtgatattgtttctgaacattgatagtgtgaactgaagtgtactttggggcgtgaggtctcacatttagaatatgattcactgatatttgatgtggtagcttgctataaagctgtatgcagggaaactaaagttcactgtgtttcaagatcgagctgatttaaggcgatttacctagcggtaaacgcaaaacgaggtgttctgcaaaacgccaaaaatagggggctgtttacaaaaatcccactacacggccacaaattgaccggtgaggattgtatgcgctactgtgcagtagcggacattgacgggccggcccggcacctccttgggccgtgcttgggctgaggccttggcacgtgggccggaacggcacggcccgctacagttaccaccagcgggcccgtgccgtgctgggccgggccgcccatttggcctgctataggccatgaattcaccgctctccagtctccagtgctctcgagtctcgacgctcgcctctgatcccctcccccttcgatcgagccgtcgatctcgccgccgccgccgccgccgccgccgcctccgatgtcctcgccggagcagccggtcgaccctacctcgctctatacggagaatattttgccacccgacgagctcctggaggagatcctcctccgcgtcggctcgcccgccgacctcgcgcgggtctccaccgcctgcgccgccttccgccgcatcgtcaccagccgctccttcctccgctgattccgctccttccaccacccgcctcccctgctggggctactctgcgacgacttctacccggccgaccccgccgccgccgcccgagccctcgcccatgccgccgacttcaccttctcgttcctccctacccctgaccactggtggcgctggatgcccctggactggcgggacggccgagtcctcgccgccctcgtccccatgaccaagatcatcacccacgaaggcgacgaaggggagttcgttccgttccccaggagggacgacgtcacggacctcgccgtctgcgaccccatatccaggcgttacgtcatcatccccgcgatccccggcgacctaataacctccggtgagcagcgagattgcctgttcgatttcaacgccttcctcgctcccgccaccgaagaggagatggcggattcgtcgttcagggtggtggctacagcgcagtgcaaaagcaagttgtttgtgttcgtcttctcttcacgctccgaagaatggcgtaagctttcaattcgacagtgggagcatcttcgccgcggatgtgaactcgtcggtgctggttcaggcagatttcttcttggccccgcgctactatgcacattgccgcttgtactgggtgctgaaggagatggacaagttgctcgttcttgacacttgtgagatggtgttcttcaccattgacctcgagagggatgaacacatgtcaaacattgccattctggaggaggcagaggaagatatggttggagttttctctctcaggacagacttaggcttcactacaagaactcagctctgttatacaattaggcaagtcgaagctgatgctgccaatgggccaccattgaattttgacaaaataatccccttgcccttgcccatggagtatatgtttcgcatcatagatgcagctgacggatacttgctcttggaagggaggctactggactggttcgaatgctctttgaaggagggcaggccagatacattatatttctcactggagcccaaaacattggttctcaagaggatttgcgtgttggaacgtccaattaccgctgcaaagatatataccggttttccgccatccttatcaccgtcaagtctatgaatatggtaagcttattagaattgcattgctatttgtgttttactggccttggggatcagctattatgatgtggattctatgttgaggaacataaattctgtgtgattgtttttcaaaatgatttggccattatgtgggtttcttgttttgatggaatctctcggtaattgtaatactacataattctgtatacaggctttttggcatgatgatagggacatcgaaaggggacagagcagcactggttatcaatattgctctcattgctcaggaacgccgttgactacatcaagctacaactgatagtggtggcatctatgtaatttttcaacagtaatctagtttgtttctgtagtattgttccacttttaagttttagcccttatgatgatgcattcttggctatttggttgcaagtcaggaggctctttctgatgtaagctgtattatacttgactagtggctagtggagctttgcaggtttgtccaatagaatctggtaaaaatttctgatgaaagttgatggaatctgttagtgcagtttataagcagtttttctctaagtcatcttgaacttgaactgctgtttcaaaccccactatcagtagtttgttcaactgttatctatagtttgttagagtaatcttgttcccgcttttagccttatgacgtactactattcttgaactatttggttgcaagtcaagtcaatgaggccctttcaaacgaactctctccgtcccaaaataaaccaactcgtacgagattgatttattttgagacggagggagtatgctattaaatcatatggaggacatattccagccataaaagacacgtcccaaacagataggcgatgcaaaataggcttattctagcacgatgggctggtcgtggtttcgggccggcacggcaaggcccacatcttattgggtcgtgcctaggccgtaggtacaacctgtgggctggcccagcacagcacgaagagtatccgggccatgctgggtgtcccatttagctatctataccaaaggatggaatttttttcggttttagattttttttaaaaaatatttacagaaataatctatcggccaaaaaaaattacaaaaatagaccctgccgcccacctctggggcggcaagctgacgtggcaaacgggggaggaacgggcggtgacggagggagggttttttgcaggaaaacccttgccgccctctggtggggcggcaaggggcccgaatgcaaaaaagccagtcggggccggctattttgcaggcggccccttgccgccctctggccgggcgacaggcctcgctgcctataaaaggcctgctgctcagcccccagccctcattcttctctcctcaattccagtgaaaaaaaagaagagaggggaggagaagagaagaaggggcgaagccctgccggattcagacgccgatttcaggtaatattcatagatcctatatgtgactattgagttaaatagtgtgtattctttaaaaatttgtttgaataaatgcattatatttttagggttttagttgtactaatctagaagtgtgtattgtagatatcggtaactacatagatctgctagtttggaatcaatacattaccgttgcattggcttacacaagaagatattacgttgtagatgtttattgcatgaaagagtaatatgatctagttatttcgttgacagatatgtcgaacaaacaaatattccaagtttaccatggaccaggaaacgtccgttacgggccaactggggtagatctatcagattttattgtatcagaaaggggaattgataaaccggctgagaggagtgtaccttctataaaaggatggttaatgaggggcttgagagttgatccacagacaagtgacataacaatcaatgttatagtaagtcgggcaactgagggtttttattgggaactaatgccagttcaaaactctcgagtgtggagatggtatttggaaaatgcattgcaacacgggtggcctctagctttggttccgtttgttcacccgaaggatccaggtgtgcagatgaacatggatgatggcgagggaccaagtgctgaagtaaacgagacttctgtggaggaggtcaacgcacgagaggacgggggcgtagtagctccagtgggcattcaaccaggtggagtggccgacgagggggagactgtcggtgccattgtggatgaaatggagagggaggattctgacaacgagcgtgtagaggaaggtgattcgtcagatgatgagacggatattaatccagcagaatgggctagtgaggatttttttgggctgatcgtctctgaagaggatagtgtgagatgggagtacaaagaaaatgaggttattcagggagcgatttatagtagagcagaagatatgaaggaggcggtaaaacattttgcagtgtcacttcatagagagtttagggttgccaagtcgaaccggtcgcaatatgaagttcggtgtgttaaggaaaaagatggttgtccctggagagtgcacgcgtataaggggaaatggaaggattattggacagtgtcagtcgttaccaagcatacatgttttctacctggtaatgttatgttatattattgaactctacatatatgttaaattgcacgtcatcgttatgtaccattagtaacgtttgctatatttaaatagcttgtactcttgttgtacataattaatctcatgattttattactatttcataattttgcaagttatcttttgttttacattactattttttgaattgttctaacacgaaacactatatttttcagagatggcacgtcaggatacacctcagttgttggacccggcgatagatcaccgacaccggtctcaccttactgcggtgcagggggctcagcttggaacgttccgggcacggacgtgcggtgagctactcacggttcacgactcctttgtcgagaggtacgaacagtgttttactataagttagttgcactgtaatattttttataatgacatattaatttgttattgcaggctacgtgaggccggcctcctaccgatgtgtcggctggtggaggctgcggccggtgacgcggacccagctagacgatggactgtggacaggtccctcctagcagctttggtcgatcgatggaggccagagacgcacacttttcacttgccgtgcggtgaggtagcccctaccctacaggacgtatcgtacttgttggggctaccgctcgcgggagacgctgttaggccagtgaccacggctgtggactggcaggacgatctgacggcacgtttcgcactagtacagcgcgcaccgcacctcccgctcaagccgttggcacaccaccgcaacaccggacctacgaagaggtgactgcttcagttcaccgtgagtgtttttgtaccgaaatgacaatcgtattacatatttagtccgcagttaaggtgcctaacattttatcgactgcttgcaggttgagcagctacaggcggaggccgacgagtactcctacagccgatgtttggaggcgtacttgctctggctttttggctgggtgatgttctgtggcggtcacgggcacgcggtcgacaagggactcgtgcactacgccaggacaagggactctggctttcagaactcagtcacattcagtactctcttccccacttgcttcattacaaatccgaccggctttcgtcaatggctagacgccggggtgttgaggatccaaactggcgtagcgatccttgtgtatatctactaccaccttggtgccagcgtcctctctgcctatgcggtgatcgatgccaactaatggcttcgaggaatcctgatattcgaggaaggcgcttttttaggtgccctaactatgaccgtgaggtattttattatctgcatatgcttattcattccgtatgggcaatcgctttattcttcgtaacactactctattcggcagacccgcactacggcttgcgcatacatcgagtgggtcgatacagaaaatctcgttctcgacctaactacttgtttacaagaaggtcgctggtatttcgcatccgaaagtaatgagcaatacttacagagaaaagcggtttatgaacgacaatgtcatgaacaacagagcgactggcgggtgctaactacggcactccctccatgggaagcccgtccaagatgcaggtgtggtgatcgttgtcaggttcttcgttccataaatcctacaacattgggtcgaaggttctttgtttgtccaaatattcttgacgacgatttcatggtaagaatattttgattacatgaatccttattttctcacaacatttactaactttgcttgctttacatctattctttcctcccaggaaccaccaaggagatgtcaatacagagaatggatagacaccagaagggttctaactccacctagccgtgttgtgcagcttgaactaacagagcaatacagggttactaaagcgcggtttgagagaggagagggatcctcacgtaggggttagctattatcggacaacttggcatattgaaatttctactgtcatgcttccttgtcccattactacatcgtcgttgtgttcaactattgcactacctccctcctagttcgaatctaatatcatctatgtaaccgcaatgcaaatagtcgtatcatgttcaaattgtactactatttcttcatgttacataattctccttgtttaagtccatataatgtttctacgacccagactgcgataggcctatctaaattatccgagtactaatacgtcgaataaggtacaaaataatacctcacttaacatatgaaattgcgcaacaaccaacttcaatacatttttataacaatattaacaagttttaccaataaatacttctttatttattattaacataacatagaaaaatcttttggccgtacttttttcatctgggtcccttgccgccctctattggggcggcaagagacgcagatgaaaaagtacggtcgcaagctctttatgggcggccaaaattgcaattagccccttgccgccctctgtatgggcggcaagggcctaatcgcaattttggccgacggcggcagacggcgcggtcgacccaccgtctaccacgtcagcttgccgcccaccattagggcggcaggggctatttctgcaatttttttgtcgatagattaattctgtaaatattaaaaaaaaatctaaaaacgaaaaaaactcccaaaggatgcagataggttggaaactgccattctggaggcagatgaaatcaactgatatatagtacgatttgtcggctgatggtgccaatggggcaacacttggatttgcacaatacaatctctttatcattgcccttagattatagctttagcatcctaggtgcagctcagggatacttaatcttgcgaggatgtcacgtcactccttgtccatagactctttggaggacatgctaaggtgcagctcagggatacttctcagtagagccccaaaagttgcagtttgagagggtttacaggtttgatacttggatacctactttgcaatgcagggatatatactggttttccaccatccttgtcacaagcaagtatttgaatatgtggtaagattataannnnnnnnnnnnnnnnnnnnnnnnnnnnnnnnnnnnnnnnnnnnnnnnnnnnnnnnnnnnnnnnnnnnnnnnnnnnnnnnnnnnnnnnnnnnnntcgcccgaagcatcagaccaatgatcacccatgacttatgtgtaccactagtgccacaaaggcctgcctttggtggtcttattggcgcataccatggtaataatcttgataattgtgttttgctgtcccctgagagattagctctttccatgtgaactcttttggtgattatatgtgtttaccttcctgggtgttcctataccatttacttttcaccgtgcctatattatctcatttttcgttaaccattgtcgccgtgttgattatttgtggtttgccaacttgttagtgcctaagactgtaaactatgcactatatatgttttctatcttggttatggtcggtctgttttcagtccaattaacatgcacgcagttacttttggcatatctgaattatctatttccagttatccgtaattccccacaatcgatgacttattgttgctgcatccgaattgtgttatgctgtttggaaagatagtcagatcagggagttgggaatgcagtgacggtttgcaatgttcttcaaaaaattgccgttctagatattagttttttttactaactgatttccagtttggaacaacattcacacttttagatcactggccatgcggagtacatgtcaattatgtatgaaaataaactgaatgtgaccattcttgtgaatataatttagtaattgcctatagcttcacatatataaaccaactgagttcatttatgctggattcattataaataacctctagcattttgttagctttgacgcttcttgtcatgcacaatactaggtcaaggaacaaggatcaacaagataggccaggaatggttttacagtatatgttgccctattgtgttttagtgcatctcgtcactagcatttctagataaactgacctcatcctctgccataaggaagcacttaacatttcttgccttcagccttggtagtatttttattgaccattttaacacaatatattctgtatacaggcttgtttgacatattgataaggagacatcccaagggggcagagcaggattggttgtcaacattggtctgagtaattaggaatgtcgtgaaagacatctagctacgactgaaagtgctggcatctaaattatgccttaggctgtgtttagttccacgccaaaattggaagtttgaagaaattggaatgatgtgacagaaaagttaaaagtttgtgtgtgtaggaaagttcgatgtgacggaaaagtcggaagtttgaagaaaaaagttggaatctaaactgtgttgtttccatcgaagtttgaatagtaaattatttctggttttcggaaacggaatggatatttagaaaaaaaaaaccacatcagtgtgctactgttcttgtttgacccttgcatgctcttgcagaaggacttctgacttcaccgtatgctccctgtaaattgtacccatggcctgccgtctgaccgctcaaaagttataaataacgaaggcaaagagcaatggtgaaagtggctgccatttttccggacagaaatattcagaagaatggcgtcaagcctgcagtctgcttggaagctgctgatgctgctgctgcatgacaccgaaacagcagcaccgtcgtaggagtaatagcaaatgtaaacctactcctacgtcgggaacagatagcaatcgagtacatttctgcatagcaatgctgcagatacagacaattttgtcagtttaatttcctgttaaaccgatcagttccctgttaaacaccacggtcaaatgcaattcatgcacacaaatgatttatgttgcttgatgctgtacttaagatctgtctaccaaaacagagagaactgctcttttcttaacataaaaggcaatcaaatttcaggaaattcaggtgcatacaggttagtaagtctccttttcccatcttcacattttttcccactttgccaagtgattgatatcctaaggtcctgtttatttttttgaaaaaaaaagcttatggccccagattattagtgtgcatgaatttctctaaaaatatgattctctaaaaatttccttatgcaacattgcttagatacctttacccaaattatttgttaacaatacaaataaatagactattttagctcaaaaagaataggagagtcttcaacaggctctccaaatggctctctaaatcaaaatttaacaattctagcaaaacaaaaacgcgctccaacaacctctccaactaacgccaagccattcggccagccaaatccctctccttgctgaccatacttgactggcctaaatgacttgtcaatggtgacctcacacacattccgcttccctatatggctactcccttcttctctctcgcatcggccgtctaccaacctagccaccaccgtggcccctgctaacaatgacagcacatagcagagaggtgccggatcacgggcaccaccagagctacatgttaacatccaaatatggtacctaagcacgggataggaaaatattgctgaatttggaaaggaccagtttttttttcatggggccggtctgacctacgacatgtggctggtcagaccggctgagtcctaatccgacttgaatttcattgggtctcgggttctcttacttgggctgaggattttcaagttctaattggtctttatcccgaatgaaacgtggataagatcttgtaggaggcaagactaacctctttataaggactatggccggtttaattgagcacacaatctactccaacacaattaaccaatggaatcactttttcaatatcgcatctactttttacctagttcaagcctagtttttgtctatcttcgttggtttgagctgaaagccgtccgtcctcaccgcaagagtgtaaattctcttgtaggtttgtcccgaaattcttccgttctgcttacgagatgggtgtttatccctatatcatctaaatcggctccgctagctggtttcgatttacacgagcttacccactgctagtgggacgtcttcgacggaccccaaggcactgagcattggcctaccctcctacccacgagcgccaggcaagtgtgggaactcgacggatgccatgtaccccccccctccttcttcccccaccctggccaccatcctcatcacccccaaagatggccacgtccaccacgccatcgtcatgctgatggagcatgtagcaggctgcacaggtcgccgccacgggggtaggagccgagcggcgtgggtggcacggggactatgtcgtccctagctctggagtggccgttggccggaggtcacaaggagtggtcgtcggtgggtggatgaggaaataaaagagaagaggaagaaaagatgagttcttaagacactaatatgtggggtccacgaaattcggagagtgtgagatggagaggttattggagcacactgaaaacatagagagagatctttttggcaagttagccaaatggaatgggcaagatagagggtcaaaaataaccatgctattatagcatctccaatagtctctccaaatctgactctccaaatatttatttggctaactctccatctaatttgttaagtcaaactcgttatttactccaacagcctctccatccaccctctctattctaagtctatgatagtgggtcccacgtgtcagtccctacaaccctttcttcttcctcatctttctcccccttttccccaagtccttctgctcagctcgcggtcccctcggccgccgccgccaaatccccatccgcccatcgccatccgccgccgccgctagggatgaaaacggatcggaaacgaacagaaactaactttatcatattcgtcttcatatatttttttcggaatcagaatcggaattgaaaactcggatacggaaatgaaatcgaatattatcgaatacagatacggagcgaatacgagacggaacgaatacggtagcgaatatttaccggtatataaaaaaatccctcaaattgagtttcttgataaaggaagagatatcgcttattattttagttcaacatctccaacatttatatcgtcaattttgtagacggtcccacaactatatgtgaaaatcgattttcatggttgttcctctaagagatccatatgcaaatatgattatcattttctattcccaagaccttttactagatgtataacttacttaccattgtataaattggagatgttatttattttacttcacatcttcgaaacttgtaatgtttgtattatactttaaatgctttcaaatataaatgttataaactacaaatggtaaatcccgttgagctctagaaattccacgaaaacaatccgaaaccaactccccacggaatctgccgatctgaccggcaacctagtgccaccctgcactgttcacccgcgaaaacagtattcaccataatttccaaaacactcacttttgactatttgttcatcatatagattgaatctaacaccttgatttcacaatggaaagggctatctctgaacccaatctttaacacataaagaggagagaaggagttgagacgaaaagcatggagcgagctgcctgagagattgaatgggataggaatctcccaatgtggacacttttcattaatcctttcttactataaaattgatgcccattaactcctaaaactcatcatgcaagtgtgcgacatcatcacccatactagcaattattatctagactattttaaatatcatgcaaacattacgtatcatttacaattttgctgtattattagaactcaatatacaagcaatggcaaattattatctccacatcattttcacattatttaaacatatacatttaccatttctatattgtataacatgtattcatttacacatcttgcagcaaagcatggggtatcaactagttaaactatatttaacccccgaggagtaatagtccctcaaaactcttcactannnnnnnnnnnnnnnnnnnnnnnnnnnnnnnnctcgc

SEQ ID NO: 5080 - DNA, 8635 bp, Oryza sativa
ggcatcacggtgctggactggtgccgcaacgagcagttctacatgatcggctccacaggggtgtacccgcggcgggtgctgtacatggcgctcaagctcgtcaccgggaagggcatctacttcaggctcacgtcgaagcagacgacggccagctccggcgacaagttcgccgacctgtacaccgtgcggtgggtgccgctgctgataccgaccatcgtcatcattgtcgtgaacgtcgccgccgtcggggtggcggtcggcaaggcggcggcgtgggggccgctcaccgagccggggtggctcgccgtgctcgggatggtgttcaacgtgtggatcctggtgctcctctacccgttcgcgctcggggtcatgggtcaatgggggaagcggccggccgtgctgttcgtggcgatggcgatggccgtcgccgccgtggcggccatgtacgtcgccttcggtgcaccgtaccaagctgagttgtcaggtggtgctgcttctctcggaaaagcggcggcgtcgctgaccgggccatccgggtagggacagttcgatcgcgtttgatttgatttgaatatttgattattttcttggtgcaataattggttgttacttctgttatgtcgttacgtcataggagcggctgactatattgctagtctgctctatacgagtgagacttggattgttcttctttaaaaatgacaagatttgaatttctccagcgtgatttgtcgactttatatgttcggatatattttacggctttactctgttcgatttttttttaacacagaagacgttcgcaaatacacaactatgctagtacatctctaaaagtcaagtgcactaattttaacctattcactactccctcagtttcagtttcaggttataaaacgctttaactttggtcaaagtcaaactactttaaatttgactaagtttatagacaaatataataatatttataatatcaaattagtttcattaaatcaataattgaatatattttcataataaatttgtcttggtttgaaaatgttattattttatctacaagcttagtcaaacttgaaacagttcaactgtggccaaagtcaaaacgtcttataacctgaaacggtaacctgaaacggagggagtagtctatataggctactcagctacttgggtgatacttgaatttttgttttgaaattacgatgatttgaatttgttcgacatgacattttgactctaattaagttctcttaaataactttttattgaatttttgcatttaaagttttttaattatgcagaagatgagagcacatggacatattagtgttggtgaatagtaatatattggttgtaaaaagggcaaaagatctaatatatgagtgggaaacctcttacctcagaagctagattttagggtaattaaaaagactatttacgatcctacgagtatatgtaactatatatgcactaattttaactttgcacccaagtactacactaattttaactttacacccaacaaatggaggtcaagtataaatcttttatcatcttcagaaattagaactataatagttaatctaaggggttgtttggtttacttccgaagattgtcgcatctcatattagacaaatttgatcaagttagctcattatttaattcatggtcgcacttatgacaagatgccctttcattttttatgctgtcacgtgttatcaactaaaaaaagtgtccttttcttttgctagctaaagtggcttatttttgttagccataactcaggtgtaacatcctgtctctcccagccggcccacttacatctgatatcttttataggtcatagactgccctcccaacacaactccaggccaagcacgcttaacctctattggtatttaatacggacactgataaaatccgcaagcgtacggatataccgatgtagcactttccctacggagtattataagggtatcgaatccaagaaaacgtgtgtggtcaaatcttcctctggttcatccaaggataccaagcaaaagataggccaggatagagaggatttactagtgagaaacagtgtctagggaaagcttaactttaatcctaatgcaatacttcaggcactggcaacccgctgttcccagatgtcgctttactacgtacccagacagggaggacttaagtgatctgtaacgctccgcttttcgtgagtcgttaaaaactaactcggcaaaatcctaattgcgaaaattttcgttctttgtgtgagagtctaagttgtgccaaggatcccaatttaatcccgttgttccctctcatcgaaatcaaaatcctccccctcatccaaattcctcttccgattcgagtatctgaaatcaaattctgaaattcaaatccttcctttgaatcctcgccaaatacttctacgaatccagaattattcaaatcccgcctcgaatcctttccttgactccaccctatgttcccgagaacaaatacccaagtattccttttgaatcttttccatgactcctccttgagtttcccttaatacatccctaaaccctcgagttcgaatatcaaattgaattcgaatccaaaccctaaatctctccaattctatccaaatcagttttctctgtaaaagtctactttacctccctgtatttttggatggaccgattttcctcccccggcccatctcccctccccagcccatctctctcctttgccatctccctcacgtgcgctgcacgagccatcgccgagagaaggatctctctctctctccctctttctttctctctctcgttttctcgctccctctctgtttccctctcgcgccgacaccgcttcccgctgtcgcggcccaaaacctccaccgccttcgcccattcccgcgctcgcctcgcgaggtggccgaccggccggtcgccgccgacgccatgcgctgccgccttgcccccgctccatgccaaaccgaccgccgccgtcatcgtcgacgtcatccatggcccccgccactccacgccgcacccgtccaagagtgggagaagcagctgctctccctctcctcctcctcctcactctccctctcctcattatggcaagggaccaagcccctttttccccttctttttccctttcccgaccactgccggtgtcactgcctccgcgccgcttgaccgaccgcgccaactcgctctccttgaccacgccagcccacgctcccgcggttcgatttccgccgctcgatccatcaccttcgccgcccaacgcatccacgccgtcgccgctttctcactgcccacgaaaccgccgctgccgcccgtgaacaccagccgagctcccttgaccgccaatgtcggtttccctcctccaaaccgacctctcctcctcgcctataaagcccgcgccctcccctctcgtttcgtctccgcctcgctcgaaacacccgcgcctttgttgccggccgccagttgctcgcccccgccccgccgtcgcgaccacctcgccacgactccctccgcatcgccaacgttgctcctctctcgccggtgagctcctcgcccaaattcttgccatttgcatcgtcttggataagccccgagccgttcggttgctcgctcgtccccctaaacgtgccgccccgccgttgctctgcttcgccgccgccgcgcccgactgtgcaccgccatgggccccctcgccaatccctcgcgccaccaccgtccttgagctccctaggacctccccaaaccattccctagcgccgtcgccgcccggcacggcctcgccgccattgccgcccgctcccaaagaccgtctctcgtcgccagccaatctcggtgccgctccgtccaatccgacgccggaaacggattccttgaaccccggagatgctcccacccctttgaatcgaaccctcgtcgtctcgtcatgttttccccttttgctctccagtgattgccgccgccgcaatccaccgtcgtcggctcctctcgcgtcgattcctctcgccgccacgctcccggggatccccatgacctccccctggctgccccaaggccgtcggccttctcctttgtctccggccgtgtcgccgcttccgccgctgcctaacgccgccgcgcgtgcgtcgccggtgaccatcgggtcccgcgtccccgcgtgcgcatcgcggtcgcgtaccgtttcggctaggcccgagtccgcgcccccttgtcccttccctcgcgtgaccacatccccgatccgacgagcttggtcgccgtcgccagccaccgtcgtacctctcctctcaaatccgtgccgttaaacggattccccctgacctcctctagctgccggcggtggccgctcgctccggttcgccgccgctcgccggaacgcctcgcgcgtcgtcggccgtgcgatcccgggcgcctccttctacttcttctcctcccctttggctcctgcccgcgtggccgaccacatggcagccacctcagccccgggcccgcttgactgggtcaagtcgcgcccagtcagcctcctccctccgtcttccctcccgtgcgcgcggtccacgacaagccgtgcggctgcacgtgggcccgccgccatcagtccacccggcgcgccgcgcccgaaccgcgcgcaaccgaaaccctagcgcccgcccccgcgtgcgcccttcccaccgtgaacctaaccaccgccatgtgggtcccgcgcggtggaccgcgcccaccccgtcgtgcctccctctctccccgcgcgccctaatgggctgcctccccgtggccgcgctcggcccaatggccggccaagccttgtgaatccctcgggccgcgcctaagtcgcccgaggaagtctaaatccgatccctccttccttttcttttccaagggaattaataattccttttccttgtccagaaaatccatttagacctccaaaattcatatccctcgatccgtagctccgatcgcctccgttccacttccagtaattccgtaaaattgagatctatttaatggcactactaataggtctaaataggatctttcttttggtctcttgtttaggttttcgattgtttgtgtatagttgcggttatcggattttcgtcgatcgcgggttttctcgaagattcgtgaagcttcgagaagaccttgagcaaggcaagtcaccctttgatcaatcgcccctataattgaaaagtcattattattttgtttgcaacttgcattattagaatcacacacttaacttgcttggcctcggtttgcgtgccaaaccgacggatctacccagtagtcgcactaatttctgtaggtcgtactaccctgattccttgtcgctccacccttgtggtacctcggtattcgtgctctctgagcgcgtataccaaatatcccacatacaccgttgtttgtcgaaaacttgggaaatgggtttgtgaagccttcaaaacccgacatgtggtgtcggtgtgtttgaaaataaaatgaattgtaaaaactcgcgatgcgggggttgtgcctatgtagcactgtcccgtattcgcatataaggaccgattcctgtgggaaactcatcgaacataatcaaagtgcaaccacaaggtggaatgggacaccctggctaagtaactagtcggttcagggaaacctcgcatgccaatagttgggaacgccggggcggggtcagacaaaccgggttcctggtaaggcaaggacgagaagcttgctcacttaccgatcaaggtggttggagtttgatttgtgaacgcctaaaatggcctatgtttatgtgaggatttgatccttcgatgtggcatgaggtatccctgggtcggcttgggaaaggctttgtcgcgaacctctgacaccggccagtgtctggagtaagttcgtgtcttgtgggtaaagtgtacccctctgcagaggttaactaactgttcaaacagccgtgcccacggtcatgggcggatgtgaggtggttcccgttgcgtagatttgtttgcctgtgctttgtgaaaagttgttgtggtgtgggaatcgtaaccagaatcagcctatgtggcagatggatgacctgagtggtcaagaaacgaatctgtgtgattcgggatgtctgcgggcatcatagactaggcttcccgagtggaagcggattgttgtgctgctgggtagctagactctgggagtccgagaaaatgaaaaaggctctgggagccgagaagtaatgatctgacctgggaggtcggtacattaccaaatgagctgttgaaaaacatctcttaaagtcgaatcgagacgcaagtctcttttcggcccaaacttagaaagaaataaatcacttagtgatttcaaaatgtcttcaaataaaagatttgcaaaacaaccttgcctctcttccaagcttgcattaaacacctaagttcccgtgacttgctgagtacgaaagtactcacccttgctctataaatatatatatatagttcctccgccctgaagagatggtgaagtgaagtgaagaattggggtttcgccctggttcccagccgtcgcctgtggtgttgggtgttagaccgttggttccgctgctgttgttgttggtgttcgcctcgtccgtgtcgtcggttgtattctcgggctgtctgagctgcaacctaagttaaggtaaataagtcctctatttattttaaggattgttatgattcatatttgtcaccgtgggtaccagcactatgtcctgggactggtaccgagatcgcggtttcgtaggaagcggttcgcgccgctttccctacgacacgctcctgtcaggtgccgttgtacggcggtatcagattggggtgtgacatgatctcgagagctgtcaccacctctacacctacctcaaacgtactgtgggatacgcagcaattactggataataattacctaaacaccacgtctaaggaatttctatctacttttgtgtttataactcaccaaagtaatcactatattttagttgattatagtgaacaataatcctgtatgttatttaggaactaactaagagataattctcacaagataaatctaaattactcaagaaaaatattatattgaattcagagtaataaacagaataaaagaaataggacaagattaccggcaactccggaattcttccgacctcttctactctactctcttcctattctagtagacaatattgtacaatagagcctcttataattcggctcaaacttggaagtgtgtgtgagagtgaatgaagtgaggtccttttatagggcagttatgacggttgtgagaaggggaaatgtccgaactgccccgcaaccgtcattgggagaacatctggaacgtccacgccaaaccctaggatcaacggcgatcagggggttcggccgaacctgggctgggccctcctggcctctatccatttctcggagttttgggttgattcactgatgttttgattaagttcacaactcatccttgtagggatacataattttcctcactttagtctagatttcctcccaacatcggggtttatcacctgcatacaaatatacaccaacacttgtggaatatgtgagattaagcaactattaatatgttggatgttttattatttgaactttatgtaaatgttggcggtatagaattgacatttaacagccgccaacaacctcagagttctttggaaatcggtttccaaaaaaagttgcaacttgttgatatgagtattctattaattctattagaccctggaccgggatgtcacatcaggttaatgacaataatgttagcataacatccaaacaaccccttaagagcaaggataataatgcagccagctacttacttatagcctatctatcacctcactcatatagtggttaactcttcactataaatatatggtccacatgtctgtctcacagattttcttggttcctgtgtctaagccggctgtaaacttacagcccgcttctcatctctctcctcttttctcctatccacctcagcattcagccttcttatagcccactattatacttgctctaagttgcttaaggcaaaggacggctttgattcgtcggcagtggatcagcttgccgcggtcctccattggcccaatctactccaggtgcacttgctttttctcgattttttttatttatagtaattattagtgacgtacttgaattaaataattagtaaatctttcttcgaatttgtaaaaataatgaactctgttgccaataacgttcagatttggacgcactttcgaagagcgtccaagaaaggacgctgttccggacgaggttctgactgatgcgcctcgactcctctccaacacaatgagtgaaacaggaaaagaaaagaatcaatcttgcgtgagcgtcgttctccggctgtctcagccatcatttgccgaggcacatgaagaggcgtcaccgcctactgcccatctcggcatctcctctggtacaatgtccttgcacggatagagcggaggcggtgccgtccggccggcgtgccgcgcgcacgccaccactgtccgcctcaaagctcaaaggcccacgctgccatccaccgggaaagggatactctgtgt

SEQ ID NO: 5081 - DNA, 19651 bp, Oryza sativa
ctcaactgcatgtgcagttaagtcagaggatctgcttcccttccactgggggttgctagcgcgcgtacgcgccagcaatttagctagcgcgcgcggcagctggccttctcccagtgtctttttttttcttcttaatgtttacacttttttttaaattttatgcgtgtttttcttcttcttttttgccgtttcttttcgatttttttaatctttcgcacacctctttacaaatatagaattgaaagtttttaattttgacttgaaagttttcaaattttgagttgaaagaatctttcaactcaaaatttgaaaactttcgaccggaatttgaaagatttgaaaactttcaacttgaatttgaaaactttctacctgaatttgaaaactttcgaccagaatttgaaaactttcgacctgaaatttgaaaacttttagctcaaaacttaaaaaactttcaactcaaatatgaaaacttccaaacttgaatttgaaagctttcaaatcaaatttcaaaaccgtcaccttgaaattttaactttcaaaatattttttaaaaaaactttcaactcaacttttgaaaatttcatcatatttctgaaacttttcaacttaactatttgtatattattttgatataataaaatctataattaaattaatctacacgcttagcactattattagtgctaatgactagtgggcccacgcgcttaacctcccatgcaagaagtggaaccgaaaatacagaaaacggaaaaaaaaaaggaacacgaggcgctacggactcggagtgcgcgcgagttgctaatctggcgcgtctgcgcggattagcaatctcgggggagagggctgcttctctctcggtttgcacgtgtgctgcacgtgaggaatgggagggccgagtgaagaggatgggccgagcaagagagaaacggcccaacgaccaagagggacgcaaaatagacttttccaaaagatttgatttggaggtattggattcggatttggatttagaattgaattcaaatgtgatgttcgaactcacggacggagaggtaaaggaaaggatccaaggagaaagtcatcattcaaaaacggaacgatgggagatgacgatagagcaatagatagatggatggatagggcgatagataggtcgatcgatagacatggatggatttaaggtagggatttaatattttcttgtaatcggggacaagtatttggcgaggattcaaaggaatagattgaatgtcggagttgtctttggaatgggaatttcgaggagacaatttttgatttcgacgagagggatcaaggagatttaaactgagatccacgacatgacttagactcgcccacaaagaatgaaaattttcgcaattaggattttattaattaggttttttaacgtctcgcgaaaaatgaggcgttacacttttcaaactggtattaatccattaacactaactgtggacccatagaatttactaggaataaattgggcctaacccatttagttctaacaataatccccacctaatttcagagctcacagaaatgttctcagtatttcggcgtagactgtgaagttgaactttcacctagaaaaaggagttacacctgaccacaactgaacaatggactattccttgaattgtcggtcttgtgcagttaggctttactcaatttcttaattgatactagactgtcattagcatctcctttgtgtggtgtgtataagttgtactccaggccttttcatgagtatctagagatcacctaaatctcatagactttggctagcagtcggactcatataggtgtgttccttctaagatgttctgtaggctaacatatcttgtttaagaaaagccactcaggtcacataagggaatgcaccaacccaccatacaaataaggagataagtacatcatagaaatgagctttgggtctctcctcctagctaccaaatagcttgtttcaccatcctaattcacaggatctctaatcataaaggacggattatcactattgtgtaactcaagtggatccaagcccatctcactcgatgcactgtctatcacattacgcgatagacccttagtgaactgatttgccagatttttagtagtctgaacatagtacaatgctatcactccggagtttttcagcttcctgacagactatattagtattctctttatatgtctggatgacttcatgttgtccttctattaacgccaaaatatggtatgtttttttactgcattcaggtaagggaaagagcgaaagggcctgtagcctagtggttacaagagcctcagtagcacccgaggtcctgggttcgactccccatgggagcgaattttccaggatttaatggcgttgtgctttcagtggtagacgacgtacccgtcgacagcgaggcgcctgtggtgacttcgtcaatctctccaggatttgccggcccagtcttcgaagatgctcataggggtgagtgcacgtgcgttgtgagtgtctgtgttgtactgtgtaattctcaaaaaaaaatgtaaggaaagaagtcgatcaactaatgtaaacctatgcagaagagaccaatctccggaaggaatcgtgaagatcatagtgtggcaatttaattctacctattaattggacataatttagtaattttctgttatcttcaaaaagttttgtttagtgtctgatcttgacttatatcttttatttttatctttagaaaacttatattgtgtccgatcaagactagtatcaacccggaggtataaatatgtacaaccaaagttgttttaatcaatcttcataaatcaatacaattattttcaacgcatcaccaccctttttatcccggcgagttcttagttaatttcgaggggggatacatcggttaagttcgatctccgacgagaagtgagctccgtcatcttcgctttcattggcgttgctaggactttctcggttaggtccgatgctctattcgggctaaagcaagcgttgcctatcttatatgtcgtctctaattttttatgcattgttgcttaaagttacatactcacatcagattagtttggactttattggttcagtccgatattctaatcaagttaatgacttttattataaatttgttatatccatctctttaaatataacattttttttaaaaaaagtgggcaaaagctttgcctcgtatatattgatagagaagaggtactaatatatataataatataatatctttttttaaagaacccaacaaagctggttttatattatagaaggaagagaataaccatacaggagcaggaatgacattcctagaacaaaaatgtctcccacaagtaactactccctccgtcccataataatataagaagttttaaagttggacacggttattaaaaaattaggtaaaagtgaatggtggaggattgtgattggatgagcagtagaggtaggtgggaaaagtgaatggtggagggttgtgattggttgagaagagaatgttagtggagaagttgttatattttgggacaaatcctaagaactaaaagttgttatattttgggatgaagggagtagaaattaaaacaagcctattctcgcgacattatacactgcactcccttagcacccgccaactcccacaattggagttcatccataatcttgcttgtaagtaccggtggtgtagattcgatgttcctgaagatgcgattgtttctttctatccaaaccacccaaagcgtggtcggtgccaccaattgagtagggtgtcatcattgctcgtgttcaagaatcgatttggtctgatctggtggcctatctcctgccaaaccctctgtatgaagaggcactcctttgtatgaagaggcactccttgaagaggtgctgcacagtttccagatttctaaaacacagttggcaaaaatagttatttagccagcctcggcattgtaatcgatcccccgtccatattctgttcttgctctttggccagaacttttgcttggccgacgcccaagttttctatatgagaatagcggactctgatcttgttttcccctgaactgcatggtgtatgcagaccttgccgtatagaggccgttggccgaccatctccattggatttatcctcattcctcagtcccttcttggaacacaactcctgcaatgtccagcacttcccaaacataaatgtattcctgaagcaattgtataatataatatctgagtggaaagaagtctaagcatataaaaaacctagaacaaacaagttaactataaatagacaagtagacaactataaaaatattgtagaaacagaaagcggttcgcagagttatatgttatatatatatatatatatatataagtacagacttctcgctttacttatgctaattactccgtaaccttcttcaggaaaacttaaacaactccactggcaactgacaaggttaggtaagaccgtaagagatggaatatctcagttactatcagtgggcgagctggtcgtacgagccggaggctgcgttggtacaattgggctgtgtacaccagtcagcttcgcgtatccggtgctctctttgacctcgccttttaaaaaaataaaaattgttttttgttcccctctgaccagcacagcagcaagctagtacactggtttcaactttcagctcgtcttttcacaaaaaaaaatactgtaattaaattttgtaaagatccgatcaagctcacgcgtacgtacacgcgcttgatagcatcatcagaaattcagaatctattatatctataaagtaatataaagtaatagaaaaagaagcctccacgttcgctctcacggtctagaaattctcacattaattaaaaaataagaaaaaaggaaaaatagaactaagattaggattaggattagttaaaaactaaagaaaggcaaaaaaaactaaaaaaaactaagatacttgaatcggacaacagtcaaaaactaaaaaaaggaaaacggaatcatactaatatgctttcgtaggatacaggaaacggacaaggtttctttcgatttagaaaacgtatcagacactaattttgaaaaccgtgtgagacactaaaaaaagacagactaaaaaaccatcatcgtcagattcatgcaatctgaattgtacacaaattacatgccatggtaatatataaatagtacgctagaaatcttctctccacaatccaccgcaacaaaaaaaaaaggaaaaaaagattaagtacaaaatagtgatgaaactctgtacgaatccgacttttagcgatgaaaaaaattgtgagataaaagcaagtgtttcaggaaaatagcaactaactgatgctctaaaataccatagagctgaaacgatatcaaaacaagaaggcaaactcaatctattatcttaataaagaaatagaaataaaaaaggagccaccactctcatagactaaaaattttcacatgaattagagagaaataaaaattctaatatatgaaaaaagagcctagatggaaagtaatagaaaaagaagctaccatgtttgctctcacggcttagaaattcccacgttaatcgaagaaaaataaaaagtagagtccatataggaatactatttaaaaatagctgaaattcagaattaaaaataaggaatattgaaagagtagacaagagtccatacaagcctacaatttagaattaattaaaattcggaattaaaaaaaatagaaaaactaaaattagaagttagagtccatatagaaatacaatttagaattaataaaattcaaaattaaaaaaagtaagattgggagaagtgtcatagtctatatatgaatacaatttataaataactgaaattcaaaattaacaaataagaaatcttgaaaaaaaagtccagcatctatataggaatacaatttagaaataactaaaattaaaaaaatattgagaaaagaagtctagagtcaatataggaatacggtttactaataattgaaattcaaaataaaaaaaaatattgaaagaagagtttagagttcatatagaaatacaatttataaataactaaaattcagagctaagaaaaaatgaatattggaagagtagtccagaatccatataggaatataatttatgaacaaagaaaattcaaaatttaaaataaggaatgttaaaatatgattcttgagtccatatagaaatataatttataaataactatcacatatatacaatacaataaaaatatcacacatttgttagttcaaccaagaatttaaaattatgttgtcaataataaaatatgaaaatatttaaactattgtatgagaaaaaaaatctaacaatgctagccgtgcaatctgcgcgggccgccatgctagttgtcgttaatgttacaagctgccatgtgaccataaggtccacacgtaaatattatttttagatattgcattatattctaatccattaactatgctataaacttgtatttttttttgtgttttcttttatctcttacagtatttgttgcaatgtaggggccttagctagttttttttaagtaagtagatcaatatgggatatgatattttacatacttgcaagtttaaactgaacttatataagaaaaaacaaaaataacaaaatatattgattctaaatagaacgtgcaatttttagtcaaatctattacttttatttcttattgtatagactaaatttgaactggtgtgtttgtggaataatatgtcacatattgatctatcttatttatttttctaaaaaaaaagtttaatgtttttttaaatgatatgcactaaacgagacgagggacacgtccctctatgaacaatagtccatctccactcgacaaaatttgtcgtcagaacaagattataagggcaacctcaatgttgggttgctgaatgagcagatagctttagctatatctatctctacaatggttatggccttggatgagaaacaagccgggtcccactgggtcccatcaaagaagaaacataccaccaattcgcaatcatatgctgataggctccattagatatcattttttaatctcttaagttcaactgtaaggttagagctgtttttaagcatttaatgtcttatgtccatgtccacaatgtatatagctgaaaaaaagtcttaaggctcactcttatggtcacattgtggatgccctaaacagaaactaaaatgcaataactctgtctttagatattggaaaaggaataaattctcgcttcatgcgtacgttacgtacctgaacaatcccagcgtgttgccctttccggtgattctccgccggctcaaaccatgtgccgggccaatgcgtcccatcagccatccatgtcgcgttttcaccgtcatctttgccatccttcgctctgttgtacgcgtcagatcgcttgcgaatggtgctgaacagcgagtcgatcctgaccttgaactcctcgtactctcgccgcacgcggcggcgatcgctcatcagctcgccggcgacgccgcccctgtacgcctgcgtcttcatcgcgaagtagctctccggcgccctcggctcgacgcagtgcttccggcagaagggcacccacagctcagcgaacttggcgacctccaccatggcctcgtagtggaccagcgtcccgccgtcgtcggacaggtagcaggcgtacctgtccaccgggtagtcggcggcgaggatggagaggatggagttcacggtgtagaggatcggctcgtcgacggggtcgacggtggtgacgaagacgtcgacgccggggagctcgccgccgccggaggtgccgtgctgctgccggtcggcgagggcggcgaggtccgcgacgcgcttgatggggttcagcttcgggagctgttgagcgcccacgaaaagccgaaccagacgtcgccggccatggacattgtccacagccacgcgccgtcgcggttcttgtggcgtacgcgccacgcgaagaagcgacgatggcgatcagtcgaactaggatcaagaacctgttcgtatattagagaacagcataagggcaaccaaaatgaatgctgtaaattaatcacactttattgattcgcaattaatttgtctaagtttgattataagtttataagagtagttagtagtatttgacatcagtgtgggcccaggcggtcagacctgtaaggatgcaggatgctgcccttgaccttgtacgtccggaacagcgtcggccgaacgccatcgccgccgctgggccccgacacgtccgcctcgtcgacggccacccacacgtcatccttgccgccgccgtcgttcacccgcttggccgccggcgagcacggtgccgccgccgccgccacgtagacgccggccgcgccattgccgttggtgacctcgacgcggaggccgcccgcgttgatccggcgagtcacggccgccgcggacatcgtggaggccgtagccaactccatgcacgcaaacgcacctagctaactacgtaagctccgtggcgaactggtgaacacatcgtggtggcttatatagcgcggcgaaacgacatgagtttaattaaatcatcgtctcaccctgcctggtcaaaatactgctgctacctacgtggtacaagagaagccgccactgtcacagtgcagcaagctgatgagcatttttcctctctgcagcgtatgtaattttcgttcctctctttcgatcaaactcggcaacgatcgtcgtgttggcgatcaaaaaccaccggcacaaggtcaccagtcgggcgcagaaactacagattctcggttctcctctagcagccaagtcagctgatcgtgtgacatcttcagaaacaaggaaaaataaaacgtgtacatctgcaccagcaacagtagagacctactccatctaatttatattacaagacatttttagttttctttaatttgattatattgtggaataaacgtagtagcaacatctataacatctttcattaaatctaacattaaatatattttgatacatttttataaaaaaaatacttcaacatttttctataaactctgctttgacttaaaaaaaatcaaaacattttataatacaataaggaaggagtacctaacaaaataaattaatatgcaatatatcattctctacaaacatataagttcaaatttaaattcaacatgttataacaaattaaactctaagtaatatatttgtagtcaaatttgtctctttttttttacaatttatactagttgaatttaaatttaatatatgcttgttgaatgcttcctccgttcaaaaactattagagatttagatggatgtggcagtacatcctagtagtacgaatctgaccactcaaaatataagagatttaggatggacggggtacattctaatatttcgaattcggacaggaacctggccagattccaaagtcgtaatgctagaatgtgtctcatccatcctaaatctcttatattttaggtgaccagattcgtactattaagatgtgtcacatccattcaaaatccattatatcttgagatagagaaaggaatatatttcatataaatcattcttgtcgttctttttttaaaaaagttataatcaccttagtttatgtgtaataaacgagtgatcattcacttgatgattaactcaggtgattaaaaaagatagagataggctgcagcttccacgtcaaaatcataaaaacagctggaacgaaaggtacgggagaacatagtgttgtccacttggacacgaacaaaaaaccgaaccgagtacgtactcaagttgttactaattactactagtatatatatcgaaacaagtgcatggattatgcccaaaattgtgcacgcatgtgttggcctttctgagttctgaactcctgatgatgttatcaagcgcgtacgtacgaacgtacgtacgtaagctcaaattttcaaaaaaaatattgccgggttttgtatgagaagacagagttaaaacatgtgtacgtacctagctgccgtgctggtcagaggggaggaaaaataaaagggagagaggtcaaggagagcatcgatcgagtatatatgagacagtgatcaagtggtggacagccaaacttgatggggatagcaacggtgaaatgaaatcagcagctgacgagctcgcccactgatactctaataactttttttcgaggggaagatactctaataactgagatgttccatttgagttatttattagtttatttatgtttctttggaaagaaccagcggagttgtttaagtttttctgaggaagggttagcacaaaagaaaagagagaagtctgtactttagtccgtaatttctgaccaaatcatgcccgttgaatatagtgtttcagcaaatccatattaactaagtgcaatttgctccgaatcagttcgtgtgcttcctaaacctgcctaaactcacacacatactctcgttctttttatttaacactttataattggtgtccttagacatctaatttttttaacagttcatcagattctttaccagcagaattggacacatgaaagctacaccacttgatttgtcattattgcacagttcttgtaacttgtttaattagagttagtaataggtatttctaaatagcggtctaaattctgttctggagaactagaaaggtgaaaaaaaaatcaaaaccgaatagcatagacagatatattggattttacttttgtctgctttgaaccaacaattcaaattcctttctaaggaaaaaaaacaaacataatcagagttagatgcttgtcgaatggtaaagcatttttcagtgttgagcggtccaccgtattcatttagatccactccaagtgtgatctttgtaaaacttaccagagaagttacattgaagagggtgacatatctttgcatgttctactgattaccaatatcctaaaatcgatgcaaaccacgaattaaatttaaaaatatattgtttatttataattttcttataaacattcgggatacaaatttttttacaaaagtataccatcgtcgctggatgaaagcgcgaaaacgatacggtatcgctgatccactatgcgagaatgacgtggggtgacgatgcgccacggtttcgtattggttagccgcgagagcgtacggtctcgcacattgcttgtgcgagaccgcacggcatggctgcgacagggccaataattaatgtttaatcacattgattagcgactaattaatccctaatcatcattaattaatcactaattatggtaatcaatcactagttaaacgaaaccattggacaacacattcggtatcgctgtttcattatgcgacattgtttcggtctcgctctttcctttcgcgagactgttcggtctcgctcttttcatctgcgagaccgtgcggtctcgcaccattgctgtgcgataccgtccgtatcgtcatacccacatcattttcgcacaacgatcgtgtgagatcggacgtatatttctgccaaaacaattgtatcccgaatatttttgttaaaaaaataaatgaacagtatatttttaaatttctttctgcaaaccacctgcttttatatttactcatgtggtttttctatatgttcaatatgaaaaagatataggacatgaatatataaagacagttgatggtacatatgaaagttctcatataagggaagtccaaagaagtaaaattgaacagactcagagttagatgcttgttgaatggtagcatgcatctacagtggtagcattttttcagtgttaaacctcacggtccaccgtattcatatagatatagcccaagtgtggtctttttaaagttcaccaagaaagttatattaaagaggttgacgcatccttgccaattataccgattaccaacatcctaagatgtaaaccactcgcttttctatttactcaagtgatttttctatatgttcaatatgaagaatatatatgacatgaatatgtaaagacagttggtaatacatatgaaagttctcatataaggtaagtccaaaaatatttgacacaattggattagttcaagaacaatattatttattacaaaagttaaacaatacaatcttttatctatgcacctagaatggaataatgtttgctagtaagatatgggtagcaacatatacaagggcaacaattacaaagataattggcaacaaaacaacaagaatgattgacctctttgcccatctccccatgattgctagtgcaaatgggtaaaggagaaacataacccacatgttgaataggagtcccattgcagcatgtctcttctgtgctatcgtccatactcccatatatactgccgtctttccaatagctacaccaatggcaccgatattagcaactaaaactaccattgttgggattaacatgggaacccatctcatctcatataagtcagcaaatttatcgttggtgtcagcggttgtttgctttgaagtgactctaaaatgtatacccttctttgtgagaagattgaccaccatatgaagcacagctgttgggtaagcactcgttgagccgatcatgaagaactgctcattgcgccaataatctaaccatgtgatccctgcccactttatctcgagccatccgatcatatgaatcatcaaaatgatcacgagaaggtacaccacatacctagtgaatggcctctgaatatatacttcatcggggataagccacatcacagggctgatagcatagagtaaaataaagagtgatgtcaccgggtagattgtcatattgaggtatgagacacgctggagaggttggagccgacgacctccaataagtgggttattgtgggagaagaacatctctagggatccaccagaccaacgtacaatttggtgaagacgttctgttagatttataggtgcagtgccacagaatgcatcatgctccatggtgcaatacatggatcgccaaccttgcccatggatgcgaaaacccgtgactatatcttctgtggctatgtcatatatgtatccaacacccttgccccaatcggtttctttgtcgaatgaagctgacacaaccatctccagctcattgacaaatatgtcattgaccggtgatggtgtagcaaatcggtcttggtttagggcttctaacactgactctaataagagtatggagttaccaaacttgctagcttcaggtgtgatgttgtcttgtctccaatgaggaggatcaataccatagagagctaagcgacggaacatgcaaccagtaccaaggtatgaaggtccttggagaccatttagggcaagcattgtgccatcaaagaatacacgattatgattgccatatcggtcttttgggtcaacattgtcaaagcgttgtgggaactgaacaaaggcagtattatcaccttctctttggtcaagcatgaaacaaattgctgcacggaaggcttgagaattgttgatgtagtgatcacaatcaaagttgatgatgaattgtgcattggagagtagagcagaggcacgaagttgcgcatttaatgcacccgccttcttattatgatcataatttgggttctttccacgagacacatagacaagcatcgggatgcgcacatcagtggcattaaaattaagattgttgcccgtgctatccttcaggctaagattgtggccacggatgggatggtccaacacaacctgttcaaattgacaaatatgtaggtcatgttaatggaaaatttatggtgaatccacttaacaaggtaattgcggattgcacaatatgatattatccccttagtaatacattagaaaaaaaattaaggtggagttatgtaccttaacaattccagcatggtgtcctttcctgtgattttctattggctcaatccacgtgcctggccattgggtcccattagccatccaagtcgcatttggtgctccttgatcagttttcatactattgtaaacatctgatcgtttacgaatagtctcaggaagtgcttccaatcgcaccttgaactcatcatactcaagatgcacaatcctagagtcattcttgaactcctctggtgcacttccagtatacgatggtgcctcaagctcaaagtagctctctggggatctaggctcaatgcaatgcttccggcaaaatggaacccatagagtagcaaatttggctgtctcaaccaatgcttcatataggatcaatgctccactatcatcagagagatagcaggctgacctatcaacagggtagtcagccgcaagaatagagagaacacaattcatggtgtatagaaccggttcgtcgattggatcagcggtggtgacgaaaacatcgatgccgggaagtctgtagcttccgtcggcgagatcacagtactgccttagggcagtaaggtcaggtatggttttgaccggattgaactttgggagttggttaagtagccatgaaaaaccaaaccaaacatcaccggcgactgacattgtccagaaccacattatgtcagaattattgtgcctgatccgccatccgaagaagaggagaacggcaatcaagcgtgcaaagatcagagccctgtaagagattaaaaaaaacatgatccgactgtagttaatttctattgaaacgaaggctgaattttatttattatcttaaaaacaattatttctagaaatgcaagtaaatgcacatgcccaggtgaccagaaagggtaaatattcttgatccaattataagctgcaaagacattattggaaacatgaggccgtactgtgggttactacgagtcaacggattagcactgaaagaaatccgggagcagaatatatatcactcacgatccatccaaatgatcaacgtgctcattgacttgcatatatatatacttcattctaccaactagaaaacgcatacattcccggcttaactaatttttagatactcccccgtttcacaatgtaagtcattctaccattttccacatttatattgatgttaataaatctaagcatatatatctatctagattcattaacatcaagataaatgtgggaaatactaaaataacttatacagaggaagtaacaaaagtatagcgtccagattctgtatctagcaagctcagtactaataataatctttatgcataaaaagattttcattgcaatgtcgctgatttttcgatcgtacactcgatcggatgtacgtacctgtacgggtgcaggagggagcccttgaccctgtacgacctgaacagcagcggccggcggccgtcctcgccgccgcactccttcgccgcgcgccgctcccccttatcggcggcggcccagtgcttccccttggcgccgccgccgccgccgccggccgccttcctctccgcgccgccgatgctgctcgtgcggctcactagcagcgggtcgatgaggctgctgcagccattgctatcctcaccaccgccggcgaccgacgccggcgaagccatgacgagcactctatagagctcactggcaagcttaagccagtgcaagtgtgctgccctactggtacttgaagctgaagagagtgtgcagatgcaccatgtatatatagtactgtactagtgactgatcgttgggttgaatgaatatttgcgtgcatccagatctgcgtgcgccgcaactatcgtctatcgattgatcggtcgcctcgcctcaccaaacgtgttactccctccatatattaatttatatgtatgacgccgttaatttttcaatcaatgtttgaccatttattttatttaaaaaatttatataaatatgaaaatatttatgtcatgtttaaagaatatttgatgacgaattaagtcataataaaataaataataattatataattttttttgaataagataaattattaaacgttgaaaaaaagtcaacggtgtcatgcattagtacgttgcttcgtctgagcactaaacaaaccactggtgaacaaaacgtgcagcagaatgcataagcatgttgcgtccatgtgcctgcaggctgacccaaaaaacgcacttgtctgcagtgctttgcatgcatgctctgtactgtcttacgtcttgtcaggctaattaataaatatcgccatatggttactttggttaagctgcattgctaatcagctgtattaactgtgccactgtaatatataagctcaggttatttgtgaaagtcaacttttgccgccttaattacggcctggtgttactcagtcgtcgtcgagcatgtgggtgcaacgatcagatcgatggagatggatctacctatgcaagttgcagttaagcagaagtagcttaattagatcaccgtgcatgcatgagagagagatcgatccagtgcgaggggacgatcagaaatctggcagcatagattttaatttgtttggttctctcgtgtttttgttaaacaaatcagaaatccagtatgattctctcttggcagatctgcagagagtactgattttggtgcatataagttagtttatacatcaatgtgttgcatgttgtgtgttgattttttttttttactcatagagatctggtgatgccggttgtatatactactggaatccaaattgatctcacagaactgtggggagataaaataaatggccagatctatatattgatcgaaataagagttcacacactgctcggagaagcatctttgtggtgaattgatctatgtactactactccctccgttttatgtttactactcgctccatttaataatgtaagtcattttaacattttcacattcatattgatgttcattaacatcaatataaatgtagaaaatactagaatgacttacattataaaacggaggaagtactactcaattcgtctcaaaatatagcaacctagaattaaatgagatacatcctaatacaacgaatccggacaacacctaagactagacgagacacctcctagtactacaaatctgaataacatatatgatcggacgtgagacacattaaattactatgaatctggataggctctgtccaaattgagtatatccagattcacagtattaggatctgttttgttcgattttaagttgctatattttggaacgtatgtagtaaattagaagacatatcctagtatgcaaatctagatatattctatccaaattgatcatgtctaaattcacagtactacgatgtatttcgtctagttctaggtggttgtatttaggaactgaggtagtaaatcatatgggttttgttaaaccttttaaagtttgaaaccaagtttgtaaaaaattagcagtattttgatatacgaaacaagcacactataaaaatatatttaatagttgatttcaatgaaacttatggttggtgttgtacatattgctgcgttttccaataaacttagtaaaagttgaagtctgagactattataatatggaatagaggggtagtattcaaatgctatatattgttcataattgagggtgtatatgcaagaacattttggaaagattttatatgcacaacgtcatggatattaattatcttggactatatctcttgaacatgtgtgatcgatgtgtaagtgtcacaattgtggtagcatataaattaatgtgacggtacgtctttcgtagatgtcacttcgtgtacttttttttctatgtttaatgtaaatagttaagatagtttgaaaaaaattgattgtatacgaatatagtaatatctaccactccatcaaaaatctcaaattcaacatatacattaggaggaaaaaaaaccgggtatgaatagtacaactactatttatatgctgaatttgttttttaatctcactgtgtgagttgagtttgaaccttatattggttaatctttagacaattcgaaaccatttacgaacttgagatttacaatagcagacaaggcattatactaggggtgtgttcggcacccaattttctcaacccatctccctcgttttccgcgcgcacgtttttcaaactattaaacggtgtattttttacaaaaagtttctatacaaaagttgcttaaaaaatcatattaatctatttttttaaaaaatagtaaatacttaattaatcacgtgcttatggactgctccgtttttcgtgttactgtttcgagttgggaaccagcatatgcgaacacaccctagtatgtgttcacaatggcagtactgcagtttgccaggcatgtgtacatgcatgtttgaaatttatgcaccacattaccagctacagtcatctaaaaaagaaatagatctgtagatgcaggagtactgttagaactgtgtattaaatcagctatgatcagtagaccgtctagtctgatttactaattacaagtccaaacgaatcttaattcctgttcttctgacctcttaattattataccaacatgctcatcaaaactcgagagtccgactgatcagatgcaaagattaacctcaaggtgaatgtcaaaaagaacaaaatcatacatgtagattgctatcagtacatgtcaaatcaaagagtgtgtacttaatttttaatacagtattaatgggtggatcttagagtgttaacggtaattacctggtacaccaatctagtccatctctgacaagctaacatgtaggcggccgggttaggaaactgagggagatctagttaattcagaggcgacgatgcgtgtgcatcacatgtgttttagccgtccatgtgacaatgcatcaagctggaataatcgattggctgatacagctaatacaagccaagaagtcgatggtttctagtgttagtctttctttttaaaattttgagatgagttttggtcattttgcttggcgttaattccctaatcacgtgatcttggagagacgagttagagcaggtacaatagcaggctataagccggctataatcatatatcgagaagaaagcgggctacagatttgtagccggctgtaatacggacttcaagatgttatgtgtgtatgagatgtgggaccgggtattaatggtgtagtatatttttatagttaactattgtatgaatgagctattagattggctatagatgttttggagccagaagttgtctatactattgaccttgctcttaggcgtactaatgaaggcattaactaaagttcttactagtaatataaactcgcacttcatgattttggtacacgtgagatacggcccaacacgctccccgaatcccgctccggcccattcctggtaatccccgttccggcccaaaagaaggtgctatatttagttgggccgtactcacgacatctttttagggccgaggaagatttccttgtccgcactcactccgcacgtcgtcgtcttcctctcgccgctccaaccccaggacccccaggtacgcgcggcgcgccttctcttcccctccgctagctcctctcgaactggttgcgccgctgctttccccatttggttgacctccgcgcggcggctgaccagcctccaacgcgtcatgccggggttgttttttttttttttggtgggggtgggggt

SEQ ID NO: 5082 - DNA, 7274 bp, Oryza sativa
agctatgctagaggagctagattctcttgaaaagaacaaaacatgggaccttgtaccattccctaaagggaagaaagtggttaactgtaaatgggtttatacagtaaagcaaaatcctaatggaaatgtggaaagatacaaggcaaggcttgtggctaagggatatagtcaaacatatggaattgattatgatgaaacttttgcaccagtagcaaagatgagcacggtaagaactcttatctcttgtgcagctaattttgattggccattgcatcagttagatgtcaagaatgcattcttacatggagatcttcaagaggaggtgtatatggaaattccacctggatttgctacctcacaaactgaaggtaaagtgttgagactgaaaaaatctttatatggccttaaacaatcaccaagagcatggtttgatcgctttagacgtgcaatgtgtggtatgggttataaacagtgcaatggagaccacacagttttctatcgccataatagaggtcttaaaactattcttgttgtgtatgttgatgacatgattatcactggagatgattgcttggagatatctaggttgaaacaaaatctaagcaaggagtttgaggtcaaggatctgggccaattaaaatattttttgggtattgaaattgcaagatctcctagaggaatagttctttcgcagcgaaagtatgtattggatctgctcagtgatacaggtatgcttggatgtcggccagcttctacaccaattgaacaaaatcataagttatgtgctgaatctggagatccagttaataaaaagagatatcaaagacttgtgggaaggttgatatatttgtgtcacacaagacctgatataacttatgctgtgagtgtggtgagccgatacatgcatgatcctagaagtggtcacatggatgttgtgtatagaattttgagatatttgaaggcaagcccaggtaaaggcatatggttcaagaagaatggacacctagatgtggagggatattgtgatgcagattggggcagttgtcttgatgataggaggtcaacatcaggctactgtgtatttattggtggcaatttggtatcttggaggagcaagaaacaatcagttgtgtctcgctcgactgctgaggcggaatacaggtcaatgtcgatgagcttgagtgaattgttatggttgaaaaatcttttggctgaattgaagctgtcgacaagcacttccatgaagttgtggtgtgacaacaaatcagccataaatattgctaacaatccagtccagcatgatcgaacgaagcatgtggaaatagatcgcttctttattaaagagagaatggatgagggaaccttaaacttaggctttgtaaactctggtgaacaagtagctgatagtttaacgaaggcattaggtgctagagagtgcacttcttcgtgtagcaagatgggcatgatagatatttatcgcccatcttgagggggagtgttgagtgtaggcgtgtgtatttcagcccaatagggcccattccaccaatgtatatgtatagtagatgagaaaggaaatgaagtgaagcttcgagaggaaaaatcacaaaactacacaccaccactagggacagctttcaccctgctcactctgcgttcaaacggtttcaggggagaacaccggagttctgaagaaaacagcattggctctccttcacctgagattaaagtcgtacaagaaaatctctaaaaaatttcgtttgtcaccagagttcgtttgtttttggaaatataaaatgaatcgtacaagaaaatctctaaaaaaacttgtacgctaacttgagattaaagtcagactcctaattgcagctcatgattttctaaaaaaaatttatcaaagcgaattcccacatcaaacttcaccctagttaaaccgtataacaataataataataagattaaaatagtattcatccgttacaacgcatgggcatattttctagtaaaagaaaaattcaagtatcacccaaggggccgagtagcacagaatagcaagtatgttagaattgaacgtaagctaaaattagcgcacttgacttttagatctgcatgtatggtggtggatgtgtgaacgtctttcgtttaatgagtaatactgtaaaaggtctccgagaatttagcgtcaagatatgcacactggacaaattcaagtcttcatatttttaaaagaacaattaaaatatcaccctagtggcagagtagcatagactacaaatatgctagaattgaacttaggctgtgtttagttcagtacgaagtttggattttggttgaaattggagatgatgtgactgaaaagttgtgtgtgtatgacaggttgatgtgatggaaaaggactgaaatttggatccaaactttggatctaaacacaaccttaagctaaaagtagttcacttggcttttaggatttcttgcaaagtgttgttctccctccatatttctatatagttagcaccgttaattttttaagttacctttgattatttatcttatttagaaaactatacaaatatgaaaaatagaagtcataattaaagtattgtagtgatgagacaaatcataaaaagataagtaataaatgttttttaaaacgatgaatggtcgtatgtaagttaaaaaatcaacaatgttaaacattatttaaaaagagagtacaatttttatagaatggtaatatttacccaacatttgtatccaatcggatatatgcatctttttaaattggtaaacaaccaaacttgaaattcgctcttatggatatttgaactcaggatcttggggtgctactcagatcactgcaaccactaagctaaatgccttttagcgaaaaaaaagtcaacgtgttaagaatccaaataaagtaatatatgtcgtaaaagatatccgagcatataaagtcaacatatcacaccggagaaattcaaatgttgtcatttttcaagaagaacaattcaagtctcacacggatagagcagactagcataatcagccgctctcatgacgtaacaacataatagaagtaacaaccagattattgcacaagaaaatcatcaaatactcaaatcaaattcaaacccgaaccgtccctacccagatggcccagtcagcgatgccgccgccactttaccgagagaagcagcaacacctgacaactcagcttggtacggtgcaccgaaggcgacgtacatggccgccacggcggcgacggccatcgccatcgccacgaacagcacggccggccgcttcccccattgacccatgaccccgagcgcgaacgggtagaggagcaccaggatccacacgttgaacaccatcccgagcacggcgagccaccccggctcggtgagcggcccccacgccgccgccttgccgaccgccaccccgacggcggcgacgttcacgaccatgatgacgatggtcgggatcagcagaggcacccaccgcacggtgtacaggtcggcgaacttgtcgccggagctggctgccgtctgcttcgacgtgaggcggaagtagatgcccttcccggtgacgagcttgagcgccatgtacagcaccgccgtcgggtacacccccgtggatccgatcatgtagaactgctcgttgcggcaccagtccagcagcgtgatgccagcccacttcacctcgaacatgccgatcacgtggatcatggcgatgacggcgacgaggtagaggaggtactcgccgaacggccgctggatgtaatactgctcggagatgagccacatcaccgggaagaggttgtagaagaagatgaacacggtcacgatcgggtaggtggacatattgaggtaggcgacgcgctgcagcgggtggaggcggcggccggcgaggagcgcgttgctgtgggagaagaacatctccagcgagccgcccgaccaccggaggatctggtagaggcgctcggtgaggttgatcggcgccgtgccgcggaacgcggcgggctccactgaggcgtatacggagcgccacccctgccggtgcatgcggaacccggtcaccacgtcctccgtcgcgatgttgtacacccacccgacgtctctcccccatgacgtcccgtcctcatacgcgcacgccgtcagggcggcgaggtcgccggcgaccgactcgtcgagcaccgccagcggcgtgatcgaccgttcttggttggcgccgtccagcatcgtgccgacgaacgacgtcgagctgccgaacttgttggcgatgtccatagccttgatctggctcgccgccgctccccagcgcggcggctccacgccgtagagcgcgacgcggcggaacatggtgccggtgccgaggtaggagggcccctggaggccgttgagggagagcatggtgccgtcgaagaagacgcggttatggttcgcgtaccggtccgtcgggtcaacgtcgtcgaaccgctgcgggaactggacgaacgccgtgttctcgccgccgcggccgcggccgtcgagcatgaagcacatcggcgccctgaacgcctgcgagttgttgacgtagtggtcgccgtcgaagttgatgacgaacggcgcgttcgacagcagcgcggacacgcggagcatcacgttcatggcgccggccttcttctggtggttgtatccgggccgcttctcgcgcgagatgtacaccagcatggggagccgcacgtcgacaccgctgaaatcaaccggattctcagcactcgccgccaatccaagcctcggtttacagcttggatggttcagtaaaacctatcaaaaacacacaaaaaccattcactctgatacaatttgcccggacaagattggaaacagaaattaaacatgtgtagtgcgcaaatacctgaacaattccagcatgtttccctctctggtggttgtcagccggctcaaaccatgtgccgggccaatgtgtgccatcagccatccatgtcgcattttcgccggcatgtttggcgttgtacacatcagatcgctggcgaatggtgctcgagagggagtcgatcctgaccttgaactcctcgtactctcgccgcacacgccggtgatcgctcatcagctcgccggggacgccgcctttgtacgcctgcgtcttcatcgcgaagtagttctccggcgacctcggctcgacgcagtgcttccggcagaagggcacccacagctcggcgaacttggcgacctccaccatagcctcgtagtggaccagcgtcccgccgtcgtcggagaggtagcaagcgtacctgtccaccgggtagtcggcggcgagaatggagaggatggtgttcacggtgtagagtatcggctcgtcgacagggtcgacggtggtgacgaagacgtcgacgccgggtaggtcgccggagtgccggtcggcgagggcggcgatgtccgggacgcgcttgatggggctctgcttcggtagctggttgagcacccacgagaagccgaaccagacgtcgccgaccatggacattgtccacagccacgcgccgtcgcggttcttgtgacgtatgcgccacgcgaagaaggcgacgatggcgatcagtcgcgccaggatcaagaacctgtaaggatgaaggatgctgcccttgaccttgtacgtctggaacagcggcggccggccgccgccgtcgctgccgcgggcccccgacacgtccgcttcgtcgacggccacccacacatcgtccttgccgccgtcgttcacccgcgtagccgcgggcgaccagcatccgttagtccagcttgtcaccgctgccgccgcggacatcgtggaagccgtggtggccgccgccaagcatgcaatgcacctagttagctagcccctccttgtccatggcaaattatttcacgccaagggggctttatgcctttatgtagcgccgcaaacaacatgagtttcatgggtctgtttgagagcttcttgcaactactgtactgcttcttctaaaatcagaatctcttttaaacattattttttaaaattctatgaatccaacaatataaattagaaaataactaccaactagttaattattagaattttaagcttcaccctaaataatgacatgtctacctaccaagtcaatttgctactattgctactatacggcctccaccagaccaccacactagcgcaagctgagcattttactttctccgtaccaaattattgctacctagaattagagaattttggtgagagagtagtgatttctatgcccacggtttctttatcaccaacactatcatactcctagttgctgcaagtttgataaaagagaggacaaaaaatacatagctcgagtatagtgtgttggctgcaggaagctactacctccgttcgatcaaaatatcttatattttgagacagaggagatactagtcgagtatagaaacagaaactacagattaattcttgttcttcgttgactagcagatccaagtcacgtcttcaaagaagaaaatgttactacgctgcacgcctgcaccagcaagttttcatgttgttttatctaaactagcatggcggcccgcgcagattgcgcggctagcattgttagattttttttctcatacaatagtttaaatattttcatattttattattgacaacataattttaaattcttggttgaactaacaaatgtgtgatatttttattgtattgtatatatgtgatagttatttataaattatatttctatatggactcaagaatcatattttaacattccttattttaaattttgaattttctttgttcataaattatattcctatatggattctggactactcttccaatattcattttttcttagctctgaattttagttatttataaattgtatttctatatgaactctaaactcttctttcaatatttttttttattttgaatttcaattattagtaaaccgtattcctatattgactctagacttcttttctcaatatttttttaattttagttatttctaaattgtattcctatatagatgctggacttttttttcaagatttcttatttgttaattttgaatttcagttatttataaattgtattcatatatagactatgacacttctcccaatcttactttttttaattttgaattttattaattctaaattgtatttctatatggactctaacttctaattttagttttcctattttttaattccgaattttaattaattctaaattgtatgcttgtatgg

SEQ ID NO: 5083 - DNA, 18585 bp, Oryza sativa
cctccaccacccccacccccaccaaaaaaaaaaaaaacaaccccggcatgacgcgttggaggctggtcagccgccgcgcggaggtcaaccaaatggggaaagcagcggcgcaaccagttcgagaggagctagcggaggggaagaggaggcgcgccgcgcgtacctgggggtcctggggttggagcggcgagaggaagacgacgacgtgcggagtgagtgcggacaaggaaatcttcctcggccctaaaaagatgtcgtgagtacggcccaactaaatatagcaccttcttttgggccggaacggggattaccaggaatgggccggagcgggattcggggagcgtgttgggccgtatctcacgtgtaccaaaatcatgaagtgcgagtttatattactagtaagaactttagttaatgccttcattagtacgcctaagagcaaggtcaatagtatagacaacttctggctccaaaacatctatagccaatctaatagctcattcatacaatagttaactataaaaatatactacaccattaatacccggtcccacatctcatacacacataacatcttgaagtccgtattacagccggctacaaatctgtagcccgctttcttctcgatatatgattatagccggcttatagcctgctattgtacctgctctaactcgtctctccaagatcacgtgattagggaattaacgccaagcaaaatgaccaaaactcatctcaaaattttaaaaagaaagactaacactagaaaccatcgacttcttggcttgtattagctgtatcagccaatcgattattccagcttgatgcattgtcacatggacggctaaaacacatgtgatgcacacgcatcgtcgcctctgaattaactagatctccctcagtttcctaacccggccgcctacatgttagcttgtcagagatggactagattggtgtaccaggtaattaccgttaacactctaagatccacccattaatactgtattaaaaattaagtacacactctttgatttgacatgtactgatagcaatctacatgtatgattttgttctttttgacattcaccttgaggttaatctttgcatctgatcagtcggactctcgagttttgatgagcatgttggtataataattaagaggtcagaagaacaggaattaagattcgtttggacttgtaattagtaaatcagactagacggtctactgatcatagctgatttaatacacagttctaacagtactcctgcatctacagatctatttcttttttagatgactgtagctggtaatgtggtgcataaatttcaaacatgcatgtacacatgcctggcaaactgcagtactgccattgtgaacacatactagggtgtgttcgcatatgctggttcccaactcgaaacagtaacacgaaaaacggagcagtccataagcacgtgattaattaagtatttactattttttaaaaaaatagattaatatgattttttaagcaacttttgtatagaaactttttgtaaaaaatacaccgtttaatagtttgaaaaacgtgcgcgcggaaaacgagggagatgggttgagaaaattgggtgccgaacacacccctagtataatgccttgtctgctattgtaaatctcaagttcgtaaatggtttcgaattgtctaaagattaaccaatataaggttcaaactcaactcacacagtgagattaaaaaacaaattcagcatataaatagtagttgtactattcatacccggttttttttcctcctaatgtatatgttgaatttgagatttttgatggagtggtagatattactatattcgtatacaatcaatttttttcaaactatcttaactatttacattaaacatagaaaaaaaagtacacgaagtgacatctacgaaagacgtaccgtcacattaatttatatgctaccacaattgtgacacttacacatcgatcacacatgttcaagagatatagtccaagataattaatatccatgacgttgtgcatataaaatctttccaaaatgttcttgcatatacaccctcaattatgaacaatatatagcatttgaatactacccctctattccatattataatagtctcagacttcaacttttactaagtttattggaaaacgcagcaatatgtacaacaccaaccataagtttcattgaaatcaactattaaatatatttttatagtgtgcttgtttcgtatatcaaaatactgctaattttttacaaacttggtttcaaactttaaaaggtttaacaaaacccatatgatttactacctcagttcctaaatacaaccacctagaactagacgaaatacatcgtagtactgtgaatttagacatgatcaatttggatagaatatatctagatttgcatactaggatatgtcttctaatttactacatacgttccaaaatatagcaacttaaaatcgaacaaaacagatcctaatactgtgaatctggatatactcaatttggacagagcctatccagattcatagtaatttaatgtgtctcacgtccgatcatatatgttattcagatttgtagtactaggaggtgtctcgtctagtcttaggtgttgtccggattcgttgtattaggatgtatctcatttaattctaggttgctatattttgagacgaattgagtagtacttcctccgttttataatgtaagtcattctagtattttctacatttatattgatgttaatgaacatcaatatgaatgtgaaaatgttaaaatgacttacattattaaatggagcgagtagtaaacataaaacggagggagtagtagtacatagatcaattcaccacaaagatgcttctccgagcagtgtgtgaactcttatttcgatcaatatatagatctggccatttattttatctccccacagttctgtgagatcaatttggattccagtagtatatacaaccggcatcaccagatctctatgagtaaaaaaaaaaaatcaacacacaacatgcaacacattgatgtataaactaacttatatgcaccaaaatcagtactctctgcagatctgccaagagagaatcatactggatttctgatttgtttaacaaaaacacgagagaaccaaacaaattaaaatctatgctgccagatttctgatcgtcccctcgcactggatcgatctctctctcatgcatgcacggtgatctaattaagctacttctgcttaactgcaacttgcataggtagatccatctccatcgatctgatcgttgcacccacatgctcgacgacgactgagtaacaccaggccgtaattaaggcggcaaaagttgactttcacaaataacctgagcttatatattacagtggcacagttaatacagctgattagcaatgcagcttaaccaaagtaaccatatggcgatatttattaattagcctgacaagacgtaagacagtacagagcatgcatgcaaagcactgcagacaagtgcgttttttgggtcagcctgcaggcacatggacgcaacatgcttatgcattctgctgcacgttttgttcaccagtggtttgtttagtgctcagacgaagcaacgtactaatgcatgacaccgttgactttttttcaacgtttaataatttatcttattcaaaaaaaattatataattattatttattttattatgacttaattcgtcatcaaatattctttaaacatgacataaatattttcatatttatataaattttttaaataaaataaatggtcaaacattgattgaaaaattaacggcgtcatacatataaattaatatatggagggagtaacacgtttggtgaggcgaggcgaccgatcaatcgatagacgatagttgcggcgcacgcagatctggatgcacgcaaatattcattcaacccaacgatcagtcactagtacagtactatatatacatggtgcatctgcacactctcttcagcttcaagtaccagtagggcagcacacttgcactggcttaagcttgccagtgagctctatagagtgctcgtcatggcttcgccggcgtcggtcgccggcggtggtgaggatagcaatggctgcagcagcctcatcgacccgctgctagtgagccgcacgagcagcatcggcggcgcggagaggaaggcggccggcggcggcggcggcggcgccaaggggaagcactgggccgccgccgataagggggagcggcgcgcggcgaaggagtgcggcggcgaggacggccgccggccgctgctgttcaggtcgtacagggtcaagggctccctcctgcacccgtacaggtacgtacatccgatcgagtgtacgatcgaaaaatcagcgacattgcaatgaaaatctttttatgcataaagattattattagtactgagcttgctagatacagaatctggacgctatacttttgttacttcctctgtataagttattttagtatttcccacatttatcttgatgttaatgaatctagatagatatatatgcttagatttattaacatcaatataaatgtggaaaatggtagaatgacttacattgtgaaacgggggagtatctaaaaattagttaagccgggaatgtatgcgttttctagttggtagaatgaagtatatatatatgcaagtcaatgagcacgttgatcatttggatggatcgtgagtgatatatattctgctcccggatttctttcagtgctaatccgttgactcgtagtaacccacagtacggcctcatgtttccaataatgtctttgcagcttataattggatcaagaatatttaccctttctggtcacctgggcatgtgcatttacttgcatttctagaaataattgtttttaagataataaataaaattcagccttcgtttcaatagaaattaactacagtcggatcatgttttttttaatctcttacagggctctgatctttgcacgcttgattgccgttctcctcttcttcggatggcggatcaggcacaataattctgacataatgtggttctggacaatgtcagtcgccggtgatgtttggtttggtttttcatggctacttaaccaactcccaaagttcaatccggtcaaaaccatacctgaccttactgccctaaggcagtactgtgatctcgccgacggaagctacagacttcccggcatcgatgttttcgtcaccaccgctgatccaatcgacgaaccggttctatacaccatgaattgtgttctctctattcttgcggctgactaccctgttgataggtcagcctgctatctctctgatgatagtggagcattgatcctatatgaagcattggttgagacagccaaatttgctactctatgggttccattttgccggaagcattgcattgagcctagatccccagagagctactttgagcttgaggcaccatcgtatactggaagtgcaccagaggagttcaagaatgactctaggattgtgcatcttgagtatgatgagttcaaggtgcgattggaagcacttcctgagactattcgtaaacgatcagatgtttacaatagtatgaaaactgatcaaggagcaccaaatgcgacttggatggctaatgggacccaatggccaggcacgtggattgagccaatagaaaatcacaggaaaggacaccatgctggaattgttaaggtacataactccaccttaattttttttctaatgtattactaaggggataatatcatattgtgcaatccgcaattaccttgttaagtggattcaccataaattttccattaacatgacctacatatttgtcaatttgaacaggttgtgttggaccatcccatccgtggccacaatcttagcctgaaggatagcacgggcaacaatcttaattttaatgccactgatgtgcgcatcccgatgcttgtctatgtgtctcgtggaaagaacccaaattatgatcataataagaaggcgggtgcattaaatgcgcaacttcgtgcctctgctctactctccaatgcacaattcatcatcaactttgattgtgatcactacatcaacaattctcaagccttccgtgcagcaatttgtttcatgcttgaccaaagagaaggtgataatactgcctttgttcagttcccacaacgctttgacaatgttgacccaaaagaccgatatggcaatcataatcgtgtattctttgatggcacaatgcttgccctaaatggtctccaaggaccttcataccttggtactggttgcatgttccgtcgcttagctctctatggtattgatcctcctcattggagacaagacaacatcacacctgaagctagcaagtttggtaactccatactcttattagagtcagtgttagaagccctaaaccaagaccgatttgctacaccatcaccggtcaatgacatatttgtcaatgagctggagatggttgtgtcagcttcattcgacaaagaaaccgattggggcaagggtgttggatacatatatgacatagccacagaagatatagtcacgggttttcgcatccatgggcaaggttggcgatccatgtattgcaccatggagcatgatgcattctgtggcactgcacctataaatctaacagaacgtcttcaccaaattgtacgttggtctggtggatccctagagatgttcttctcccacaataacccacttattggaggtcgtcggctccaacctctccagcgtgtctcatacctcaatatgacaatctacccggtgacatcactctttattttactctatgctatcagccctgtgatgtggcttatccccgatgaagtatatattcagaggccattcactaggtatgtggtgtaccttctcgtgatcattttgatgattcatatgatcggatggctcgagataaagtgggcagggatcacatggttagattattggcgcaatgagcagttcttcatgatcggctcaacgagtgcttacccaacagctgtgcttcatatggtggtcaatcttctcacaaagaagggtatacattttagagtcacttcaaagcaaacaaccgctgacaccaacgataaatttgctgacttatatgagatgagatgggttcccatgttaatcccaacaatggtagttttagttgctaatatcggtgccattggtgtagctattggaaagacggcagtatatatgggagtatggacgatagcacagaagagacatgctgcaatgggactcctattcaacatgtgggttatgtttctcctttacccatttgcactagcaatcatggggagatgggcaaagaggtcaatcattcttgttgttttgttgccaattatctttgtaattgttgcccttgtatatgttgctacccatatcttactagcaaacattattccattctaggtgcatagataaaagattgtattgtttaacttttgtaataaataatattgttcttgaactaatccaattgtgtcaaatatttttggacttaccttatatgagaactttcatatgtattaccaactgtctttacatattcatgtcatatatattcttcatattgaacatatagaaaaatcacttgagtaaatagaaaagcgagtggtttacatcttaggatgttggtaatcggtataattggcaaggatgcgtcaacctctttaatataactttcttggtgaactttaaaaagaccacacttgggctatatctatatgaatacggtggaccgtgaggtttaacactgaaaaaatgctaccactgtagatgcatgctaccattcaacaagcatctaactctgagtctgttcaattttacttctttggacttcccttatatgagaactttcatatgtaccatcaactgtctttatatattcatgtcctatatctttttcatattgaacatatagaaaaaccacatgagtaaatataaaagcaggtggtttgcagaaagaaatttaaaaatatactgttcatttatttttttaacaaaaatattcgggatacaattgttttggcagaaatatacgtccgatctcacacgatcgttgtgcgaaaatgatgtgggtatgacgatacggacggtatcgcacagcaatggtgcgagaccgcacggtctcgcagatgaaaagagcgagaccgaacagtctcgcgaaaggaaagagcgagaccgaaacaatgtcgcataatgaaacagcgataccgaatgtgttgtccaatggtttcgtttaactagtgattgattaccataattagtgattaattaatgatgattagggattaattagtcgctaatcaatgtgattaaacattaattattggccctgtcgcagccatgccgtgcggtctcgcacaagcaatgtgcgagaccgtacgctctcgcggctaaccaatacgaaaccgtggcgcatcgtcaccccacgtcattctcgcatagtggatcagcgataccgtatcgttttcgcgctttcatccagcgacgatggtatacttttgtaaaaaaatttgtatcccgaatgtttataagaaaattataaataaacaatatatttttaaatttaattcgtggtttgcatcgattttaggatattggtaatcagtagaacatgcaaagatatgtcaccctcttcaatgtaacttctctggtaagttttacaaagatcacacttggagtggatctaaatgaatacggtggaccgctcaacactgaaaaatgctttaccattcgacaagcatctaactctgattatgtttgttttttttccttagaaaggaatttgaattgttggttcaaagcagacaaaagtaaaatccaatatatctgtctatgctattcggttttgatttttttttcacctttctagttctccagaacagaatttagaccgctatttagaaatacctattactaactctaattaaacaagttacaagaactgtgcaataatgacaaatcaagtggtgtagctttcatgtgtccaattctgctggtaaagaatctgatgaactgttaaaaaaattagatgtctaaggacaccaattataaagtgttaaataaaaagaacgagagtatgtgtgtgagtttaggcaggtttaggaagcacacgaactgattcggagcaaattgcacttagttaatatggatttgctgaaacactatattcaacgggcatgatttggtcagaaattacggactaaagtacagacttctctcttttcttttgtgctaacccttcctcagaaaaacttaaacaactccgctggttctttccaaagaaacataaataaactaataaataactcaaatggaacatctcagttattagagtatcttcccctcgaaaaaaagttattagagtatcagtgggcgagctcgtcagctgctgatttcatttcaccgttgctatccccatcaagtttggctgtccaccacttgatcactgtctcatatatactcgatcgatgctctccttgacctctctcccttttatttttcctcccctctgaccagcacggcagctaggtacgtacacatgttttaactctgtcttctcatacaaaacccggcaatattttttttgaaaatttgagcttacgtacgtacgttcgtacgtacgcgcttgataacatcatcaggagttcagaactcagaaaggccaacacatgcgtgcacaattttgggcataatccatgcacttgtttcgatatatatactagtagtaattagtaacaacttgagtacgtactcggttcggttttttgttcgtgtccaagtggacaacactatgttctcccgtacctttcgttccagctgtttttatgattttgacgtggaagctgcagcctatctctatcttttttaatcacctgagttaatcatcaagtgaatgatcactcgtttattacacataaactaaggtgattataacttttttaaaaaaagaacgacaagaatgatttatatgaaatatattcctttctctatctcaagatataatggattttgaatggatgtgacacatcttaatagtacgaatctggtcacctaaaatataagagatttaggatggatgagacacattctagcattacgactttggaatctggccaggttcctgtccgaattcgaaatattagaatgtaccccgtccatcctaaatctcttatattttgagtggtcagattcgtactactaggatgtactgccacatccatctaaatctctaatagtttttgaacggaggaagcattcaacaagcatatattaaatttaaattcaactagtataaattgtaaaaaaaaagagacaaatttgactacaaatatattacttagagtttaatttgttataacatgttgaatttaaatttgaacttatatgtttgtagagaatgatatattgcatattaatttattttgttaggtactccttccttattgtattataaaatgttttgattttttttaagtcaaagcagagtttatagaaaaatgttgaagtattttttttataaaaatgtatcaaaatatatttaatgttagatttaatgaaagatgttatagatgttgctactacgtttattccacaatataatcaaattaaagaaaactaaaaatgtcttgtaatataaattagatggagtaggtctctactgttgctggtgcagatgtacacgttttatttttccttgtttctgaagatgtcacacgatcagctgacttggctgctagaggagaaccgagaatctgtagtttctgcgcccgactggtgaccttgtgccggtggtttttgatcgccaacacgacgatcgttgccgagtttgatcgaaagagaggaacgaaaattacatacgctgcagagaggaaaaatgctcatcagcttgctgcactgtgacagtggcggcttctcttgtaccacgtaggtagcagcagtattttgaccaggcagggtgagacgatgatttaattaaactcatgtcgtttcgccgcgctatataagccaccacgatgtgttcaccagttcgccacggagcttacgtagttagctaggtgcgtttgcgtgcatggagttggctacggcctccacgatgtccgcggcggccgtgactcgccggatcaacgcgggcggcctccgcgtcgaggtcaccaacggcaatggcgcggccggcgtctacgtggcggcggcggcggcaccgtgctcgccggcggccaagcgggtgaacgacggcggcggcaaggatgacgtgtgggtggccgtcgacgaggcggacgtgtcggggcccagcggcggcgatggcgttcggccgacgctgttccggacgtacaaggtcaagggcagcatcctgcatccttacaggtctgaccgcctgggcccacactgatgtcaaatactactaactactcttataaacttataatcaaacttagacaaattaattgcgaatcaataaagtgtgattaatttacagcattcattttggttgcccttatgctgttctctaatatacgaacaggttcttgatcctagttcgactgatcgccatcgtcgccttcttcgcgtggcgcgtacgccacaagaaccgcgacggcgcgtggctgtggacaatgtccatggccggcgacgtctggttcggcttctcgtgggcgctcaaccagctcccgaagctgaaccccatcaagcgcgtcgcggacctcgccgccctcgccgaccggcagcagcacggcacctccggcggcggcgagctccccggcgtcgacgtcttcgtcaccaccgtcgaccccgtcgacgagccgatcctctacaccgtgaactccatcctctccatcctcgccgccgactacccggtggacaggtacgcctgctacctgtccgacgacggcgggacgctggtccactacgaggccatggtggaggtcgccaagttcgctgagctgtgggtgcccttctgccggaagcactgcgtcgagccgagggcgccggagagctacttcgcgatgaagacgcaggcgtacaggggcggcgtcgccggcgagctgatgagcgatcgccgccgcgtgcggcgagagtacgaggagttcaaggtcaggatcgactcgctgttcagcaccattcgcaagcgatctgacgcgtacaacagagcgaaggatggcaaagatgacggtgaaaacgcgacatggatggctgatgggacgcattggcccggcacatggtttgagccggcggagaatcaccggaaagggcaacacgctgggattgttcaggtacgtaacgtacgcatgaagcgagaatttattccttttccaatatctaaagacagagttattgcattttagtttctgtttagggcatccacaatgtgaccataagagtgagccttaagactttttttcagctatatacattgtggacatggacataagacattaaatgcttaaaaacagctctaaccttacagttgaacttaagagattaaaaaatgatatctaatggagcctatcagcatatgattgcgaattggtggtatgtttcttctttgatgggacccagtgggacccggcttgtttctcatccaaggccataaccattgtagagatagatatagctaaagctatctgctcattcagcaacccaacattgaggttgcccttataatcttgttctgacgacaaattttgtcgagtggagatggactattgttcatagagggacgtgtccctcgtctcgtttagtgcatatcatttaaaaaaacattaaactttttttttagaaaaataaataagatagatcaatatgtgacatattattccacaaacacaccagttcaaatttagtctatacaataagaaataaaagtaatagatttgactaaaaattgcacgttctatttagaatcaatatattttgttatttttgttttttcttatataagttcagtttaaacttgcaagtatgtaaaatatcatatcccatattgatctacttacttaaaaaaaactagctaaggcccctacattgcaacaaatactgtaagagataaaagaaaacacaaaaaaaaatacaagtttatagcatagttaatggattagaatataatgcaatatctaaaaataatatttacgtgtggaccttatggtcacatggcagcttgtaacattaacgacaactagcatggcggcccgcgcagattgcacggctagcattgttagattttttttctcatacaatagtttaaatattttcatattttattattgacaacataattttaaattcttggttgaactaacaaatgtgtgatatttttattgtattgtatatatgtgatagttatttataaattatatttctatatggactcaagaatcatattttaacattccttattttaaattttgaattttctttgttcataaattatattcctatatggattctggactactcttccaatattcattttttcttagctctgaattttagttatttataaattgtatttctatatgaactctaaactcttctttcaatattttttttattttgaatttcaattattagtaaaccgtattcctatattgactctagacttcttttctcaatatttttttaattttagttatttctaaattgtattcctatatagatgctggacttttttttcaagatttcttatttgttaattttgaatttcagttatttataaattgtattcatatatagactatgacacttctcccaatcttactttttttaattttgaattttattaattctaaattgtatttctatatggactctaacttctaattttagttttcctattttttaattccgaattttaattaattctaaattgtatgcttgtatggactctagtatactctttcaatattcattatttttaattccaaatttcagctatttttaaattgtattcctatatggactctactttcgaatttcctttgtttataaattctattcctatatggattctagactactcttccaatattattttttcttaactctaaattttagttatttataaattatatttctatatgaactctaaactcttctttcaatattttttagttttttaattttgaatttcaattgttggtaaagtgtattcctatattgactctagagttcttttttcaatatttatttttttaattttagttatttctaaattgtattcctatatggacgctggacttttttttttccagtattccttatttgttaattttgaatttcagttatttataaattgtattcatatacggactatgaccttctcccaatcttaatttttttaattttgaattttagttatttctaaattgtatttctatatggactctaacttctaattttagtttttctattttttttagttccgaattttaattaattctaaattgtaggcttgtatggactcttgtctactctttcaatattccttatttttaattctgaatttcagctatttttaaatagtattcctatatggactctactttttatttttcttcgattaacgtgggaatttctaagccgtgagagcaaacatggtagcttctttttctattactttccatctaggctcttttttcatatattagaatttttatttctctctaattcatgtgaaaatttttagtctatgagagtggtggctccttttttatttctatttctttattaagataatagattgagtttgccttcttgttttgatatcgtttcagctctatggtattttagagcatcagttagttgctattttcctgaaacacttgcttttatctcacaatttttttcatcgctaaaagtcggattcgtacagagtttcatcactattttgtacttaatctttttttcctttttttttgttgcggtggattgtggagagaagatttctagcgtactatttatatattaccatggcatgtaatttgtgtacaattcagattgcatgaatctgacgatgatttttttttagtctgtcttttattagtgtctcacacggttttcaaaattagtgtctgatacgttttctaaatcgaaagaaaccttgtccgtttcctgtatcctacgaaagcatattagtatgattccgttttcctttttttagtttttgactgttgtccgattcaagtatcttagttttttttagttttttttgcctttctttagtttttaactaatcctaatcctaatcttagttctatttttccttttttcttattttttaattaatgtgagaatttctagaccgtgagagcgaacgtggaggcttctttttctattactttatagatataatagattttagacaccatcactaatatcttttaatgcagtataaatataattttttttaactttgaggcaacatgcacaacctagacattccctccgagaatataatagactttccccaaagtgagtggttttctttgtgtttttgacaggttttactgaaccatcccaccagtaagccacggtttggagtggcggcgagtgttgacaacccgttggacttcagcggcgtggacgtgcggctccccatgctggtgtacatctcgcgcgagaagcgccccgggtacaaccaccagaagaaggccggcgccatgaacgcgctgctccgcgtgtccgcgctgctgtcgaacgcgcccttcatcatcaacttcgactgcgaccactacgtcaacaactcgcaggcgttccgtgcgccgatgtgcttcatgctcgaccggcgcggcggcggcgacgacgtggcgttcgtccagttcccgcagcggttcgacgacgtcgacccgacggaccggtacgcgaaccacaaccgcgtcttcttcgacggcaccacgctctccctcaacggcctccagggcccctcctacctcggcaccggcaccatgttccgccgcgccgcgctctacggcctggagccgccgcggtggggggcggcggggagccagatcaaggccatggacaatgccaacaagttcggcgcctcgtcgacgctagtcagctcgatgctggacggcgccaaccaagaacggtcgatcacgccgcccgtggcgatcgacgggtcggtcgcccgtgacctcgccgccgtgacggcgtgcggctacgacctcgggacgtcgtgggggagagacgccgggtgggtgtacgacatcgcgacggaggacgtggcgaccgggttccgcatgcaccagcagggatggcgctccgtgtacacctccatggagcccgccgcgttccgcggcacggcgccgatcaacctcaccgagcgcctctaccagatcctaaggtggtcgggcggctcgctcgagatgttcttctcccacagcaacgcgctcctcgccggccgccgcctccacccgctgcagcgcatcgcctacctcaacatgtcgacctacccgatcgtcaccgtgttcatcttcttctacaacctcttcccggtgatgtggctcatctccgagcagtactacatccagcagccattcggcgagtacctcctctacctcgtcgccatcatcgccatgatccacgtgatcggcatgttcgaggtgaagtggtcgggcatcacggtgctggactggtgccgcaacgagcagttctacatgatcggctccacgggggtgtacccgacggcggtgctgtacatggcgctcaagctcttcaccgggaagggcatccacttcaggctcacgtcgaagcagacgacggccagctccggcgacaagttcgccgacctgtacaccgtgcggtgggtgcctctgctgatcccgaccatcgtcgtcctggccgtgaacgtcggcgccgtcggggtggcggtcggcaaggcagcggcgtgggggttgctcaccgagcaggggcggttcgcggtgctcgggatggtgttcaacgtgtggatcctggcgctcctctacccgttcgcgctggggatcatggggcagcgggggaagcggccggcggtgctgttcgtggcgacggtgatggccgtcgccgccgtggcgatcatgtacgccgccttcggtgcgccgtaccaagctgggttgtcaggtgtcgcggcttctctcggtaaagcggcgtcgctgaccgggccatctgggtagggacgacatgagtccggatttgaatttgatgaatgatctcgcgggggtaataatccgggtgttcagatatatctcgttacgtcatgagggcggcagctgattatgtgctagtctactctgatcgagtgagacttgaattattttttaaaatgtgaagacttgaattattttattttattttatttgttcagtgtgatatgttggcattaaattcatggagaactttttttttctctgtgttgttttttcttaaagagtactcctatatactgctataaatatagatgacacaacattacaagtttaattaattaagtttaagtaccattttagtgtgttatatacactactagtcacatgcccatgcattgtaacgaatctaaaggaaaaccgatgaatgggtatgggttcacaatttttaagtcatttttaatactttttcaattcgagtaaaattttgtaatagaacttctttgtttcattatttaaaaattcaatacttttaacataaattttgaaacttttaacttaaaatttagaactttcaaattgaaattttaaaaacactaacccaaattagaaacttttcggctcaaaatttgaactattataaacacgtaataggaaaaaaaactttaaaatgttccatatatgttgggcctacaagtctgcagggccatggaaaggcctggagcagaggcatagatgcgtcaaataaattttccataggagtaagtctattttgcctttctcatctctggttgttgattgaatcacttccctcaatcacaaaaccgggtaaaatgactcccccatctttaaaaaccggtgcaaatcagcttctttggtggtttggaaggtgtttttttgctcatgtagcatattgaccatggttgactagctaagtcagcgggtgggatccacatgtcataaaaatctcatatacttttgcccctctcccttccccctctctcttgctaggcggcaaacgatggcggccagcatcgtggggccctagctcgtagccgctgaagggctagcgcggggtgaagacggcatcaagggctaagtgggagggtagggatgaggagcaggtcacccttgacgtgggaggatggaggtggaaggatggggaggagatcgctttggcatcgacagcggaagagagagaaggcggctcgagtagtggggagtggagtggggggtaggagcgacagtagaggaggagcgttgaggaaaggaggagggagggtggcagaatatagtgggaggaagtagtgaaaccgacgggtggaggcggagtagtggtcgcggcaaagaactgcgccacctccacgataggggagatggtgtagagttcacagttttgggag

SEQ ID NO: 5084 - DNA, 8976 bp, Oryza sativa
ctaacaggatatgggattgagccaaccacaaatttcatgcttcttgattgtgtgtcttcttcaatacctgatgagccattctccccctcttgtccatcctcatcaataattggattgtcaagatcaacaaacaaggaactcaaatctgttctttctccatagaacggaacagactctctaaaagtaacatccatactaacaaaagttcgccgctcagatggactccaacatttatatcccttttgcccagaagagtaacctataaaaatacacttgacggctcgaggatccaattttccaacggatggtctatgatctctgacaaaacaagtacacccaaacacttttggaggaacaatgaattcattcttcccaaacaccatttcatatggagtcttcatcccaagtattcgtgatggcatgcgattgatgagatatgttactgtcatgactgcctcactccatagaaactttggtacattcatcgtatacatgagtaaacgagttacctccagaatatgtcgatttttcctctcagctactccgttctgtggaggtgtgtcagcacaagaagtttgatgtactattccttctgctgagagaaaactcctaaattcatcattcacatattctcccccattatcgctcctaataactttaacacaagtgtttaattgattcctaacccaagcatagaaattcttgaaacatttcaatacttcactcttgtgtctcatgagatatatccaagtcattcgtgagtggcaatcaataaaggtgacaaagtactttgctccacttaccgaagcaataggagaagtccatacatcagagtgaaccaacacaaatggcaaaatgcttcgaagtcctctgcttatgtatgtggttcgtgtatgttttccatactcgcatgcatcacacattaatttgcttttgtccaccttactcatctcaaaggacatatgtcccaattgacaatgttttagaatcaatttagcctcctcttcacttgtgctagctaacaaagcactacatagtgctttgtccgtccctcttctatccagataccacaacccattatgcctaacaccggttccaagctttcttccagttcttctctcctcaattagacaattctctcggtcaatagtaattcgacaatccatatgatcaaccaacgagcttacggatactaggttaacaggaaaagagggagcatataaaactgacgacaatgtaattgatggagtacatttgactgttcccactcccctcacatgtcgtaaagttccgtcggcagtttgaattgtttctttaaatgatgactgaaatggagtatatgatgtaaactcactcgacattcctgtaacatgtctagatgctccggagtctaatatccaagttgagttaggtacctgcataggatgtgcgagattaataaagttgccaagcactgttgttttcttcttcactttctgaattcttccccttatttcttcaacttcttcagccaatttctcaagtatttgctcaattccttgaatttcccccatggcagatcaaccaaatcttctaggatactagccaaatcaattaataggagtaacaacactactcctcagtttctcaccaaaaacagaacagcagcagtagcactacttcctcccagcagcactacttttcagtttcccccaaatcagcacaacagcagcagcaagccaagctctcgtactcagtttcttccccaaatcagaacaacagcaacagcaaaccaagcttccgcttcacctccaaatcctcaccttctcaagtagcagcagcaccagcaacagcaccaccaaagtcaccaccactggaacggacaacaatagccaatagcaccaaatccttctctgttgatcctacagccaacagctgcgcgtctctcagccgctgtgctccctacagcttgtgctgcaccaaatccttgcgcagctcaaccagcgagcgtgcgccctgctcctccttcacgctgctcgcgttgagaacctctgcagcagccgtcgccgcctccgccgtcgacactgccgctccgcctccgctgtccgacgtcgccgctccgcctcagccgtcgacgtcgccgcagaacccctctggtcacaacgccgccgccgactagggttcgcgtcggcgaggtcgccggtgacccagctctgataccatgtagttttgtgatttttcctctagaagcttcacttcatttcctttctcatctactatacatatacattggtggaatgggccctattgggctgaaatacacacgcctacactcaacaggtgtgccaaggaagattattttcagagaagcgggctctgcgagctcatcctcgataggggaaaagagggatctgctgcacccgacagaaccaccggtaagaattgatacttttgatggctttgagtcaagagagagaaaaggggatgaaggtgtggatgcccaactagcagaacaggccaaccagatacgcgtgtcggacatgaatagttcccagcataaacccataaatactgataaggggctctctagagatttgattatggctgaaagagggggggagctgttgccaatcccttcaaatgagatgataccggctgtcagggatctgagcgcttatcaggactcgttggatgaaggctctatggatgaaacaagcagtccgagcaagaggaaaacaggcagtttgtcagatacaaagaagacaggcattgttcagcaagctttgttggagtacaaacagctagaggagagcacagctcaaagcaagaaggacattgagtccataggacggtcgctaaagagactcaggaaggatggtggagcaacaggggaggtgactggcttggaagctaccagcgctggggctgctggttcactggcgagacctacggcagggtcccgccagggacaatgagttgcttggcttggaactgtcgggggatagggaacccctcgacagttcgtgaactgtgtaccttagtcaaggacactagttcccagttagtcttcttgtgtgaaacaaggcagcgagttgagaaggtaagccgcctcagtaaaaggttgggtcttagaggttttactggtgttagtagtgaaggtatgagtggtggtttggctttgttctggcacgaatctgtcattgttgatattaaagatgtgaatgcaagatatattgatgcgtatgttcgtttgtctccgattgatcctgtttggcatgttacttttgtgtatggcgaacctcgggtggagaatcggcaccatatgtggtcgtctttgaatgcccttcgacaatcgtcaaactttccgtggatggtcataggcgattttaatgaagccttatggcaattcgaacacttttcgaaaacaccgagaaatgagaatcagatgaaggcttttcgggatgtcttgcagatctgtggtctgagtgacctgggtttcaaagggctaccccatacttatgataaccgtagggaaggctggaacaatgtgaaggtgagattggacagagtgattgtagatgatagttggagggatattttctctgaggcacatgttgttcatttggtttctccctgctctgaccattcacctcttttgttaaactgtaagatgaaggatactagcactgtacgtaacaagtgcttgcactatgagatattgtgggaaagggaagctgatttccctgaggttgtggcagatgcttggtctgatgcaggggataagggcgacctggggaaagttaacaaagctctagatcgggtgatggcttcactgcgttcttggagtaacaggaaggttaagaatataggcagggagtcagaaaaggcaagaaaaagactggcggctctgttagagaatggagctgatagttcagttgttcggcaagcttcagaccatatgaatgaattgttatacaaggaagaaatgttgtggctccaacgctccagaattagttggttgaaggaaggtgatcgtaatactcgattctttcacagccgggcagtttggagggctaagaaaaatagttcaaattggtcccctgaaggcaccgggccctgacggctttcctgctcggttttatcagaggaattggggtgctgttaaacaggatattgtacatgctgttagcaagttctttcagacaagcactatgcctgatggggtaaacgacacaacgatagttcttatcccgaagattgattaacccatggagctaaaggatttcagacctataagtttatgcaatgttatgtacaaggtggtatcgaaatgtttggtcaaccggttgaggactatacttgatgagctagtttcctgtgagcaaagtgcattcgtgccaggtcgcctaattacagataatgccttgctggcttttgaatgcttccacaccattcaaactaacagaagacagaatagagcaatgtgtgcctacaagctagacttatcgaaagcttacgatcgtgtggattggcggtatctggaaatggcattgaacaagttgggtttcgctcaccgttgggttaactggattatggcatgtgttacctcggtgagatactctgtcaaatttaacggaactctccttagctcctttgcaccctccaggggtcttcgtcaaggagatcctcagtcgccattcttgtttctattcatagctgatggtttgtctatgttgttgagagaaagagttgcacaggggtccatctctcctattcagatatgtcgacgcgctcctggtatatctcatttgctctttgcagatgataccttgttatttttcaaggctgaacaacaacaggcgattgcggtaagtgaggttctcagtgcttatgcagctgggactggacagctaataaacccagcgaaatgttctattatgtttagtgaggcttctccaccaggaatacaggaagcaattaagagtattcttcacattgagaaagacgaatttgaagaaaggtacttggggttccctactcccgaaggtaggatgaagagagggaaattccaaagtcttcaagagaagatatggaaaagaattattcagtggggggaaacattcctgtcctctggcggcaaagaaataatgatcaaagcagtcctccaagtgataccagtgtatgtcatgggaatcttcaaactgccagagtctgtgtgtgaggatttgaacaaactcactcgtcaattctggtggggatctcaggatggacggcgaaaaactcattggaaggcatgggatgtgctaatgaagtcgaaacagagtggtggcatgggtttcagggatattagatggttcaaccaagccttgctagctaggcaagcatggcggttgattgaatctcccgatagtctctgtgctcgggtgttgaaagcgaagtattatccgaatggttccctcattgatactgtttttggcggtaatgcctctcctggatggaaaggagtggaatatggtttggtacttctgaaacaaggattaatttggaggataggaaacgggaaatcaatgaaaatttggagagatccttggttgccgagggagtttactagaagaccaattacagtcaaacgacattgtcgtctgaaatgggtttcagagctaattgatgagaatgttgcttgggatgtagataaggtctctcaatacttttggaatgttgatgcagaggaaattttaaaaatcagactaccctatagggaaacggaggacttcatatcctggaaccccgacaagaacggccggttctcggtgagaagcgcctatcaccttgcagtgaggctggcatccaaggatgagagctcttcatcctcttcaatttgtgcaaagaattcttgggatttaatctggaaatgtgaagttccacacaaggttaagatcttctcctggagagtagccacagacagtttggcaacgatggagaataaaaagaaaaggaaactggagatgagtgattcctacaccatctgtgatagagaaagagaggatactggacatgctctatgtcgatgcagtcatgccaggaatctttggatggaaatggccaaggcaggaaatcttgtatctgacattaattcgatcagagggggttcttactggttcttggactggttggggagagttccagctgaggagcaccctatgattctcatgatcctttggcgaaattggcaggttcgtaatgatataactcatgggaagccggctgcccccgtgtgggcgtcaaggcggttcctggaaagctatatgtcaacaattgtccaaatcaagcagaatcctggtgcaaatttgaagaaagggaaactggctgttggtattgctaagcgggctcctgccccttgctgctctgtcaaggatgtccccgtgtcgtgggagaaaccaccagcggggtggatgaaactgaatatcgatggatccttccatccacaggaggaaacaggaggagtaggaatggttctgcgcaacagttcaggagaggtaattttctcctcttgcaggtttttgaacagatgccaggaggcgctagaatctgaacttcttgcctgtgtcgaaggacttggattggcactccagtggacgattctccccatcgtcatagagacagattgcttgacagtggttaatttggcgctttcaaaagaccaagatcgatctgtcttctcgcatattgtcagcgagattaaatgtttgctggaagatgagagaggagtcaccataaagaagatacagagatcccagaatcaagccatccatgttttagcttgtaaagctcgtggtgatcacatctctgatttttggttagaaaatacttgtagcataatatctcagattctctgtaaggactcctctggttgagtaatatatctttgctcttcccctcaaaaaaaaacaaacgaacttaaaatttgactcatacacggaattatattttcaaaagctaacgaactaaaaaaccaactcaaacacggatgagacgtaccaaaataccggcaaaaacttcttcaacttttataatagtagagaaaaatgtgaagacttgaatttgttctgcatgacattttgactttaagttctcaaagatctttttagcgaatttatgcatataaactttttttattatgcagatcaagatgagaacacatgatctatgtaccatacgtccacaagtgtactaattttaactatatggacactaaactctatttttaattttattatttttattctagattttaattaattccaaattcctatatacactctatacttttcttctaatatttatttttttaattctgaatttcttttactttttaattgtatttctatatggacactatacttttcttctaaaattctttatttttaatcccaaattttagttatttataaattgtatttctatatgactctaacctcaacttttaattttatttttttttctaatttcgaattttcattagttctaaattatatacttgtatggactctatttttcttggtctttgattaataggagaatttctaggccgtgagaactaacatggagattcttttttctattactttaataagttaatagatttgcaattaagccccgtaaaactatagaagaattcataaaattaactgcgcggcggcagggtacacggtggcggataccccctcctgctggcacaccgagggggaagctgcacgagatggtgttgaaggagcaggaggagagctccaccgccttcgtcgagtcccccctttatcccgctgacaaagctgggtccaagcctcggcatgtgctcgtcgcctcctcgggattctccgtcaacgcgagcggtgccgactccgacaacggcgaggaccggagcagcgatagcagccagcaggtcctccactgccatgagcgcccctcaccgccacgactcctcgccctcttcctcgcactcagtggcaggcggtgatggggtcgaaggggggagagagaagagagagaagggagggagcgagaaggaagaaggagcgaggagtggatgacgtgtgggtcccacgtgtcagtgggtccacaattttttgtgtgtgaatgacaaatgggtcccacatatatgtttttaactctaatgacacctaagtgtcatgtcaatgccacaaaccaagtcaacacggccacgtagatgccacgtcagcgaaaccgtcctccaaaaacactgagagagtcaaattgcatcggttttaatagttgaggggtcgagatatctagtattgtgattaaaggatacgaatcatatccaaatcttattccaatttaaattatggccttgctcggttgtacttgctgcagctagctacagctcattccgctgcaagcagtaatcgttggtcttgtcacttgtgtagttgtgtttctggcatccaatgaaatcggccaagctgtggggctttgaaactttcctcataaaaatagaactatgaatcttcaattcaaatttagcatattttggctggttattccggccggtgctgtcattggcttcgaactgattactaatattttgaacgaataatgggccaccaccttataataaggccttattgagaagcgcttcagtatagccttcacaaatgcatggcctagattgctttatgttatcatagactcacaggtaagcctctacggaaaaatcagtagtttccacatgtcatccttctctctactttcctcccatacctttctcttcacctttcctccgtctctcttacctacgggcgactgagagacagcgacaagcggtgatgcaaaggaggacgcggcagtgggcagcgcgatggcatggcggtgcagaagtcaatatgctctccacaaattcatcgatgccgacgcagaaggaggatggcaagtagacaacatcgagaggtgggggcaaagagggcggggggggggggaggg

SEQ ID NO: 5085 - DNA, 66771 bp, Oryza sativa
  unsure (1)..(66771): unsure at all n locations
gggggttgggggtggcttttcgttatgtttgttagctcactagccgtgtgattggatcattggaaatctgtaatagcagtgtggttagcatatattttctgggggattttgtgccggagtccgccattcggctgttggttgcgcgtcaatggggaaatcagtacattggctagtactccggaaaatttggcattgaagagagttttgcgaattggttctggacttcccacgggaactacaagtgatttcatcatgatatagagtagtaccaggatggccggatgggatggttaactctaccatgaagttgccaactgctagtaaatttaggtggtgttttcagacagtgaggagttgggggggattcggagatccactaactcataaaaaaactcgaccggcgggggaatgaccgtccccgtggcttttcattaataagaacaggcctcaaccaaactggatgagaaaaggcatgaaccctgcaccccccccctccccccaacaccccacacgcggactcgccccctatggattggtccttaacctgtactttgaggctcctttcttgtacacaaggcccgctctccataggtcgattcataacatgtgtttttacgagaggccagcgagtaacattttttttaagtaggcctaaaattcgctctcgaggaaagtcgaacccaggatctagaggtgctacttgagcattgtgaccgctagactacatgccctttcacaggcccacttgctcatgctagaagagtcgttgaacgccttcctccttggtttgtgtcttggttctactgtcttgctaaaatcccagtgatttcactgcttcaatgaactattaaaggaaaattagaagttcgaataacagaatggtgaattggtttaaatcaaggtttgagatttcggatttgtgagtgggtcccagcagaaaatgtctctggccaaaaattccaagtttgtatttatttagcgaaaagttgttcaatttgaaaaaaaaaatctgaaaatttcgtttaacagttgcttgcattccatttaatttttcattgttatgtgattttgcaacatccatacaagagtacttagactcaacaccttacagaacggctcacttcaccagtaacttaggctcacaaccatgcacccacagcattaaggatacttgcaacaaaagctcataaaagagacacaaagcattaaaagttcgagtaacagaatggtcaattggtttgcctcaatttttgaaatttcggatttaccagttggtcccagcagaaaatgtctctggcccaaaattgcaagtctatttatttagcgaaaagttgttcagtttgaaaaaaaaaatctgaaaatttgtttttgcggttgcttgcattccgtttatttttttcgttctgaaatgtaaaaaccctggtttactagacatagatgaacgtgatagttactaaccattactccagtatacagtcactaaattattcagataacactattaccatgcattatactagacattctatgagtagctggcaggatcatattcttccacaaggttttgtagaaatgccggtattgggggcaacacgacatctcgagtgccctgcaagatatgaactatctgctgcattgttggtctatgagcctcgttgtcctgaatgcaccaacatgcaaccttgcatgctctctccagctcttgaacattcgtgtcatgcattctatgatcaaatacttcagaaatgtcaccattgcttatcctgactgcagcccagacaggaaagtactttatagttttactctccatcaattctgtgttccttttgcctgaaattatctcaaacaacatcattccatagctgtagacatctgcttttgacgtgatgggaagacctgcgatccattccggtgcaagatatcctattgttcctctcatagttgttagtgcccgactaaaattccgatccataagcttagcaagaccgaaatctgccacttttgggctgaagtccgcatcaacaagtacattttctggttttatatcacaatgtatgatgcattcatggcattcctcatggagataatgtaatccttttgcaacacctagaataacttggaatcttgtgtaccagtccaacaccttcacattattaaaaaggtgacaatctagagaaccatttgttggcaacttttttgacaagtcgacgagcacgatcgcaacacctaaacgccttgcggtgatatggagtcgccaaccacctcgatctagccaaagggccaaattaagatgggtttcggagaaaaacaactaaggccctctttgtttaggcttataagccaacttataagtcgaaaagtctaagccaaaacaaacaagcagctttttcatttggcttttttaagccataagccactctaacactattaagccaaaagctaggttggagaagctttttttggcttatatgagatagatgtatgactctaccattaaacttaggacattaaatccactggcttataaatcatataagccaataagctgacttaaaagtctaggccaataagcctaagcctaaacaaagagggcctaaaccggctagcggagccgatttagagatcaaaatcagcctctaggccgatttagatcgatatgaggataactacccgtctcgtgggcaaaacggaaggttttcaggacaaacctacaaagaggtgtcgcactctcgcagcggcggcggacggtttacagcgcaaaccgacaaagatggactaaactagggtaaaatagaaaacatagtaaaagaacgattcaagtaaattgtattcgggggttttacaatgaaccggcggccttgtcccttaaatagggggttggtcttgccctctacaggcccttctccacgtccaactcgggatagaaactaaaggaaacacgaaacatgccttcccgagcaaggaaacctgagacccgacgaaaacagactcggactcggaccctgccggtctgaccgcctacatacctgcggtcagaccggccctactagccggtcagaccgcccacacacctgtagtctgaccgccctgtgaaggaaacctgtcactttccaaactttggcaatcttcccctatttcgtccataggtgccaaatttgggtgtaaacacatgcccccctgcctttttggtgaacatacgtgaacctaaaagcatagaacatgttatctcagggcgataatccaattactggccataggacttcctaagcatcttgccaaatgctcgggaagcatttcttcaagtatttcccattaattgatatctgaaaacaccatcttgaagtgtcttcatctccttcaaagtcttcaaacgctcgtcgatgacatcttcaaaaattgcttcccatcaaggtcttataatcttcaaccgacaagtcgtcttgcttgaaataccgaagagagccaagatttacctcaactggcaaaacggcaatttcaacaatgttttattactcgactcggcttatccattaacctgagtgtaagaactcaacaacttaatatcataagattcggcaatacttctcacttccttggacataaaagaagctcctttaacgtttgaggaataccgaatctatgaacaatatgcttcaaaatagagtcaattacctccgtacaagtaatattctcgagcggcacggcttcggcccacttagtaagtaatccattgcaactagcacgaaccaatgctcttttgatgacgaagaataaatttgaccaatgaaatccaaagcccaacctcggaacggccatagtttaatgataggattcaacacaacggtaggcgctagttgaacattgccaatccgttaacaagcttcactccctctatagcatttgaaacaatcatcaattattttcggccaatgaaaccccactctcctaagcaaccaatttatcttacgggccgattgatgaatttcacaaatcccttcatgtactactctcctagcaacttcagattgatcattatctaagtaatactccatctatttttcggtgatataatatttgaacgcttgccgccgaatcttccgatcaaccttaagtgtaggatctttcaaatatctaatcaaaggaattctccaagctatttctaactcatgggcacaaatgttcgaattcacaattaatttggccttttaatcaattgtaacgtgccccccagcctcctgtctgggatcggtcagaccggccacgcaatgccggtcagaccaccctgtctgcccggtcagaccggctatgcagagccggtcagaccgccggtaccaccggtcagaccggccgtgcaatgccggtcagaccgcccttggtctatgactttgccaatttcgtccaaacttttaaaatcaagcatcggcctttagtatataatttttcttcacataatagccagatgcttggtgtatcaaattattggaccaaaattcctcctctctagacatatgaaaaactataacatccaactaacatgtctagatgaatactaattcaaatggcttttgaaacaataatcatcatggcatcaaaacacttagccaattgaataatgaatcaccaaagtcatatgcctcacacacatgaattccaataaactacaaatgtaagtaatcggcttgagcatgtatgcaaaatattaataatgccaatgtttctaaagaaaacaactctagaataaatcatcacattgaccattgacattagccgaattactaataagcaaaactttcatggtgcaataattataaaatctatatcttatatggtgatccataaaaacacatacaatttggctttaaataaatatcaaagactcgtgaaccaaatcatacttaaaacaaattatatgccaacctaccaattccactacttagaactggcatttgcaacatgtatgtataatatcaatttgataagcaaacaacacacatgtgctagatagtaagcaatgttctaacatggcataggcatataatataatgttaaacacaaaaaaacccataccttgccttagcatccgacaaacggcggctcaaagatgtgatgttgtatccatcgccgttcatctctcttgatttcttcataagcatattaatgtcttgccccccgagcaaaatcggctttcttgattgcacgatttcaaaggcaagacgaacaccgcaccaacatccatagcatcatgtgaaggagacttatctctaatgaccgatgattcttctctcatcatattggatttatcactactttgggaaatcaccgatctcttaccttttacttctttaggtctccacactcgcttaggtgtcgttcgaggctctaaattattacatgttttgttctccacatcttcggcctccttttctttttgacctatggcccgaagacgctgaagcctcctcttttgagagcgagataagccggaaggtatccacttcagctgtggttgttttccaggagccaaatgatgattcttcatatttttggtcgaagtggaagctcctgtgttgctctcaattttctcactcttctctaatgccccccggtcagaccggcctctaggcccggtcagaccggctacaaaccgtcgatcagaccggccaggaaggtcggtcagaccggccgttgtctggcggttagaccggctagctgttttggtcaagccgccgatgttgacagtaacggcgtcggcttcagtcttctccgcttgtatagttttcggcgcatctccagtaggtacatgaacatcttaagattcctcattgatagcaacgacctccggagctttggcttctttcctcacccacaccttcacctttttcacctttgatccaccggaccgattcttttgtgggaaacggtcttgtcttgagttagatgaatgacttgatgttgacctaggtgattccttccactcttggtaatacggcataggtggttgatgcatccaaggcatgtaatacataaaaggataaccatatagtgacattggatatggataccatggcatcacaaccggaggtttgtatggagttggtatagttgatggctccgattgctttggtatttgaccaaatctcttcctacaagatgatcttggtctttttgaatcactagtttgattatcaagtcgttgaccggctaatcctttattgtacttagccataagcatctcaaaagtgagcttcggctttttggtcctttggaaactagatgactcatcctttgcatctttatgatcttcggccttcgcatttttgatcctattcttgggccgaggatccccaataataacacgtctccctttctttttgtcaacatcaataggactaacagagagaggatcactaacaactccggtcttaggcatagatgtaaccgaaataatttcacaagtgaccgatgaatcatcaaccggtcttttctccatcaagtttgcatctttaaaataatcatgaaactcatgcttcatttgtgaccatgtagaaattgaactaggagcaagcaaactataccatgtagatgcaaagtttgacaaagaaagagaaaacaactttaacttacgcaaatcatcgctaccggccttaccgcattgatcaataaagcggtcgatatgctccattgtagtcatagcattctcacctgtgaatttcgtgaagttgggcacctcaaatccttgcgggtatggaactgaatctacatgttcaggatacggcctttgatatatatgcatggctactttggattctatttcactactatcccgcaagacattgtcatcatcttttccaacatctacatgaccgatttgtgactcggtcttaggtgacaatgctatttcactttcgcttgtaatacaatccgaaccgtcatttagttcggctatatcttcaatgatgctattctctaagctagcaatacaatccgaaccaccacttggttcggctattccatcgttgtctaaactagtaacacaatccgaaccaacacttggttcagctataatggttgttgcattattttccaagctagcaagacaatctgaaccaacatttggttcggctataatcgttatggcatcattgcacaaatcattaacacaatccgaaccatcgcttggttcggctatacatgatattgcattatcatctaaactagcatttaagctattgtcatccactcggctttcctgagccggagcttcatgcaacacatgatcaacatcaagaaatatctggccattcaacctctctttaatagaatcaagcaatccatcatatgcaatgtcggccaaatctttgtcagttattttcaagctataacatcggtttttaacatctctaaacctttcaatataatcagcaacagattcattgtatttgtgcctaaccgatgttaaatcagacaacctaagctcagtctcactagtgtggaaataatcatgaaatttttgttctaattgagcccaggaaaaaatagaatttaccggtaaagaagtaaaccatgtaaaagcagtaccggacaaagataaagaaaacaagcgcaatttaaaagtatcactattagcctctccacattgcgctaaaaattgacctacatgctcccatgtggtcctactatcctcaccactaaatttggtaaatttgggaactctataaccacgaggatatggcacattatcataataattaggatacggcttttggtaaaccttagcacgattcctagtttcaatcccaaatttatccctaataatctcactaattatctcctccatattatcaggcctatgttgaattggtggtggatttggtggcctaataggttgtgtttgtggcgcaatatgattatattggccttgcctagtatcgtgagaatatcctctagcaacatcattataagtattaggaacatgcgggggaacttggggattagttgtagcagtagatacaggaggatcaaatgttctaagatgatacaaataactagcattagtcattggatctatcccctgaatcggtatgattgtgccggtctgaccggtccagggctcggtttgaccgacatccagaggcgcggtcagaccggcctgagtcccggtctgactgccggggtaatatccagtcggaccggccgtttggccggtcggaccgacggtgaaatcgcggtctgaccggccatcaggttcggtcggaccggctatatgcgctgctccatcggttccactacttgtttgatctataggagcttgactagcagtggtagaggctttatttttaaacatgtaatcggccataagagggccgaatttaaatcttaaaaactcatcaaatttaccctcaaaagttgcatctaacttatctttaaaaacagtcatggatgaatctattgtagatgctacttcttgttggatagattgtgttaccttcggtgaaactgcaacttgaggtagcggcacgtttcctttcatgacgtcttgatcggtcttgatgtattgtgtagcaatattgttgaaccgttcccgctcgtcatagttaatgaagaaattccttgattaaatccggccatatagctcatagccgaaatatttgaccgaataaattaatacacggtcttggaattttttctctcgcgatgagcaatgtgtgcactaattaattccaccaaaatcaacagataaactttgctttgtctctctgtagatcggctctggtatagcctgatctttttgatctatgcacgtatacagtaataaaaggaaacaatgctcctgctgcttgtctctcggcagatcggctctagtagcctgatcttttcctctgttgccatgtgaaacaaaaggaaaggaggttgccgagtcagctactgctccctgatgatgatcttcagtacacacggcaagtgttcagatggattcggtgacgaccaaataacctcgccgccgattagattaatccggcgatactagattaatttcggccgtttagccgaaacttggatttgacgaaacggtagctactagattaaacgaaattcggccgtgatatggccgattagatcgttccccagtggagtcgccaaaaatcgtgttggcaacttttttgacaagtcgacaagcacgatcgcaacacctaaacgccttgcggtgatatggagtcgccaaccacctcgatctagccaaaggccaaattaagatgggtttcggagaaaaacaactaaaccggctagcggagccgatttagagatcaaaatcagcctctaggccgatttagatcgatatgaggataactacccgtctcgtgggcaaaacggaaggttttcaggacaaacctacaaagaggtgtcgcactctcgcagcggcggcggacggtttacagcgcaaaccgacaaagatggactaaactagggtaaaatagaaaacatagtaaaagaacgattcaagtaagttgtattcgggggttttacaatgaaccggcggccttgtcccttaaatagggggttggtcttgccctctacaggcccttctccacgtccaactcaggatagaaactaaaggaaacatgaaacatgccttcccgagcaaggaaacccgagacccgacgaaaacagacttggactcggaccctgcctgtcagaccgcccatatacctgcggtcagaccggtcctactagctggtcagaccgcccacacacctgtggtctgaccggccctgtgaaggaaatctgtcactttccaaactttggcaatcttcccctatttcgtccataggtgctaaatttgggtgtaaacaccatttaccataaatttatataccagaagcctttcagctcctcaagcaaaacccctcgaggcaaaccagatttgtgtggtgaattcgtcctaaggccctcacctcagtttgaaattgcttctcgcgttgcctcattccttgaagcttctttacagctatcatttgagagtttgggagtgatcctttgtacactgaaccaaaactaccttgccccaacttatctgagaaattctttgtgcagtgctgtaaaaaagagtaactgtataggatgagagaatcatcattggagaaagccttttgagttgcattcctttttcgaaacgtccaaattattgcaccaaaagcacatagtgcaacaaaggtacttcccagcactgcaattagcctcatatgatgtgtcttatgttcattgtattgaacttgaagatcagatgctgcaagacgtacataaatatcaatagcatcaacattaccagcagacaattgtttaagatcccggagctcactattccaaacaatgcattcatgttgatgtgcatatgcagtacaaatgcagttgttcaggcatatggatctgcactcctcctcgctttgaacattcaattgcattggattgcctggaactttgatgttggcaatcttgagaaatgcatgcttctcttgttggccattatgtttattagagtcaacacaagagatatctgttttcctaacacaaccttgattccatgctccaagatcccagctcctcgaggaaactggcctgaaacctggcaggcaatagcatttctcatcaaaacctgttttgcagactccaaaaggcccacagactgaataaacagcacacagagctgcaggtagagaccattgtactatccattcctctgatttgttggaccatgtatggcattggagttgaccgttaacggtaagaactattcttgtgattatggatacatcctttgtggtgtatataaacttgagctggtgactattattaatgaaaacataattgtattcagtatttagtggcattccagggatcgatgtgaatgcttgtcctgtccagttcccagactgccaataaactttagattgattccagagagagacatattggttcaatctaattagatctacatggttggagaaaggacctggtgcaggatcttctggatctttccaagaaacacgatcctggtattcaccggtgatcttattgatcccaaatctctgcccactcagtattgtgtctgttgggtgatcaaagctttgccagattacatcagaagagttaccttgatccctcagaataaggtttccattgtcaagaagaactgcaactattgactttcttggtttattccaagtaccatttgatgaccattttggttctccaaacttgttaaggaggactaaatttccatcctctgatatcttgagctctggagatgtagcacttgtgacaggattgtctcggttggccacccagataacagccttctttgatgtggttctgaaccatataccaacataaaggtttccagtattacctggagagaagaatcccagctcaaaatttccttcttttgagacaacagttgtactaccagaaagagattggactcttgagattgtatcagtcaaagcagaagtacttgtgtaaagatggaagattgataatatgagaaaagaaaaggaagaacatatcttccacttgctgggaggggccatcctttttgcatggaaatttggatgtgtggtattcttctagttaatgcaaatgccacaaggtagagagttatttcttccctctattgtcatccttctcatttgacttgtcttccaaaataatattctttttatgttgttagtctagtttcctgtgaattgacggatgctattgtgccatctggaacaagcacaaccatgtgtgagcacttgataagagttagacacgacttgttcacaaataagtccagacacagaatgtgaaacggacatcctcttttttttgactaaagaacggacaccctctttcaaactctgaattcttctcctagttgcttctgttttactgctgttctggtgattcaaaccaaataatgtcttcttttaagcatcatatatagcgatataactcacctttagtaagttatatatcatatttgtcctagtagtaatatgttcttcaattgcaacgctgttttggccattgaagcatcagatgtttttggtggttcatcttgttattcaagtgtaaaaggcagaagcatgataaagctgtgcatccccaggagcatagatggtttatttggcaatcactttttttttcttttcatgtaattgcataaaatctgctgtgcatcatgctgtagtttcgatttcagttttacatctttcttaatattgtttttcatgtgattatgcatctgtagtcatcagtcagtacaccggcacaggctagtatttttattgtgattttggaacatcattatttatatttatgaatattttaatttgatatattgagaaaactctatctaaacaacaagaaaattccttgccagcacttttttaaatcttctgagaatacagtacacttatatttttcctctttgccaacgaagttattactttgggtgtggatacttttgtaatttgttgcagcatgatgcttatatttagtatggaagtttagtttttaaactctggaaattaaaacctaataaatcttttttttcatggttacttacagcctaagaacatttttaagacaagattagtatgtaagctagctacatattcctctaggtatgctttagttgtatgccttaattcatactgattgggcagatagtgtaaatcaacttgattagaacatgggaatcgaaaataaatctaattattctgtgtatatttatatgttcagaccttgtatacatagagttactatgaactgaactttgatttgtttttccaggccatgtgcgcccaggaaacagattcatggatgccttctggttcttatcttcatattgtgtgcaatgcatggaacgcatgcttctgagttttgactattactttaaaaactactactactctgatacttattatctattgcatgtagggtgtagatgaaaacattaaatcaaatttgacggtcatggtttccttttttaaagattaatgtgctcatgtttagccatttttttattattgtgtgaatttatttattttagaatttttaagattaatgtgagggcttcttattagtataaacaaagcttcagccgggattcttctactggcctgccaaaaaactattttgtaaatttacaggataacaatggtgtaattactcagatgatggcatttggcccttaagaatttgaaaaatatttaaccagtgcagatgttaaagaaaatatagctactccctccgtcctaaaatataagcattttttgaaccttgacatggtctccgagatactactttgaccaacaatatctataaaaataagatgttttaaataaaaagagttgcatattatgattgtttgtttaataataaatctagtaacatcaattttatatgattgctcttttttaattttttttttgctattagtggtcaaagttaaaaatgtttgacttgtcactgtgctaaaaatgcttatattttgggacggagggagtatttattctcaagtagctcaagattaccaaatttaatctattcagattgttatgtgcaagcagatcataacacctgaattgaagcacatgttgggactctatcaaatgttaacatgtgcagtcaggcctcctcataggttaaacataaaaattctaatacatggtggatggctcaatgtgttagttcgtgatagctcaattatgtgctattaatatacagaaggcatggaactacagaactacagaaaagcatagcatatgtacaacatgagtcactcatattactctcaaatacgtaaatgtctttccctaatcaaattcaggattttctgatttatgtgctctgaaattgtgaaccacctgaagtagaactctttgtctgcgaagaagctgtgctattatgcatctgcgaagtttgacttgatgaaacatctgagaaaaaatttatgacatcagggctttcatcaagaaccttcagtgaccttggaacaggaggcatgttgacatcaaggaatccctctaaaatttggacgacctgacccattgtaggtctgccattttcatcatcttggatacaccagcaggcaaccttgcaagcttttgtgagctcatcagcactggcatctccattcaacctggggtctaacaaggtctgcacatcaccttcctggagtttgtttacagccaaagttgggaagaaagaggactttccctcctcccctagatcagcattccttctgcctgatatgagttcgaagagcatcatgccatagctgaagacatctgccttaggagtaatcggcacaccactgatccactcaggcgcaaggtaaccccttgtccctctcattgttgtcaaaacacggctgaaatcccgccctaagagctttgctagaccaaagtcagacactttgggtacaaatgactcatccaaaagtatgttatctggcttaacatcacagtgtattatgcaatccctacatttttcatgcaggtaatttaggccccttgctgttccaagtgcaatttgataccttatggcccagttcagtgccgttgtctcaccatggaacagctgcaattccagggagccctttggcatgtactcatagacaagcagtcttcttgatccttcagagcagaaaccaagtaggcgaaccagattgacatgttggatggtcccgatggtgcttacctcagcacggaattgcttctccccctggctcagtccatcaagcctcttcactgcaatggctgttgaatctgggagcttccctttaaatactgtgccaaaggcacctccacccagcttctctgagaagttgctggtgacatgctgcagatcactgtaccggaaggcaatcagtgcgccccctgtagtcttggatatgcgaagagtcctgtctcggcggcatttctggaatacgatgaacaacacaattgcaaggattatcaaagctgcagcaactccacctacaactgcaccaatgatcattttcttgctctttttagagtctggaagttcagacgctgcaagcctgaggaagagtgtgcctcctccattcccattgtattggtcttggaggttaatcaagtccccatgccaaacaaagcagccactactattgtaagtgtaagcattacaggagcaattattcaggcaagcaacctgacaggcctgagaactagcggccactgcactctgagcattatcaggtagcctcacactaaccatggaatagaacttatcaggctgagtctgtgcagagcttgagttggtctggcactgcacccgtacgtttctcttgcacccaccagtaaaatcctggaggtcccaatcactctgaaacttctggctgaaccccttgatgcagttgcagaacggcaggacattgaggttgcaacttccatatgcgccgcagagcccgtacacctcacactgcgtccgtggctgggaccagaacaagatccaattctccgaggctggtacccatgtccactgcttgatctgcccattcacatcaatggtgaaccgcgagatgatcgagtcatccttcatggagtatatgaagtagctctccgagacattgttaatgaaccggaagttgtagttgtagccggccgtcatctcgggcacaagactgaagatattaccgttccaagggccgctggtccagtaagtgatggagtcgttccactggatgaagtactgcgttgtgccgttgggatccagctcaagggagaacagcccaggggacgggtttgcattgttcctccatggcacaagccgctggctcacaccagtggtcttgttcagccccagcttgccgcccggaagccaggtgtttgtcggatgatctatgctcctccagtagactatggatgaattggtggcatccatgaggtcgaggctaccgccgtcctggatgacggcaacggtggagttggaggccacacttacgttggtcgaccacagctgcctgttcttggattgatcaaggaggacaagattgccatcgctgccgatggacaaggatgcggtggtcgggtcagacaccggcacgtcgctgttggccgtccacaccgtcgtctgcaacggtatgttgttgtaccatatagctatgtagtagttgccggtgccggaggcggtgttgttaccttgtggcggggtgtagaatccaagggcgaacctgccgcccttggagacgatcttctgcgtcccggacagcggcgtggtggagttgatggtgtccactgcggtgcagagaaagatttggctgaagaggaggaggaagaagacaggagccatggatggatcttggcagagcagccagggctgagaacctgggacgaatggaagctgagcttggcctttggagtaatttgattatggtggttggaacctgagaggaaggtaagcttggtcttataactcatatggacagcaaggctccacttcacgagatattgcagaatgaacgctctttgacctggcacagtagagggttctgtggaaaaggtacatacccgaagacctggtgtttgtttatagaagaataatcaatatgaaatgtaatattctgtttaaagttgtggtgaattattaaatggtgggttttattttgtttttttgcaggaggggtgcagaaaattggttctacagttttgcttgcgaaatagtactgttcctagtattaattaattttgctgcctgttcaactaatcaacttgtgttctaggattgaagatattcgtgtcccctcttagtaatttattagtattcacatttgtgaacagagacgccaacatctgctatgatgctatcctcttagtaatttattctgttgcgaaataaatttaaaaactaagaatagtgtgaagtcaaagaaaggtgttttggacttgtggcttgctggtggcagcaaaagctccgggggctctgcgttgacttggccttagtttaacgtggccggtcgttcagagaaactcttttaagacttgctagtattatattttgctgaggtttcaaaattctctgtgctaataatttcaaactttgatcaggaccagaccatctccctttgaagatgaccaaaatcttgaagttggctgccctgttttctctcatgtgggtttctagagaccgggtaagaaatgttgctgcaagaaaattagctggtcatgttgatcggcgaatagcactgtcagtgttagaattgcctgctgatctgttgaaatgttgagtgttaccaagactaacagtatttataattttggttcatggatatctgttctttccgtaaataactttcgtgtttctcattgcgatcaatatagaaaaagcttctgctgaacagctggtgtgaacgttgtcttcctacacgtctgtctgctgttttttcttcccgtcagatttttgttctgctttgtttttgtcatattctagtttttgtacacatctattccttcctgattgcaaatttatcaaattagttggtcagtccacattttgaagggctaatctggtatgatataaatcctatgtttcagaaaattgggtgatataaatcccaaatctgggttaaacactcgttgccatgtttttttataatactgttgttgccatgtttgagaacaggatttgttgtcgaacttagtggcccaagcttgacgatgacttgaccaatgaccagtttccttccttagttcctgtgtcgaagcatgtctcagcatgttaaatgctcactcattcatttatgaccagttctctgatatgatgctgatatggaccgagagcattgaagtggcattgatggagagcagatggatgaacactgatcaccatagtgtggaggggagagggccacagacgcaacaaggagatacaatcatacagataatggtgattgaatctcatgaagacgaagacaaagacgaagataaagattaagtgtttcacgcaaaataaggtggtaataacgtgtgattaattaagtttgaattattacaaacttgaaaaatagattaatcttatattttaaaacaacttttatataaaaagttttcacacgaaacacaccgtttagcagtttaaaaaacatgtcatttttatccaaaagtttatccaatatttgttggagaaaagaacatggcaatattaatcttataatactagtagttggatttttcatcaacacgcgaaaaagggagtacatgagaggtggtgcggtgccttgccagttgccatgccactggcaaattgcaaattgtaaggacgcattcatgtgtgtcactgccggtgtccatgtgcatcgcacaaggagagtggcctgaagaatttcttgttgattgttgaacatgttgatctgtcctgcagtaaaaaagatggtccaggtctgagttaggacgagtttgctcaaaactcgcaccatattgaccgttggcttttttaagaaacggcattgatatctgatctgtatgaacaaatagcaagacttgcatggccataacccatccaacatgatagatttgaaaaatacaatgtttttttttcattcttaaattgccccggcaaaaatgccaaaatggtaaaaaaaatcatattgtaatgttttttttgcatctctagagtagacagatagagaggaccagataaggtaggagactacatgtagtatacatagtgttgatcaacgacctgcatttagttcttccataatatagtcataaggttttcgggtacatgggccaagggccaaggaacgtggtatgcttcttacgagagatttttataaggttgggataaaaatatccccatattcctgtgattggaatgatttcttcaatcgaggaatactaccttcgactatttcttgatatgctcacctttcttcttaaattattgacactaaactccttagattttctttgaaccaacctgtttacttctatttttattttaccctccatcgagcacaactcttcatctttcctagtcccgtctcaccacaacccaaatcctagtgccttcctctagtcccccttcctcttcctcaccagcaagctattggtaaagaggggaaagagacccacccatccagtagatctagttgcttaggttttcagccaaataaagttaccatctttccttgccgtcgtcgtcaacaacggtagccatctacctccgtggtttcttccatgagggtatgattggctataaatttcatgttcatgatgacattctttagaatcgaatcctccggctctctttgtttcaccggtggtccatttgccactggtgaggagcttgtgagggttgtggttatattgatggatggtggcctgagagcatatttggttcaagctcggggcaaggccttgccgttgtttatttagcagttctatagatccgttgttcgagatgaaaaattatttaaaagccaatgtgtaattcgtattcatccaaatttctcttggttctctgtgtattctctcttccaatgatatctctgagagtccataaatatatttttccaaggccattattgcgcccatggcgacgacgggtgcaagttagtactgagtaccttaccaggtattggatgaaatgctatactcgcaattatctaagaaagaagactcagaaataatcatattatggttttgttagttatgcttcagcaacgcttcttaagtaaactggttgtctatgaggtaaacatattatattatattctctctgtcccataatataagacgcggtcaaaattgacacggtctccaaagctaatctttaacttatattttctcatatacaataagaagatttgtagcaacaaaattataaccatatgaaagtaaatttaaatttcaatataataatataatttttaacaaataaaatttattccatattataagtgttggttaaatgttttaaagtttaaatcttgaaatacgcgcgccttatattatggtatggagggagtaggaaatattccccgattgctcagcaggcttgttgacaggtacgagacacacctcttctcaaactcgttaactggttttatactcaaatcaattaacagtgacatgaacagcacaaaaatctcaagtcttgtcctgtgttgcaccatggcagatcattatgtctacttgattgataaattggtcgatattgcactctgccgaggagttgaggatctggatctgacaacaaaactagaccaaatatatcaaagatctgacatagcttggtacaaatttcctttatccttgttcaccaatggcaagggattatctctgttgaaactcaaacttggccaatgcacccttagtattcccactggttttgatggattcaaatgcacatttctgatgacatgattcagacacttcttgaaaattgcccaaaattgaagagctttcacctgaaccatttttggggtatttggagctcagggacatgatgatatgtcattgctttcatatcaaatgtatcgagcttgttgctcccaagttgcagaagtccagatatgcagggcgatgcataacaatggtgtttgcctcaatcccgtccattgagcatgcctggctggattttcatgatcacgagtatgctggctcttttgagtacttcatccgtcctaaaatataataatctagaaccggataagatattttctaacactatgaatttagacattttctgctgtgttattagctcaatgaaactttgtttgagggttttggtgtaactattggctttctgttatggaaatgctatcacgtcagaattagggaaaacggcactccgtttcgtactatttttctgtttttgagaaacaatgtttaccctctagttgtaacttggatgattgcatctcgagtggacctaggggtgaaagcagtacataaatttacgagatttccggttgactttttcagtttgcaccgaccgtttcagtctgtatcggtaactaacggtggtggaaatgaaaacggtaatatcttccgaaaatggtagcggaaatgggatggaggtttttccaaccgttttgtcggtaaccatatttgtacgataatttccgtcaaaatttcgaaagtttcctaggagctcagctagcctaacccatcagaagcccatgaaagaagaaagcctggtaggcttgcagcccataaaaaaagagaagtgactaggtaaaatggtattaaccctatgatgtggcatgtggattttgctgaactttggtctccttaacttatcgatgttgaagtattgttgaactttgtttatattggtcatcaaacttattatcataccattaatcatcatgtaacagtgttatgtggagtgtgatgatgtaagaataaagttaaaaagtcatcttcgtgcatagttaaatgtgtgctatgccatactctgctgattctgttgacttccgaccaatatcggtatattctgttccgacggtcccgttttcaatataccgatatcattacagttttcgggtctaccgtgccgattccgttttctataaaaaaaaatgaaaatgaaaatggtataggttttcctgaccgttttcatccctaagtggacctatccttttgtcaattatttttttcctgtggtgttttttttcctgggtacacttttttcttgtcgtttttaattttcgacttccaagttctaaccctgtactgttaggtttgcttgtaactttcgtatttacgcgtttaactatagtgttttatttccatagattttgtttcatttaaggccccattttaattaagatgtaaatttttactcggttttcgttagtacaatttttaaactactaaccgatgtatttcgcgtgaaaactttttatatagaaattacttttaaaaatcaaatatttttttaatatgtaataattaaaactcaattaaccacgtactcatagctttatttcgttttacatgttctaactttaccgacatcttatattaattagaaacaaacaccaccttatttcagtgacatggttggtggttaccagagtccagactccagaatggatggcgaagtgataggaagctcggacaaagtcatgagaactgacaattaatttaccgttaaaaaaaaatgtcgtcagcttattcagctcgcgggtcaaccgtgccatatctgcaccaatccaagaacaagaagacgcctcaaacattggagctataaaaaaaaatgctaacctcgcgtcacaacttgtgggggtgggttagtacgacgttgtcgtcatctattatctactccggcttagccgccgcgagtcacctcgccaacactgcatccatgcacctgaacctcatcgccaccgtccatgtctccaccaacggccgccgatcttcgccggtctccatgcgccagcgcccctccggtccatgtgcttttcgtcacacgcgacgcctaaaaagaaaatgttatctccgtttttaagagaagaaacatgttttatcattcgtttttatttaaatttttttctacataattattatttataaacatttaaagatggttttatatcttacgtattggtttaaatgttttaaataagacgtataattaaacgtgtgtaaagccagcaacatcatgtattatatgtaaaatggaagagtataaacggagtcgcaactcgcaaggccggcaaggcaagcaaaagctgctgacacagcactcctatctgctcaaccacttgcttggcttcctctgctccggcgaccgggcggccggccggccggcggcgagaggtagcgccaggtgatccatccatccatccatccatctcctccccccttcttgtgatcaaccgttaatcagccgccatggcccatgggtttgagttgatgatcgatggagctagcttcccagattcttgcagacttttgtgttctcgcctctgcctccttaacatagatgatggctgggcagtggtatcaagtagctcaagtttgtgatgaattctgtgtgagatgctgaaatgattatagcaagttctagctatgcagaaattgtattgactctccatatttatgggaaattttttgctgtggcatgcacgttgactttttcgtcatgtactgtactgcatgaacttgatgtccttgcacaaagaaaacgcctctttgaaatatgctagctgggttatgttgattttgttttttaaaaaaattatgcctagttgaattgggatcttgagagatgtattcaccttctgctttcaggggcacagggctgcaattggaacctgaacttgaaagcaagttgtgcaagaggacagaaaagaatcagtctgaatatggctgcctcaaagcttcaggccttttggaaccatcctgctggccccaaaacaagtcagtggcaaccctgtttgccttaattttagtgtaaaatggcaattgatattcccatagacatgattagggaacagaagctagcttacacatgtcattacacagtgagaactacttcccagcttgtcaattattaacagatgacatgattagggaacaggctgatgctgatggttccagcttacagttcagaatagtatgtgaaatcagacagcctggtttgatcacaagccagtttacaaaatactaaattactgaaaccgtcagaacataaaaacaacagtgtttaagactccctccttcagatagctgatgtgcttcattcttcaattgtctgatgatccatttggtttctaatttctagtagtagccaagttccatcttctcctcttcttctgatctgatggatgtctattggatgaaacatttaacatattcaatcactgtcatctgaactgttgaggcttccatctgatctttgttgcagttcatttctgggccccaacattcaaatggggtatcagtattgccaatgttgctgactttgccaaacctcctgaaatgatatcctaccctcagcaagttggtaggtttagttgtcagttaatcttattcctgacatcagtttatcatcaattcatgtataatgttgttgtgcttactctgatgtatgatgtatgatgtatgatgtgcagttgtggcttgcagtggagtaatttgggcacggtggggcatggtcatcacacctgtaagcccctgatatttagccatacatacaatcgtttctcgttattatggaaaaatatttggaattttggattgtatatctcatttgaatgcagtctaaacagcaacttttttgcgcaatgtctagtacgattctctagtgtaggttagtgcggtgtactgtaaaggagtaactgttttgaaactgaatcaagccaaagacctgttttatgactgttgtacttggatagactgattcagatatctgttttatgactgttgtattgttgcagataaactggaacctctccagcgtgaatgctgcaatggccgtgacaggcgtgtgccagctttcccgtaagataaggtctgttactgcaaaaccaatcctcagcttgctgatttataattccagatgtgatttctgataaattagcaactttcgtgttgatctcttacgattcgatatgtgatttctgacaagttaacaactttcgtgttgatctcttcttttacaggcacgattacttctctgatgagaagagtgctactgcgtcgctggaaggatgataggaagaagaagaaattgttgtcatggaatggaacactaatttcattatcagtcgaccagcacagtgttcactgtgaatgtgtccgcttccatgataacaaattaacaatcccatgtgtgtgtatgatcattatgaattgggctatgggtatgaaatgtttttataccctttggtatacagatagtaagcgagtctgaacttaactgaaacggacttggtttgagttcagctcgaagtacactcgaattaaacttaactcgaacggccttaactgaaacgagagagctcccttcctctgtgccatacaatatgtttgcaatttcggtttgaaattcccgaaatttcatttcggacttccggcacgaaactatttcgcctgaaattatattttctttctgaatttggtcaaattttattcaagttcggctaaaatttcttcaaatttcaaaaaaaaaaaactattcaaccgagaaaaaaagctcctggaagaaggaccaacagggagaggcacaaaagcggtgaaccagagcacgtaacttactccacaaatacctaaccaatgttccattcttcctctcatcttgattttataacttttagacctaacaaacattattcattaaccaacgctgcgtgttgctttgccctctgaaactactggaacggcaaatagcagcaattgcctccttcttcttcttttttttccccctcctaacaacacggggaaaatgcaaacgctttgcccggaaaactcatcataactgatagcggagagctgcgaatatatgccatcgcgttagctttttccaccggagttgtttttttctgactcctctcgcggcgaaagacgatgccatctgatttcagtcgctgcaggccttcctgccaagtagtagcttttgttgcgtttttcctatcaaacggcagtaaattaagtaaaaggctggtaattattaattaacgtgaggcggcaagactttgttgtgcaaaagcaaagcggcagaatgttaactttgggtaagtttcgaagtaaaatcgtgggggcatcgatctacagggagctggaataaaagaccatggaaatgatggaaaagttggaaggcagcagcacatgatcagatgatctgtttgaaattgagaagcaggtgttccccgatttccacccatgatctgtgtacagtacgtatgcgcaagttccgttaatttctcacgcatcagttacagcctcatcttttcgcttatacttatatacttatcaaccaaaagttaaattttcaatcttaaatttagacttgattttgagattttttttcatcgaagtttatttttcagcttttacttttatatcgctaagaacacgtatataaaagctttattcataaattatttttcgtttgcatatatgtcgtttggcttattccatcgataagccaaatgatggatgaggctcaaaatgatccacttagatggatgagactcctctcacataaagttagagggacatggctactgacatatgggcccatgaaggtgggccccatatgtcagggactcatgtccctctgactttatgttagaggagcttgctcccacttagatagctagtttggtaaataggaaaacatgcaatccatgaaatacagatagatactccctttagactccagtcataaatattttaacgtttaaaataagatttgatatatgaaactttaatagtcaatagtttctcaagtgctgagcaaaatggtatatgcaagggcggatctaggaaaaattaatagaagaggccgaataaaccatacaaagttatagccccatcttctaataaatgtatgacataaaattttagtgggggcttcataggggctcttatggttgtaacatcggtagtgaggcttgagaccccaaagccctcatggtagatccgcccttgggtatatgtagatttgccttcgaaaatactattataatattattataaacatattaaattttatgaacttgttctaatataaaattagtagttagaattttaaaagagattgtctaattctcagttgcatgaaaataaaaattaatccaattttggactgctcatattgtagcgagatttgtgcatgaacagtaaaaattatctctttcaccccgcttcattcttctattgtaacacacaatctcctctcgttctctccgtatcacaagcaccaagccaccgccgctccaatccctagcgcgttgcttcaaccacctatccacttcggatctaacgcccccactgctaaaaccttgcgtagcacaagcaccaagccaccgccactctaatccctagcgtgttgcttcaaccacctatccactttggatataacgcccccactgctaaaaccttgcctgccgctcccctccaaccccactactccggtggagggtccaccacctcgtcacatgactatgtccgccactggtcttactaacaccctgcaactatccctctaagtttgagaaaaccctcttcttcccctccctcaaggctccctcctacatcaaccacaaccctaaactttaattcatatatctttcacccgagttggagtgtcgctagcaccgcagaagacagacatcgtcaccattgtcgttaagttacctctccttgtccctcctccctaccgtaaagaagattgttaggttgaagatgactgaaatccctagcaattttcagtgacatgagatatatcaatccccttacaaattttcctcaacgttactacatatttatgacgggattcctgcgattcatggcactgtgaatctgtgatggcaacgctgttccaagacatgaaactcgcgtgccaaatactgagcataataattaaagctagagcgtctgtcaatcgggtctgaccggcgcctctttattatattattccattattgttaacctccaaaagccgcggaatcgatcatgttttgcaattttgcaaaccgagtaaggccacgtacgcgttccggtctacttaaccagatcccgccaagtcaaccaaaccacaagtactacgtccccaccacaccacgtacgtacgcgacagcgcgcgaaacagcatccgtccgtctcgcggtcgcgccgtttcgcctgtcctgtggctcgctcgcggcctcactcccaatctccgactcgattcccactcccactcgcgacgtatataaattcccccacgcgcccgcgctctccgacccatacaccgccacacgccgcgccatctcttcgaaccaacgcgacacgacgcgacaccggcagcagctagccgcggtgatcgctacgacgatgaggttcgcgtgcttcagcgccgcggccgtggccgacgaggcggaggccggggctcgccaccaccaccaccggagcggcggcggtggcggccggcggcatcgggggacgtcgtcgtcgctgcggagcaagttgtttggcggtaggacgacgaaggcgggcagcaagaagtactcttcggcggcggcgctggacgatgtctacgacgcggcggagtggtcgtcgtcgtcggtgccgtggtcctcgacgtcggcgctgtcgctggactcggcgcgctcgtcgtcgtcgtcgtcgtcgacgacgacgacggcgccttgctcccgctcccgctccttgtcgtcgctgtcggacgcgctgtctccgcctgctgcgaggcgcgcgccggagaggagggggaggacgccgcggccggcggcgggcgtggccgcggtgatcgtgtgcctcgtgatggtgatgctctgcggcagggtcggagccacggcgctcgtctcggcggcgttctaccttttcccgcggcggtggcggccggtgggtgccatcgaggcggcggagagcgcggcggcgtcaccggagcatgactggccgtcgtcggcgacggatcaggagacgacgacgaagaggaaggtggttaaggaggggttcttggcgcggaactgcaagaagtgatccatcctttttttttcctctcctttttttttgaagagaaagaacactaatttccttcaaattttttacctcgagagttgttgtaattatagaattccagacacaaatcaaataatcaatcatcaaagtatcaaactgatcaaacataattgccttgtagtgcgatgtatttttgcccaagggaaagatttggagatataataatatcttagcttgtctcagtgacgcaaagtttccttcttgagtttaccacagtgagagatagagaggtcaagaaagcaactgatggtcttctcgatttttttattttttttaaaaaaaaagaggaacaaagaaaaaaagcaacgcatgcatcgtgcatgcacatttccattgcgggcgccaacaaattccttcatgcgtacgtgctgtatccatggttagctaattaagctagtggatcgagatggaactttatccaactttgcaataatgcaagaacctaaatagtctatattactcctatatgtaagagtaactttggggcagcttacaaatgattggcactttaaatcattattgtattcatcttgtatgttatatagtctgtatgtcgacagaggtcacagttgtaaaccattttcattattaaaaagagtccaaatcacccctttgaactattgagtgagtacaaattaccctcatggacccgaaaactagatatctttaaccctcgactattaataccggacaaagaaccccctacccccaagcattgttctgaagcggttttgacctgagattgcacacatggcgtcagcgtggcaatccaatcagctaaaaaatagaaaggaaatccatggacgcacttgtcatctctctccctctatatatcccctcccctgccttctctcccctggtctctctctctctctctctctctctctctctctctctctctctctctcggggaggcatacccggaggtgggggagccgggaggcattcgcggcagccggggagctgggaggcatccgctagcttgagctcctccgcctctgccgctcgagttacgccccgccctgtcgttgtgcaaaggcgcgtgcgtccgatgctcgcctctgccatcgagatcctatcctccccgctactagagctttgccgcccccaaccgcctccgccatcaagatcttcctccctcccactcgagcttcatcgccctatcgctgtgccccatcaagatcctctggtggtcgccgcccacaaccgtctttgccatcgagctcgtccaccccgcctctcgacgctccgacgctctgctgctgtcgttgcctccgcccccaccctcgcccgccgcctactcggctcgccctcctccgccgcctctctgttgatagagagagatggaggtgaggggatggagaagagagaggaagtgatgagagggagaagagaggatgagagactgacaggtcgagcccaccaatttaaaagaaattgtagaccagattactatgtacgatcaaaactattatggatcgagtcagtgggataattcatctggttttaatagttaggggtgaaagatatctggtttttggtatgaatggggtaattcgtactcactcaatagttcaggagggtaattcagacttttccctaaaaaatatagttcgtgtttgccttgtgatatctttttttttttgcaaagatatatataatggattattcgaaatgataggtagtccctaatcatggtaaaatcatgttgaaagaaaaaagaaaggcaacttatttttgtgtgtgtgtgtggaaaaagaaaagggcatatgttctcccctttgttcatttgtccagacaatattgaacgggaggctttttattataaatataaataaacagacccctttaaatcttgctacctttttctagaggaaaataataaatcttgctattttcacaagttggtttgttaatttaatcatgtacttatgttattgtggcgcgcaccgaatgatgtgatgttgattgtatgctctatgattttggaacatgttgtatttcggctaccagcctagtggtaggagtatcaatatattcttgaaagtaaattgttgagttaaatcgttagcttgttgatttaacagctaccgccaaaatttcaattttaaaagttagattttgagttttattcatcgtagtttattttctagcattagtttttaaatcgctagaaaaatatcgatgtaaaatttttatccaaatattattttgttgcttcgttcatttttttcacaagccgaggagagaacgatgagaggttcgtttgctgataatacataactccgatagtccgatctatacattttcttgttatatctgaataagatgggactacacacctcttataaaaataaacgtgaaatttgcctcgctgtaacggtacaagactagatttggcacaggtgtttcatatttatggctaattactttttcagcagtaaatgatgtattcgtcgacggcgagacgtatgtggtgattttgttaacctcaaaatttaccgatccagttttcgaagatattgtgtgcatgtatatgtttattggggtgagtgtacatgcacgcgcttatatgagctttcatgtttgtactatatatgtttaaaaaacaaggcaattaaacaatatatatatatatatatatatatatatatgtatttatgtctaatttggatttaaattggcaccggcagacgccagtccaaagcagggttagatgtgggttctcatgaacctagtacgtacgtagcttcatgccttcatacacaaagaaaataatagtatacacactgagtccttgttgatagctatgaggttttggaaagtggccatctccattttcatagctgaaaagctgctttattgcttgggcaatgataccaggaggcagcattatagctgttataaccgtagcttcgttactaagaaatggagcagaggttggattgcattgttaaaccctaaaagccatggccctcgaagtattaaactaaagccgttgttttctgagcttcagcatccatccatccatgtgattatttatagattgccaaagttagaatatacctgatgagcatgatcaaccgtaaagatggatcagcctcgtggaatgcatgccgtacagctaactagcatgatcgtttacttatgggttgagatgttccaaacatgcatgattctcacgtgatcaatagtcacaaatatacctaagcatcttgcaggtttgtcaagcatgtcctatctcaaaaatgaaaggtagtcaactaattcagcttggttggatctacagctgtattcagatgcaatatatacctggactaattagactcaagtcgtggttttgcccatgatgcggaacaagcaacattaatttcttcatctgaatcgcatctcttcatgaattgtagagaattctagcggaattggtggcatgcatgttttgtgtaacatttgttctaaaacttagggcatctttttaacgcaggaattttacgaaatttacacatgagtgattcaaattcctataaaattccacaggtcttaacaattttttgaatttactgctatgaaagaaagcaaaagtgagactaattaacattaggctgatcatgagaaagtgctactagttaataggatgattgataattcacatcaggaagcaaaggtgactttagaaccaaaggtacaatcaagccgtggacacacgacaagcacacacatatgcagccgttcgagtgcgagcacaagacaagcacatcccacgcatgattgattgtttggtaaagggtgaaaccctagtgcaaaggcctagagtgaggtgtcctccaatccttatcccagacagagaattatagtaactcaaaagctcatcccacatggaggagaaaggcaaaaaaaaaataaaataaaaagatcttgcattggcttaggagccttaggaggcagcagggccctgcattattgcagctttgttttgcaacctttatttagtagccttaataatccttttgctggttgtactaatagtctagtgcatctgctagtcttattgagtcttgagtgatgacaaagtccaggacatgctgggaactccagcaggtgtactgtggatggaaatcataagtcagattagttatagtgcaattgtacttgtttctgacagccgaatgcagaagtttgaatcccctcagaaattttcggcatttaaatgtttgctttttcccccccttttgtttatgtattttatgttagaaaactaattataacttgaagaaaataagagtaacaatatgtttaaccaagaggttaattagcaattttttagctgaaacatcactcaagacagtaaaaccaacatcaattgaggattgagcacgttctgtttccattcatgagaaggacctaacaacagttgatgacatttcatttgattcatgtcaatttgtccctgaaagttggaagttgaaacactatgtaacagccagaaaaatttacacttggattcatcataagccttgagcatcatgatataatatagataccgacttgagactaaataaaaccaaatacacgatgagaactatcacctaagtttacaacaacccagttgcacttgcacctatcacccacatatggttgctgccagcgccaatacaaattttcaggcttgatacaacaaacaggcctgtaattgcagtacagattattttcttgccggacagtccaccaattctcttgagaattttcaccatttcaattcgaatttgtgcaaaagggtatatgcaatacaactgccaactgctattatcctactgctctggtagatctgatgggacgagtggttcatgctcattagcaccatttgatgttctgtccatgccacacacctcaggagattttataggcacaaaagaggacttgtgtagagcagcaaaagccttatttccttcaccgttgcttcctaaacaaatggtatcaccccgcccatgccagacaccgcactggacattatttatctccaacgtccgagcctcctgttcattcaatgctagaaactgttagatcaataggtcaaaaaaacaagtaacgcatgttgaactgggacttcagaggggtttcaagatatataacctggcatagcgtacagcaaggacaaatgagatggagaacacagtcatctagactgctatcagtgccctgtatcaggaaaaaaaaagtcaaggaaaagaaacgaaggtgcacaatcagcttaatcacaaaaaaagacagtcaatgagatggctggattttctccaaactttgtgcttggcaattcctaaattgaagtgctcatatttatatctacccgtatgttgacaacataactatggcaggtattccaaagtccaaactatcaagaccagcaggatttagttttcatttgtttgagttaagcattcatagccatactgtgtgatgcaaatgaaaagaagagacaaccaactgcattaagcagttaagcactaatactaggctgcacaataacaacctgtttcaatgctttaaatgaaaaatggtaatgccaagaaatacgtaccctgatattgaactgcttcctgattcttcttcggaagtaaccagtatagattgctatcaagagaacagagctaagtcccatatacaaatatatattatgccttgtgacagaaaaggcgattaggctaaccagaatagccactaaagaaattaagtaaaccatggcctgaaacaattttaatcttctgtcagatttatgaacaaaggataatttcaagaaaattgatgcacatatgtaatatagagtgatgcaataaattccaataacattttttacataagaactgagatagcaatttatatttagtatttcaagactgaaatggctattaaatgagtaaaatattggcaagtccaacgtgcagtctgattcacagtaccatataatataagtaaagaacatctcactagaacttatcctatacagaatgaatcacaatttgaaataaaaaaagcatgatgcttatcaggctgactaggtttaagacatgccacagacatacataattgtgtaagcaaatgtagcacacattgacaagtcaaacatgtcctgcattaacaactcaaggataggactatggaaaggacgactttgctgataagggcccgcatttcaagaaactgtcagtggtataacaagagaaattacaacataaacctatggcttgtagattacatgtaaactaaagaaagaagcaagaaggtaaaaatacagaaatgcacagttcaaaatacacaagtacacaacaaacatttttttctcagccctaataggcaatacatcagtgatgaaaaaatctattcggtgtaataatattcaccagtggtaatggtacattctaaaattgactcaaagcatgttccaaataggaggttttcctagttcctatcaatagcaatagcaagtaacctcaggtggttttacatgtttacctcgagagcagtttttgaccagaatcttttcaaagaaaaagtacaggtagaaatggacgaatatggacatatgatggtgagagtgttatccttacctgaaggaagcaagatccaagattggctctccgcatgttcttgccgaacctgtagcatgggcagctgcagatggtcgcaagcaaacgacttcaaaaacatcgctcacgcaaagtttaatggtaaatatttaaatgtacagcataaaagaaaaaatgaaatattttgcagaaattagatcagaaccacagaataggcaggatgcctcatttttggggaatgttccctgacaatttatcatcccaaatatgcctgattccgagtttccaactacagatgtgcctaagattttttttttcaacagagttaaaattcaccaaactgtgacgctggtttctaattcaaattaatcgaaactgaaactagagagaaaaagtaagacttcaagcaaaaaatttcctccttcatctccatgaaccttacaactccaacgggaaaagcccaccaaattagagacaaggaatcggatttgaagctctgtcaaatttgaatagtgcgatttccagcaccgggctccccttccttcttttttttttatgcattccgaacaaaggcagcgacctttctttcccaaatccgcacaaaaatcagtcaatcgacatgaaaaattcccgctaaaacactaaatcccaagcttccccgtcgcgcccagcaaaaaccagattccaatcaaacaacagattcacgaaaacgaggaggaaaatagtcacagctccacctaccacgcggcctcgagcgcgattcgcctgtcctccaagcaatccagcaccacgtccccttcccacatcctctgcacccctcctcctcctcctccgcctcctccaccaccggcctccaccgtggccgccgccgccgcggccgaatccttcctcctctccgccgccagcgccaccgaggcgcacagcatgtcgaagtccagcaccgccatcacctcctcctcctccccctcgctctcctgccggctcctcgccgccgtcgacgcctcctcctcctcccgcgccgccgcggccattctctctccctctctctctctctctctctcctttctctctctaaagccgcttccgtttcgtatttgcctcgggtttttaacggcctaagcgcctccgattaggaggagaagcgaagggagggaagggaagagatataacacaattcgattaattaattaattgattgattaataattaatcacgggtgcgcgttagaattttttaactaactgattacatgacaggtgggccataggaaagcgtggttcgcgcgaggctgccactgcggggcccacgagacagtgagataaggtggggaatacgtgggtacgcgtaggtcgggctgccttagcaatcggtggttaaaccgggtaattagtactagtagtaattatgaataattaacacgagggggatcgctaataataatggcgcgtgattgggtggtttattagtggttggatcgggcggccaagcccacccgccagggccagactggtggtgggccatgtgggcccacgtggcagtgggagtaggtggcggcgttcctatccatcggctcgccggcgctccggggcaccaaacgtgtacctgagaatttgcgtcatgaaaggcacgtttgttttttttaagttcagccgacatgttttgcttgcgtatcctgaacaagaagttagttcttctgccaaatcaaccggaaatgaatgttcttctatcttggaggtatctttgtttcgtggttttttgcatgttcatgtgattaatagtatgcgtattagatttttcaccgaaaaagctgttttggtctgtagattactaaaactacaagggctgtgtttagttactttctaactttcaaaatttcttcacatcaaatatttgaacacatgcataaagcattaaatgtggacgaaaaaaccaattacatagtttgcatgtaaattgcgagaagaatcttttgagcctaattacgtcatgatttaacaatgtggtgctacagtaaatatttactaatgacagattaatttggtttaaaaaattcgtctcgcagtttacaggcggaatctgtaattttttttgttattagtatatgtttaatactttaaatgtgtgtccgtatacgtcaaaaaaaatttggaggaggaactaaacacggccaaaggatgttgcttttgcagcttgccttgttaattattagttttattgttagaaggtccattctgccaatcatatcttgacactgaattattggttcaaccccccctccccccccccccaaccccgaaaagaaaaaaaaagatgactttaatttgatactgcatcattgaagtctaatgtatggttcagagcgatacaagttcctgtctgtatgatcgacccgtaaaaagtgagatatgatttgccacgatctttaaaattttttagggttatgctttcaaagttgaaattcggccattaataactcatagtgcaatatattactataattaaaaccatgattatttgaaaatttcacccaaaaaaaatcttcctatatgttgcctaccaagctattgatacaaaacatagaggtgtgttgcatgctggaagacacttggggcttatatattcagacagggcatattacgtaccgtgattagaggaagtacaataacagattataaaagtaagctataaacacatattgagaagataacagatttgtagcgaactacagtacagactctaaaacacaatgtgtgtatgataggtggaacaatatattaataatgtaatatatgtttataggaaactattgtataaattgactattaaattaactttagatgatttaaagctaatagttagctatactattaaaattgctcttactccaattttattatggaagtaatgactcaagcataagggcagtcacaaccctccacctaggatggtgtctatagcattaactatattgccatataggacttttagcttatgtggtactatattaattaagagagagagagtgaatagaggaagaaactggggccctgtttggaagattagcccagggctaattttaagagctaatgtttagtcatgaattggtaggctaaacattagtctagggtggtatgtttggatccatgggctaattcaaggctaaaaggtggagagagagaggagagagaaggagagaaagagctgctttttgatggtccccgcacaaaattagccccattagcaccccttggaggggctaatgttttgaggggggctaattcacattagcttaaaattagcccacctgtttggattcttgagagctaatttgaggctaaaaggtgagggctaaacattagcccatgaaatcaaacagggcctgggtctcatgcaagacacaacttcaacacgagaacctatgcactgaacactatcaagttttgtattgggagataatagtgtcttcataatagatgaagaataaatatgattggtagagaagagaaatgatgtatttattaatggcccactttaagaaaccataagttgtaaagtgtagtttctattatgatgtcttattgacatgacaccatagacactttttatggatactatggattgtgactgctctgagcctcttggctcttgcacaccgcaaaacgcgcaacgagaggtgcacgtaattaatcaatcagctttaaaaccaagagaaagtagcacacccaacgcaacgcttctcccatttattttattttttcactccatggtgttgcttgctttcgcacggtatataatggtcggcaagcgagagcacgagtgggcgagcgcgatgcgatacgggtgaagcaaagcaaaggaaagcaaagggatgtcgtgcgcgtgccgcacgccacgaacggaaaattatgggggcggaaagcgacgccatccggtggatcctagccgtgagcgcgaagtgcctcgcttcgctgtgggcctgtggcctgtgcgcaccatccgtagtgcagcggcaagtgggcctcgcgcactttgggttgcggcttccgctttgagccttacacgtgcacggatacgcatcacgcgagcgagctggcgcaaagccgagagccgatcgatcggttgcaaacaggttgggaaaccacctcggccggggttaccatgtcccggtaatataagtaaatttaccacgtggtaactgtggcaaaccatttaccgtacaaagcgtaataacacgcagttactagcggtttaggaaactctacacttgcaacagccaaaagagttgcaacttgcaacctgacagcttgtattttgctggtactttcgttgtacgtagcaggcttcaccattccgataaaaaccggttgaatttcgcggaaaaccgatgtttcgatatggctcaaaagtagaagccatatgaaatttcgacatggcttgaaacttgaaagtagaagccgtcttaaatttgttcgaaaaatactggctttccactggatttcgtgaaaatcatcataccgtcagagcctggaacggaaagttatctcggaatcgcaaaccctggtgtgtagtataggtgagaaatgctcggtcccaagttaagggtaatactccctttttctcgttataagtcattttttactattttactagttaaacattttaagtttataaagaaatgcagtgacattttcaataaaaataaatatatttaacgtcatgtttaatgaaactaatttgattacctatgttgttaaatatttttaaaaaactgattaaatcttaaaaagtttgactatgaaaaaaacagaacgacttatgatacagaattgagggagtatatgataagcctacgtctcataataaaccaacttagaatatgaagatgaaggaagcagtttggaacacactatttcaataatatttttagggattttaaggattaaataattttatatataaaccggaaaaaccgggtgtttcgacttccaagcacttgttttgagtgatagatgtgaaattaaacgtgtgccaaaggatgtaggagtaggtgtgtatttgtagttgtctaaagagaaaaatggagagcgttattgggccgagttaactgtaaagcccgatgttccttaaagggctggcccaggtgggcgaaattaacaaaaatccatatctggtggcgagcgtccgcgcgctcgcgcgcacggcggggatccagtcagccgatggtttccgccgcggcgtgcgtggtgctgttttcgcatggggctcgaaaatgctagttcgcgggcgctcgcgtgtccgcaagtgggcactcgcatgcgcgactgttggtgcacgcattgctccgccttctgctcaacccgactagatacaaggagaagaagaagcggggaaatagaagggaggaagaacaaggagaagtggagttgataagtgggctccaccatattttcatttttactgctgtcccttacatgtgggacccacttctatttttaatttctttgatgactaggctgacagcacttttggaccaagacaattacaacattagcaaaaacgcttctcaaaccgctaaaagagttaatttgcaccggtctttaaagttacgagaggcattatactcgattttgcggttgagacaagcaattcaaactagggacggcaatgggtcaggtcgggcacgagtagagcaaaatcatgcccgactcggcacccgaccttgcccgcccgaaccctgcccaacaggattaatgggcaaaactccgtgcccatacccatgcccgacaggcacgggtatgcccggtggatatccattgggtatgccttccgccttccgcctcccgtcgccggttcgccgccctcgatcgtcgtcattgtcgcctgctgccgccggctcgtcgccctcggtcgctgtcaccggctcgtcattgtcgccctgagccgccgtcgccggctcaccgccctcgtcatcgaggccctaagctgtcaccgccgccatcgtggccctgaggagccgccgccgccgtcgccctgcgaggttacgacgccatctcgcgccgccgctccctgccgtcgcctgcccgcgccgccactgcgctgtctcttgcttgggtcgccgctgtcgttgctaatccgtgccgtcatcgctagcctgcgccgccgccgccgccatagggattagaataggagaggggagtggggaataccggaataggagaggggattggaataggttagggtttctattagttgagtatatatatgtccatagttagtgggccaaatgggccaaataaatggatataaggaataagagataggccaaaattaggtcatatatatgtatgagtcgggtatggactatccgcggacaaaaaacaatacccaattattgcccacgatgttctcgggtttcggacgggcgtgcccaccgacaaaatattacacccatgtccataccaatcgggctgggtatccgtggatatctggactcgcgggcaaaattgccatctctaattcaaacaagggcaagatatgtgtgaaccaaatagactttttttttacttggtcagtgactcagtcccatggagcaaaggttagctttgagtcaagagtgtgttcggatgccccttttctcaacccctctgcctcgttttctgcgcgtacatttttcaaaccgctaaacaatgcgtttttggtttttttgcgaaaaaattctatacgaaagttgtttaaaaaaatcaaattaattctttttttaaaaaaattagctaatacttaattaatcacgcgctaataaacctctctatttttcgtgcgttactgttccggttgggatatgagatagcgaacacaaagcctttttactccacaaaccaaaccaaccaccctccctgggactgggatccataagtcctaaaccgaatttcctattgcgcgcgtctgcgccagcgaacgaagtcgcgcgcggttccggcccagcccactacacgattgcgcagtgtcgcagtgcaggaaggtcagtaggtggggacacgcacacgttcacatgcgcagataagattggattagcgtaatcaggttttgactaatcacgatctgaattatggtgaccattctttttttcttttcgcataaaggttgttttctttttattactacaaatttcaaaaacttatacataatatttaaattttcaaataaaatttaaaaccttctaaaaaaagtcatatccaaaatttaaaacttttaacttgaaagttgaaaattttcaacttaaaatttaaatgctttcttctcaaaatttgaaactctccactcaaaattggaaaacttccaacataaaattcaaaattttcatctcaaaatcaaaaactttcatattgaaattcaaaactttcaactcaaattttaaaaacttttaactcaaaattcaaagttttcatctcaaaatttaaatactttcaacttaaatttgaaaactttcaagtcaatatttaaaaaattttaaattagattttgaaaactttcaaatcaattttgaaaactttcaaattagattttgaaaactttcgactcgaatttttattgttgtattgtgaaattactgtagcgtgtgattaaatctaattaccgtgattaacgctaatctccgtgattaacgatgggatcgcgacagggttcgttctgcagctgaacacgtggaagtgcgcgcgagtaactgaaccggcgcgtacgcgcgaattagtaatccccgtcctaaacctccttcccccggctggcggctgcaccgatggccggcgacgaaatggcctcgccgtcgccgccggtggcggcgctcaccaacgacctcatcgcggagatcttcctccgcctacccaccccggaggacctcgtccgcgcctccgcggcatgcgtctccttccgccgtctcgtcaccaccgaccgctccttcctccgccgtttccgctccctccacgccccgcccttcgtcggcttcctcgaccacaggggcttccacccggcgctccctccccacccctccgctcccgtcgccagggcggtggccgacgccgcggacttcgccctctccttcctcccctccccagccggcagctggatggtccgcgacgtccgcggcggccgcgtcctcgtcgaccgagataccaaggccgagaccggaggcagcgagaagccgttggtcttcacggagatcgccgtgtgcgaccccctgcgccggcgattcctcctccttcccccgatccccgacgacctcgccgcttcggtggaccgccctgtccgcgtccacctggaccgctggtgcgagcccttcctcgctccccacatcgaagaggaggaggacgatacctcattcaaggtgatctggatggcgcagtgcaaggccaagattatcgccttcgtcttcaattcgagcaccggtcaatggctagccggtgcctccccgagcaccaccgatctgttcaatggcgccggtctgtcgccgccgccgtcgtcgtcgtcaccgagcctagtgttttcgtcaccgggtcgagtgttctccagccgccgatacgcgtgcggctgcttctgctgggggattttgaggaccatgttgctggtgctcgacacacgactgatgaaattctccattgctgaacccccaccagtctgccttgggggaccgaccgccattgttgaggcaggggaaggcatgactgggatctttgctctccgggggagcgttggtggcacgtttgatctccactacagcatttggggaaaagaaggggcgactcgtcgcgagcagatggagaagataatcccactggatcatggctaccggtattacattagaggtgcgatggagaagcacttgctgttagccaggtcgcgaggggaaggcgaagaagatacaccagaggagccagatttggaatgcttttcactggatgtcaagaccttgcagcttgagccggtgtgtgttctgaagtactacagtttacgtactgacatatataccaacttcccgccttcgttgtcgccagaaataatatgagatggtaaatttcctgttgtatcctgattatgtctttatttttcggcatagttatctcgtggcttatgatatatatctgcgtggatgatgcttgatttattattgcaatatctgctccttgtttaaacagttatcatagcgattatagtatgaaacatttgtgtggtatggggaaaatatataaaggaaaggacattagagagatttgcttgtttgttgcgcaattatattgtacaagaccgattaagataatggggcaaatgaaggagatgatcctgctacgaactgcttagtgcttatcgtggaattcaagtagccctaagttatcatttctcttccttttagttgctttgattaggagttcgatatacttatggctgatttattttgcccttcaacatgaagctactaattttgtatgacctgtgtttggtggttatttaataattataatattcagcttttttgtctagtactctagctaggtgttccaacttatatattgcaaaccacaatgacaaacacatagctaggtgttccaacttctatatattgcaaaccacaataatgaacacgtagtggtgagtgtttgtcgtgacatgtttcaattaagttgagaatgtgagatttgatataatcaattggtaagggctaaaatgagttctgaaggtgggtttttcattcattttatagatttattttgaattactaataactatctcagctatctaacataacatgttttttcctcccctgatcaatttatgaagtgttacatgtagcctattaatagtagtttgttcctttctggttcataagtcttgaatatgtgcaatctggtctgaaaggtcttattcaatatctaatttcttgggttatttgtgtcagattcagtgttcacggtgaaagaaacactagtggagaaaccatctttgcccggtcgaccaaaaaccacaatagtctcggatgcactaaaaaccaatactaaagatggtttttagtcccggtttataagtagaacgggaactacgtgatctttagtcccggttggtaacaccaaccgggactaaagatgatctttaatcccggttcacatgctgtcaggtgttgtcaggcccctccaggatctttagtcccggttggtgttacgaaccgggattaaagatcaaaacgcactatataatccctgttacttatcctcttttctcgtccactcttttctcatccacacccactcctctctccctccatctctaatcttatctcttcccttcctccttatctcttttccttcttatcccttcccaactccccttcccaactcgatccagtgtgcgcagcaggagggggtgggcggcccggccagcggagggcagcgcggcggcgcggcacggagggccgcggggcggcggcggccggggaggccgcagccggctcagccggccggcggctttgcttagtttttttttctttttttttcaaagaatttgtgatccatgtgtagattgagatgaagaatctgtggttcattgtatggattgagatgtataatttttttttgaatctcatggtatggatctaagatgtacatgatttgtgtatgatttgtatatttgggacgtttctttgatttgggatgtataatctgtagtgtatatgattgatttgtgtatttgggatggtacgcatcccacctaatacccgggactaaagatgggagtgggcaatagtttttttttatttacttactatttaatctctaatttagtcccacaccaactgggactaaagatcgatctttagtctcgggtatttgaaccgggactaaagatagggatctttagtcccggattcatagtcccggtataaaaaccgggactataggagggttacgaaccgggactaaaaacaatttctccactagtgaaacattgcagttcttcgagctatagtgcttagcgtgagccgtgagattggtgaatgaattgagatggtatgccagattttcatattctcattgttatattgaactgcaaagcaatatcgtattcttttggtagaatgatagctgctgtggagtttccagttttagggcccctttgaatcacagggttaaaaaaatggaggaataggaaaaacacaggattctgataggaattgaagtgtaaaacagaggattgcaaaacacaggaatggtcgtttgattggagcgcaggaaaaacacaggaatcggatgagagatagactcaaaggaaatttttcaagaggttggagctcttgctatatttcctccaaaatccacatgcaatgtgccattccataggaatttcatgggatttggaaagcttcaatcctttgaatcaaatggacaaatagaaaaattttctataggatttgaatcatatgaaaatcctacataaatcctttgattcaaaggggcccttattgcatatctgctatggttattgaaactttgtatagctttgatatttatgtgtacaagatatttaagctaataattgcatactcccttcgttccaaaataactcaacctataattggatgataggatttgacctatcctggaacaacaattctggacaagcccttccgagctaggttatatcctactctaggtgtgtgttatggttctaagttactccattttggaacagatggagtatctgttatggttattgttatggttattgaaactttgtatgacttggatatttatgtgcacaagatattaagcaaacaattgtgcaaggtctgtactgtttcagcagtttgaaattactcggctgtatgcaccgatgacgctagtcatcttcgacattcacatatcgcctctaccattttttttaagtattctgatgtttgtctacttacttggcttgaatcgggatgagttcttaagtattctgatgtttgtctacttggcttgaatcgggatgagttcttaaaatctactctctccgttccataaaagaactaacttctaactactccatcctttcaatattactagaaaaatgtccgtgcattgcaacgggtgaatgctattttaattttattattgttatacggtttagttatgttaaaattcactataagaatttgcttagattttttttaaaaatacatgaattgtaattcggagtccgactttcatcttaagttagcatgtggagttttttaaaagagattttcttatacgacttcttttgtagttccaaaagcaaacgagcttaaaatccaactcaaacacagatatgtatttccaaaagcgaacaatcttaaaaacgtgggcttcggagcggtggggagctggcttcggagcggtggggaagtcggcagcggcggcgagagcgcgagcgatgggagcggaggggtgcggcggctgggcgggctcgaagccgccgaggtggacgaacccgaggaggagaggcgggtggtagacggagcggtagcagcggaggaagtggcggccggcgatgagtcggcggaaggagacgtaggcggaggaggcgcgggcgaggtccgcgggagagccgatacagaagaagatctcctccaagagctcgtcagtgagggcgggaagctgacgcggccatgaaattaataggatgccacgtcctcatcctagatggaacaatcacatcatctcacgggtgaatccattcatcgatagtatggttttgtgaaactaaactaacaaaatatatgtacttaagtgccaagtgtcaaaatatgtgtggttttctgcatcttaaaccatagaacatgtagttttgtgaaatttactcttttaaatatgtagttctatgataactttaatattaaatctatagttttataatacataatattaaatatgtatttttaataatgttttgtgttatgatatattcgagtaggcaaaatctaattcgcgcgcgctctctgttttgccttatcgcgcgacacgctcatcagccgtctgatcccacaagcactggtgcgtccatacatggcctggtgattcatggacgtggcatcatcccgaggagtccaaattggaagcccatacgatgctctacgctacgcaggcttcaaaaataattttctcttaaactaatcacccgatctacgattcgattataccgttgtgttcgtaagaattgaatctttataacaagatcttacatgattatattttaatgaaaaattaaaaattacttttataatatatctaaattacttttagatttcactaaattacttcttagacccataaaagtaaattcaataaagcttaaaagtaatttacatatattataggagtaacttagaaaaaaaagaaagcaactttatcacgacaaagcaactttctaatttcagaaaagggctcatcattacttaaactgtcgttctcttttctcaacagaatagcgaaaaactggcagtgtgtactacaacagggtgtgtttgggaggatctccggcacgtaaaacaaagcatacattagtacattattaaattactccctccgtttttcaatagatgacgccgttgactttttctcacatgtttgaccattcgtcttattcaaaaattttatgcaaatgtataagatataaatcacacttaaagtactatgagtgataaaacaactcataacaaataaattataattacgtaaattttttgaatgagacgaatggccaaacatgtgagaaaaagtcaacagcgttatctattaaaaaacggaggtagtattagcttaaaaaactttaaaaatgaactaatatgtttttaaaataactttcttatagattttttttaacaaagtgcattgtttagttgtttaaaaagtgtgcagtgaaaaaagaaggatgtgaagttcgtaaagtagacttaggtggtatttggatccagggacttaactttaatctatgtatttagacactaatttagagtattaaatatagactacttacaaaactaattacataaacgaaagctaatttatgagacaaattttttaagcctaattaatccataattagagaatgtttactgtagcatcacataggctaatcatggattaattagacttaatagattcgtcttgcgaattagtctaagattatggatgggttttattaatagtttacgtttaatatttataattagtgtccaaacatccgatgtgatagggacttaaaagttttagtcccatctaaacagggtcttaagaacacaaccctgatctgctactagtacacagcaagagggttatccatataaaaaaaatatcagcacactagcttatgtggtcatatgaaaagggaacaaactaccacaaatatgaacatttaaccaggaaatggaagtaaatatgcttattggatgacccttatcgtgtttaatcaaatttgtattagttttttttttgcggggaaatttgtattagttggctgttggatgggaagaatagatgatttgctcaatgccaatgagataattgatggatcatttgtgattgggtgatgcacaaaataagttagcagggataccgtgctaattaaggcatgtatatagcttaacaacatcacaggctacaattcggtgtggcaaagtcagtatagaaacagaatggcagcattccaacattaagagatactaacacaaataatgaaataagggctcgatagtgtgatgttgattgatgggcatgatggccgattttaactatcgctggaagaaaccctcgcgcgcgcgttcaaaccccttaaacggctgaaaccaaattaaaccgtctaaaccgggggtatccctgggtttgatcggtttgctgcgggaacccggcccaaactgcgtatgaataggctgaataaaaagggctaaacatagactatattaaagagggattgttgatgcagttgcagtagtacgttccttagaatgaaaggtcaaaaaagacattgtaaacctctagtaatcccctcataacacaaattaattttcatagttcttgcaaaaagatatggccaggaaaagagcaagcttaccgcttcatatgcttggtgatgatagagatggcgggtagccaacatacaggaatgacagcgaaggtggaacaccactgatcaccctacggacagactcaagatacttgcaacttgggtttgtgctgaactccagcgaatagcacccgcgcgcgaaactcggaggaactttcaagaacaactccctgctggtcgcacccaggatgccgaattcgtcgaaaggcacgaccatggcagtctcaaaactccatttgccggcagcagctttcccttcattttgcatctttgcagaatagatctggagtgcatagcctgcgatgtaattacggaaagcgaacatcccaatcttgccttctccttcctctacgatggcgcattccacaatgtcatggccaggcgcgctcgatgggagctcgagaactgagaaatccatcctacgcatgtcgagcacaagcagattcttcactgagtcacccatcatccagtagaagcagccgtatgcgtagctgcgccgcgacatggagcggcaagcggggcgcgagaatgcagggctcagatctccccagcagacagatgcagtggctcgccattgcccggtgactgaagagaagacgaaggcgacgagtttatctgcgcactccgcaatccagatcaccttgaatgacgtctcagccaccgccgccacgcactcttcttcaccgatcggagcgaagaaggtatcgccgcggcgcgattgacggagggcggaggcggcggctaggtcttgaggaatctgggggagaagcaagtgccgccggaacaaggggtcgcacacggcgaggatcctcgaggcggcggcggcgccttcttccacgacgtcgcggtcgagcaggaagcggccgccgaggacgtcacggacgacccagccgaggggatcaggggaagggaggaacgagaagccgaagtcggcggcgcggagcacgccgcgggccgcgggggcggacgggtggggcggctcggcggggtggaagtggaacccgccggcgccgggtgaggcgccgcagaacccgaggagcgacggcggatggagcgcgcgcgcgcggcggaggaaggcccggtcggtgacgacgcggcggaaggaggcgcaggacgcgcaggcgcggccgaggtcggcgagggacgggaggcggatcaggacctccgccaggaggtcgtcggggagggcgtcgagctgacggtgcgccggcggcgaggccatcgcgacgctaaggctagctagtagctacccaccggcggccgggttaattaggtttccgaggaacggcggggattgtggtgtggacgtttgggtccttcactccttccttccgctttattatccccacgaggccacgttctccacgaaaatagtcgaaacgttgcgttgcgttgcgttgcgccttgcgcggcggaggacacgagcgatctccacgaaaatagtcgacgaaacgtttgtgttgctcggtggcggcggcggcggcagcgcacgttcttaagagcgagtataacagtaggctataaatcggctaaatgatgacgtggagaagagaagagaggagagagaggggaagcgggttgtaaacttacagccagcttggatactagaactaagaaactctgtgagagagacaagtggaacatgtattaattgtaaagagctaagagtatcaccaacagtcctcctataatctccccccaaaaatttgtttttaggtttcctaaactgaaaataggaagtaaaaaaactcctccctccaacagatagcctaaatttaatccccgaaaactaaaagtgggtccttctgttgaactaccaacagaaattttcgtttttcccctcccacgcgcgcacagaaagagatcactatctcagtatctcccacacgcaatagccggccgattctccactgcgcgctccctgccgctacgccgccggccgatctctccacgcgcgccgtgctcatcgccgatccctacaccatccctgccatctccccctcctctatatcccccactggtgctgcccatctctcccttgatctactcgcttggccgcctctccctacacaccctcgtcgtgttaaagaaagagatgagtcctccaggcagtctcgttaagatgctattggatgatgagtcttcgtcggatgacgacgatgaatttatttttgaggcggtcgaaacaattttcgatgataacaatgaagaaccaaagcgaggagggtctgtctttggacatgcagtgattaatcgggagagattggctggtcattggagactatacaatgactatttctcagaagagcctacataccttcatgttcaatttagacgcaggtgggtaatagtgaattgtatttttttttaatcttgatttgaattagtgatgcatgtattaattttaattgctaattatttttcaggtttagaatgaaaaggacgctctttttacgcataatgaatgctgttgaagcgcatgatgattattttgttcagaagagaaatgcggctggtatcattgggctatcatgtttgcaaaaggtaacagcagtgtcacgtatgttgtgttatggaatagctgcagatgcagttgatgaatatgttcgtattggaggtagtaccgttattgagagttttagaaggtttatcgtagctgtacttgatgaagtttttggggaggagtacatgaggacaccaaatgagaacgatatagctaggttacttgcagttggagaacgtagaggatttccaggtatgctgggttctttagattgtatgcactgggagtggaagaactgcccgactgcctggcatggtcaatataaagggaaagagggagttcctacctcagttttagaagctgttgcctcgcatgatcgatggatttggcatgcgttctttgggttacctggaactcataatgatattaatgtgctccaacgatctccattgttgctcctaaagttaattacaccattaacggacacaactacactatggggtattatcttgtagatgctatttatccttcatgagcaacactggtgaagagcatccagatgccacaaggaaataagagaaaatattttcaaaagcacaagaatccgttaggaaggacgttgaacaggcatttggggtgttgcaagctcgctttgctattgtccgtgggccagttcgtttttgggatccgttgactatacgtcaaattatgagatgttgtgtaatcttaaataacatgattgttgaggatgagcgtgatgacgaggaagatttacattatgatgagatgggacaacaggcggatggttcccatgaacgtacggctgaatttaacgagttcctcgcaaattacgaaaaaattaaagacaaggcagttcacaatcagctacaagaggacctcatcgaacatttaattgctaattgatggaatttaagctaaatttatgttgaagccgaacgacgacttaaaatactagtcttgacacttttatagtactcttgctcctcgattgacatcgcacttgtatctagcctcagaagtctatcttcttctatcatcctcttaaaatccaacttttctttctccaaattaatccgttgttgttcaagtgcaagtgcagctctgtacctctcctctctttggcgctccttctcagcatcggcctctttcttcttagcccataaatgatccaaagcatcaattttggattgatctgagcgttgacgctgtttttctctctttcttcctccctgcaggtcttcccgaaggctgcacagcatcaactgcaatagggtcctctttctcttgagggacacagttctgaggacctgaaggtgcagacgtagcaggtgtagactgcacattggtcttctgcttcttatttgcattattttgacctgccttgtgaattcaccaatcaatccactttggctgatccttcaaatatttgtagcaatgcatgaactgaaaagtcctgtttttttcgtcttccttcgtatacaacagcccagcctgcaaaagctgaaaaaagaattgcaaaacaaagttaggctaaaaagttaacaaataaatgattactaacaataacatataaaatagattaattttcaccttgtcctcagcattggcaccactttgaggtctattctcgatacgacttacacaaccagcaaacgtattgagacactcttgtatagtggaccaacgatgcatgagcgaattttgggagcgatctgaactaaagtatttgtttgcatgaaaaaaatcacaaatacggttccagtacgcactccgagattgatcggcaccttgaatagcatccatactaacattgacccatgctgacaccaacaagacatcctcctgcatactaaaattcttggaccttttttggttaggtctcgcagatgcttccccttccccaccttgatgcactggatcttcgggtaatcgggttggctaccttcagcactccaattgaaagtattgccaccctcattcatcaagtttgtaaaatacccatcctccatgcttcctgttcatggcaattaattcatcacattactcaatatgtacttcgattagaaatatacaatagaatttcatgaacaataggcaccatgtaattgcattgccaaacatatgcagatgcatgtgtggtaaacgatgacacactgaaattttcattttctgagagcatgaagttatattagccacaatgacagtatgaaattattttagccacagtgatagctgcaaccaaactgctggagaactaaagaaattttgtgagagtatgaatattagtttgacagacacaaagtgaaggtcatttggcagattgctacattttcatcaatcagcattcttggcaaattaactcccaaaaatgtcatagcaaaatgatttgtatttgtagttctgatcaaacatttaaaaaaattgcattaatttttctatacagcatgtacattccaagaaatttgcactagtttgtcatcaccaatcattctaatataatacatggatgccacactttgtaatactaaacaataccagtgattacttgcaacaagaactcaggcgatagagcatttcaatgtaattcacacaaggacaatttcatgaacaagcatacggtattagctatcaattaccttgagcactgacaaaattagtcacgggcacaccaaagtagcttccacggttgaactcctcttcactagcagataatccgtggcccaaatcaacactggccgagtcgacctcgacaggatccgtcccatcggcgtctgggatggtcacctcctgcacttcttcgtcgatctgctcactgggttgacgaggcggatgggtaggacttggaggcgcaaaccctacaatggagggagccatcaccggggggcacagaggagaggccggccagttcatcccgtacggcggcagataaaaacgtggtggcggcggaatcagggaagaggaggaaacagctgccgccggacgagccgccggcgggcgcgacgccgccggccgtgacgtcgccggccgcgacgccgccgatcgtgatgccgccgcgaggggctgcaggtacaggcgccggcgggcgaggcgccgctgccgggagaggcgctgacgggcgacgcgacgccgccgggagaggcgcaggcgggcgcgggcgcggagaatcgccaggcgggagcatttcgccttcgcgcgggaacgagaggagagaggcgggagtgcgagattgggagcgatattcgcgagaaaactctcccctacataagccgagcgaggaatcgggagaagggagttccaaaactttggcaggagagtaagggatctgttggagctgttttttagactaaaatatctcaaaattagttttgggaatcagataggtggactattggtgatgctctaactattactcccttcatttcaaaatatttgacaccgttgactttttagtacgtgtttgaccattcgtcttattcaaaaaatttaagtaattatttattcttttcatatcatttgattcattgttaaatatactttcatgtacacatatagttttatatatttcataaaaaattttaaataagacgaacggtcaaacatgtaagtcaacggtgtcaaacattttgaaactgagagagtatatgaatagactaaaagaaggctaacaatagccaataggtcagctgtactgttacccttactctaactgtgggatgtgggctgccgatggtcgtgctctcaaaaggcccaactctttccggaatggctgggttttgggttggaggacgcgcgcgcacgaatgaaatggtccggtggctccgcagtccacacgagtacacgacacgaatagacaaactcaccatacatcaaccgtgtggtgcttgcctctgctgctgctccttccgtaaaaaacacaaaataacggaatgtgacccccttacaatgaatgtaatccagattatttcatagcttgattttcttttagaatgaaggaagtacaatgtaacaactgatggaccaaacctaggcggtggtcattgagcagggtagcttaccttgatctactttaaactgacatctaagagcaagtttaatagtatagccaactactgacttcaaatcatctatagctaatctaatactccatccgtttctaaatatttgacgccgttgacttttttaaacatgttcgaccattcgtcttattaaaaaaattaagtaattattttttttctatcatttgatttattgttaaatatactttcatgtatacatatagttttatatatttcgtaaatttttgaataaaacgaatggtcaaacatgggctaaaaagttaacggtgtcaaacatttagaaacggagggagtagctcattcatacaatagttaactataaaaatatactacaccattaatactcagtcctacctctcatacgcacataacgttttggagtccgtgctgcagctggctataaatctgtagcccgctttcttctctctcttctcttttcttctcgatatgtggttatagctagcttatagcctgctattgtacctactctaatggaagtactctctccttgctcgtaaagaaaatcattttggaaagcgacacggtctccaaaacataactttgacttattgtttctataaaaatatttattcaaaagtgatatatgtataattttatgaaagtatttttcaagacaaatatattcatataatttttgtattttcaaacttaacaacttgagagttattcataatttatattcctaaggtttgacttaaacattgttctaaacgacttcctttacgagtatgggagagtacaaaactagttgcaatgatggttggtttctagccatactttatcaccacttgtcaacaataattatgtcagtttaaagtagaccgagctaagctgccctgcttaatgatctcctaggtttgggtcataaggctcaagaactgatatttatattatgtcattctttatactttggtatctaagtttaaaaaacacgtgcgttatatattttaaattgtatgatttgtattattatcatgttattgccgtagcattagcataggcgtattactagttgcaatgtagtagcagaggcaagcatctcattgttgatgcacgcgagtttgtctatttagtcgtgtggagccaccggctgtcgcgcgtgcatgtgcatcaagtaaaccgcatctgccgggtaaaactggcggcgacctatgcggcccacacgcccatttaattcgcatgcgggggtgtcctccagccgccaaacctcggggatttcggcagacgatctccttgtgatggcatctgccttctcccactcaataacacaactgttactgtatcgcaagcagcaagcgctaaaagagaaacaagcggagcggtggcgggacctcgggggcactggcggatggtgtcctcgtggcggtgctgctccttccttcgccatggcccgtgtgcgactaaggccgccgatagcacgtcacgttggagggagatgaagagaggggagagactgacaagtgggtcccacatcatattttacccagatcgttacacattggcatgttacatgggcaaaagtggtaagtagttaagaaagtatatctttagagtggtaaaagaaaatattaagagtaaattaaaaaaagcatttagataattggccatgccaaatagttaaatttccccacgtatagttgtcacgggctctcggtgcacggcgccaccactgcctcctcataactagagatggcaacgggtgcatatccatcagtttctcttgccccacccacacccacgatggctaaatattctcactgaaatacgcacacgcacacctgttgcgggtaaaaaatcgtcaccatacccacacccgtgcgagtatcgggtacccatacccatataattgacctgtagcatttatagttttgtattgtaatcaaccatattagaagtataaaccgtcgatattttcttttgtaacaatgttattaacattagcgttcaaatacgagtaagaaaaaattatacaaccacattacataatcaagaaatcaaataataatttcagcttaagatctaaaagaagttttatgttatgataagagttagaatatgagcagcagtaaaaacctatcgggtgttgaatacttgaatatcgggtcccattaccatctctactcgcaacgcaaagtttcgactattttcgtggagatcgtgtggcctcgtggggagtactggagtggaagaacccaaacggccacaagaaaccgaaaccggcggtgggcagcgtcgcgatggcctcgccggcgcggcggtccgggcaccgtcggctcgacgacacccaggagttggccctccccgacgacctcctcgcggaggtcctgatccgcctcccgtccctcgccgacctcggccgcgcctccgccgcctgcgcctccttccgccgcgtcgccaccgacccggccttcctccgccgcgcgcgcgcgctccacccgccgtcgctcctcgggttctgcgcctcgcccggcggcttccaccccgccgagccgccccacccgtccgcgcccgccgcccgagccgtgctccgcgccgccgacttcggcttctcgttcctcccgtccccgctcagctgggtcgtccgtgacgtcctcgacggccgcttcctgctcgaccgcgacggcggggaaggcggcgccgccctgaggatcctcgccgtgtgcgaccccctgttccggcggtactcgctgctcccccagattcctgaagacctagccgcctccgtccgccggcgaccgcgccgcggcgtggctcccaacggcagattcgataccttcttcgctccgatcggcgaagaggagcgcgccgcggcggcggtggctgagacgtcattcaaggtgatctggattgcgcagtgcccagataagcttgtggcctttgtcttctcttcagtcactggacagtggcgagccactgcatctccctgctggggcgatctgagccctgccttctcgcgccccgcttgccgctccctgttgcgccgcagctacgcatacggctgcttctactggatgatgggtgactcagggaatctgcttgtgctcgacatgtgtaagatgaatttctccattgtcaagctcccatcgagcccgcctggtcgtgacattgtggaatgcgccatcgtagaggcaggagaaggcaagattgggatgtttgctttctgtaattgcatcgacatttatgcactcgagctctattctacaaccatgcaaaatgaaggaagagttgccagcaagtggagttttgagagtgcaattttaatgccttctcgggatggatttcgcgtgctaggtgtgactggcaaggaattgtgcttacaagtttctcctatttgtgtgagcggatgttatttgctggagttcagtacaaatccaagttgcaagaaacttgagtttgtccggagggtgatcaggggtgttcgaacttctctgccattcctgtatgtcggctacccaccatctctatcatcaccaagcatatgaagcggtaagcttgctcttttcctgctcagctttttgcaagaactgtgaaaatttgtgttatgatggtaatactagaggtttacaatgtctttatagatcttctgttctaggaaacgacttaatgcaactgcatcaacaatccctctttaatatagtcaaatatttagccttttttttcctttcctggcttgacagttaatactaagtaattagtgctatatgtaactcttctccagaatagatttttggtagtgttaaaaagctacatcctttctttctgtgttaactgttaagtactgaacaacgtgaccatactttctacatactttctacattgtaagcttttgtgtcctggtcaaagagtgttctgaggctgttcaccagggagggggaactaggactctaatctctagaggggatgtcaccttattcacatatatattccttagatgtaatgtactccctccgtttcatattataagattttctagcattgcccacattcatgtctagattcattaacatctatatgaatgtgggcaatgctagaaagtcttataatatgaaacggaggaagtatatagttatgaaaggaaaattttgatatatgccactccaaaacttgcaatcttttcaaaattctgaaaatgatgtaggagtaactacataaattattgtgttatatagcactgtacacaaaaaagaatcatgccaaacttctatatatcagtgaaaaacgaaaaaaaaagataaattttgctgcgaattgtgcaggacaatgcagatcttttgttttttctcaaacactgtgggatggtttgtatctattgtgtaacgttgtctaatttttccataacttttcataactatttacattactttttcgcaatgagggaacatccccttaggggtttgaaacattttccccagggaggggttacattcacatgcaaaattgatttcaactactagtttactagctacgaaatacttccaggtctggttattcgagtatctgggagttatgtgattattcatttttgtagttaagcttctgtggttattgaacttccgttcattgttgttgtgggcttatggtattcaacttctgttcattttttgctgtgggcttatagctattgtcctggttgttgcttgcaaatagcatcatggccataagtcatgtatcttgcagagtactgaggggatcactatgcccagcactcaacatcacacagcttgacaatgtcgcaggctacaatttgttttggggcaaagtcatcanaaacaaagcggcagcattcctgagtagcagcattcttgtttctgctgactttgccacacatggaattgtagcctgtgacaatgttaagatattacatgccttagcacagtatccctgctaactcattttgtgcatcacccaatcacaaacaatttagcaataatccctcattgacattgaatcaatcatccgttcttcccatccaacaggcaactaatacaattttgattaaatccttcaaacgataagggtcactcaataagcatcttttacttccatttcctagttaaatgttcatatttttggtaggttcattcccttttcatatggccacataaggcagtgtgctgatatttttatagaagactagtagtaaacactgcctgtttttcactgttctgtttagaaatgagaatgacggtttaagtaatgatgagcccttttttaaataagaaagttgcttatcatgagccctgacttcaactatcatgttgcttaagtgaagtgtaaagatggggttctatccaaaccaaaaacaactcgttactacagatgactacagaatacacgtcagcaattgccacagcaacttgtttgctatctatagtatcaactctgttgctgcttggatggaaaacgattaattccttccatcatgtgtagctatcatttttatgattgcatagtaggttcaactaactggaactgcaaatttgggcacaatcagatattcaaagatagcattgaattaggtgttatatgacattaatattttttttgcaacgtataacactgcatcatgcttaattatttgatctatgagaaaagatatttgaaaatcaaaattaagataccacagtcacaagaatctatcagacaagaaacgtaagataatattgtagaaagtccgagtactcttacattacatgcaatttatataggtgaatagttgtgatgacttgaatattcatgtttgtagtactttgttgacatggttatgcagtaatgcttgttccaacatgtttgccacacctttgaactgaagtgtatgctcaacttccagcataatgattttccagatagtctgaaagtgaacgtttatattgcaggcaacagcagtacgtcttcgtttcagtggttagtcgactatgagcctctcttttgtgccatgcagctggtgcaaggtagtactctctagtgttagggtagctatctgtttcgtcggcatttttttgatgatatgcatatcatgatatcgaacaccgattggccttcctgttttgttgaacgccgcaagtactatgtattcaaggatctttgttaccaagcttttgcccttggaaatgcgctggtgcttcgttggtttttcactgtggctgcactggagcaagtgttcggacgagctggtaacctattgctccaggtgcacagtgcgctacttaagtagcggcagagtataaaatcatactcctacagtttgaagtagaccaagctgcccatatttagtccagtgcgttgcagtttacggcttcatattgtcgcttatgcttatacttatcagctaaaattttaattttcaacattaaatttaaagctaattatagggttttttcattgaagcctattttttagcctttgcttttagattattaagaatacgtatataaaagttttattacaaattacttttcgtttacaaatatgctgtctagcttgttccttgaataagcgaaacaatggagccgttacttgtagtagcgtagtagcagccatacaggagtccaagttcgcccgcgaaccgcggggcagcgggcgaagcggaggcctctggctcccgccgtggcggcgtcccaatgtcccacccacgtagccgtgcatgtggatgactcgtgttgcgccttgtgtggtcacacggttgcaagagtctacattttaacatgttttttttaaaagaattgctgcagtttgaatttgtgaagacatctcataagagcaaggataattggcagagttcttatcctagtttttccaactcacttatctcgttttccgcgcacacgttttttattccgctgtggcggcgtcccaatgtcccacccacgtagccatgcatgtggatgactcgtgttgcgccttgtgcggtcacccggttgcgagagtctacacttgtaacatgtttttttttaaagaattgctgcagtttgtatttgtgaggacatctcataagagcaatgacaattggttgagttcttatcctaggggtgtttagatggggctaaaactttttagcccatgtcacatcggatgtttggatgctaatttggagtattaaatatagactaataaaaaaactaatttcataaatgagagctaatccgcgagacgaattttttaagcctaattaatctataattataaaaagtttactgtagcatcacattgtcaaaatcatgacataattagactcaaaagattcgtcttgtgaattagtccaatgaattagtccaaggatatggaatgtgttttgtaattagtgtatgtttaatactccaaattagtatccaaacatccgatgtgacatggacttggaataagtccctggaaaccaaacaggcccctagtttttccaattcacgtctctcgtttttcgcgcgcacgcttttcaaactgctaaacaattaatatttttgtaaaaatactatatgaaagttgttttaaaaaaatgtattaatctattttaaaaaaataattaatacttaattaattatgcaataataactgtttcgttttgcggccggctcctctcgttccagggatgcatgatcatttgattcgtttgccaatgacacgcgggcccttgagcgctaggatatttaataaaaaataagtacaaaacccaccgccatggcgtcgccggcgtggcagccgccgcaccgcctccaacctcccccgccggcgcagctggacctcaccgacgagctcctcgaggaggtcttcgtccgcctccccaccgccgcggacctcgctcgcgcatccacggccttcgcctccttccgccgcctcatcaccggccacgccttcctccgccgcttccgccgcctccacccgcctcccgtcctcggcatcctcgccgcgggattcctcgcggcgcagccgccccatccgtcggccgccgcggcccgcgccctcgccgaccccgacgcggccgacttctcttgctccttcctcccctcccgcgaccgctggtgtctccgccacttctccgacggcaggtacctcctctccgccatcccggaacgcagcgacccggctcccgaccaccgcgccttggtcagggaattcgctgtctgcgaccccttgtaccggcgctacctgctgctcccacccatccccgatgacctagcctcagtagtaaatcaatcagagattgtgaatttcgagcccttcctttgtcctgctactgaagatgaagaggacacaatgttcagggtgatctgcttggctcagtgcgaggccaaactggtcgccttcacctactctaggtgttctgggcaatggcatgctgtggagttcgatggctggagagatttgaccagggggactagcaatccgtttccatccggtgagcctagttgtccggacggtactacgcgcacggatgcttctgctgggtgatgcattgggtgaacaagttgcttgtgctcgatgcccgcagcttcgagttcagctctatcgacctcccacctgggccctcatcacgtcggatggtcattgtggaggctctggaagggaagctggggctctttactctctgcaatgacaatgccttatactatttcctatggtatgacatcttggaaaatgatgatgagggcgcgcttcagtggtgcatgaaggagattataccactacatgaaaattttaactataacatcttgggtgttgctgggggatacttactcctacaagggtttcctcatgactttaggccaaagaaactctgttttcactgaatctcaggacattcaagcttgagtggttttgtgggactacatatgccatcatatctccggacatgtacgctggttttccaccaaccttgtcaccaccagctatttgaagtgggtatggttgctttccatctttgtttatttgtggaagaattgcatctattccaccatatcatattttgcacacaataggacactgatatgatgcagataggacactaattgaacttcattttgtttttggtaagtatgtttatgttctttctagttgatcacaccattgcagtagtcagtaactcagtacctttgtaaattttcattgccatgtccatataaactcctttattgagaaacgcctagggatcttccggttagctccacaaggtggtggactggtgggctagacgacctgggttcgaagcctcactccttctaattatttgatattaggtccttccgtaatattcgtgcttttttttatataaactcctttcttgaggtagaaaatgcaagatgcatgtctttttcccccttctgaacagttgtttgagtaatgatgggcattactatggatacaacctaattatcttcttccagcagtcacaccttatcgggtgtctgtgcctggataattgatttgtgttgcacattgctctagcttaggtgattttcagtttttaatttttccatgctatttagaagcttgtcaaactcgagaaatgaacaatgatgtgctcttgtctgcatctttttgtgtgtttacttgtttcggttttgtggcaattctgttcatggtagaacgcatcattttcatctccaagtaccaacataacacttccagtgaatctgagtaaatgttgatgaactactgtaccatatngtaggcgaaannccaaggccctg

SEQ ID NO: 5086 - DNA, 876 bp, Oryza sativa
cattcagcgggaaagtgccctagaaaccaacacttttagtttattttgtagataaatgtacctctgaaattcatggtggtatgagttataaaaccttagtggtggtgcattgggttttaaactctagcattctcacgagtacctttctttctccttattaaagaaaggatacgcagatctcctgcgtgttaaaaaaaaggaattacttgtgcaaatatgataaaccttgtagcctagtggttacaagagcctcagtagcacctgaggtcctgggttcaactccccatgggagcgaattttctaggatttaatggcgttgtgctttcagtggtaggtgccgtacctctcgacagcgagacgcctgtggtgacttcgtcaactgcaagtaggggaataagttcattatgactctctgattcgtatccctgaaccatgataccggatatttcgacccgccccccaaactattaaaccggtggaatttgactccctcgatggttttggaggtcggtttcactgatatggcgtctatttagtggtgttgactcggtcttcgttccatgtggagtcaacgtgatgcttagtgcattagaattaaaaaactgcgtcaactccatgtggaatgaagatcgagtcaacactgccactaggcgccacgtcagcgaacccgtcctccaaaaccacttaggatagttgataccggatatttcgacccaccccccaaactattaaaccggtggaatttgactccctcgatggttttggaggtcggtttcactgatatggcgtctatttagtggtgttgactcggtcttcgttccatgtggagtcaacgtgatgcttagtgcattagaattaaaaaactgggctgcagga

SEQ ID NO: 5087 - DNA, 37080 bp, Oryza sativa
  unsure (1)..(37080): unsure at all n locations
ttgtcaaaaacattatgaattctttgaagaatcttggattctagagatagttgcattcacacatttcttgctattgatgggcttgttgagtaccatttgtactcatcccctatgttaattccttgtatatagatgttgaatcattagaatctgttgaacaagaatatatggctggaagtgaaggaactcacgttatggatgacaaccgggaaggactctacgatgatgctgagattgactatgataattagtgtataatatgcatggttcatatagttgatgtagtggtgatggtagtagcagtggcagcggtagtatttgtagtagtagcaataacgttaatatgagtagtagtaataactgtagcagcacttgtgaattttctagtgtgctgtatatttgctgagcttttggggtttgtatattattttgttgttatcgctcgaggcttgtcttgagctgtatctattgtactgtaataaccggaaccaatgcgatgtttctgctatgctactctgatgtgcatatctctgagtaaacgatgtctatgaagatatatgctatagacttatattctactcttgttgtggaatatgtgggtcgtttcaggtggtatcagagcattgttcgaccttaggccgtaagttagttggagacttgagaactctaggattggttgagattgccttgtaaaaaaacatagattactaaaattatgttgcaaaattttcttattctcttatccttacttgtgtactgtttttttaaaaaaatatagattcccttgattaactataagtgctaactagtttgttggactgggaaatggaggttcaggatattgaattgccaaggaccacactgactcaaactagacaggtcgacgactttcatagtacatgggttagataccttgcagaggttcaaaactccattggacaaactgagagaactcaattggagattcgcatgatttatgaggggcctggattgctgttttatgaagcacatctaactttagctcctatgcatggattttaactgcgtgagtttcatggttacaatagtgaggagagttctggaaatacttttgacaaggattattttccttccatgagagagcgacgtttgactgatactacagcaccagctcgtcgtagtgctcgactgcaagctagagagtctcagtaatgtggtagtgtaggaattagagggactgacttttgggaatggctggatattatagatggtttattaaagatttttccaagattgctagacctttaactcagttacttagaaaggatgttaaatttctatggacagaggactgtgaagagagtttccaagaacttaagaacttaagaggagactcacaaatgcaccaatgttgactttacctaggatgggtatgaatttcactgtgtactgtgatgcatctaaaacaggattaggttgtgtattgatgcaaaaccagaaagtaattgcttatgcttcaagacagcttcgacctcatgaagtgaattatcctactcatgatttggaattagtagctgtggtatttgctctcaagatatggcgacattatttatatggagcaaaatgtgaactgtacacagatcataaaagtttgaaatatatttttactcaaaaggatctgaatatgagacaacgacggtggttagaacttataaaggattatgatctagagattaattatcatcctgggaaagcaaatgttgtagctgatgctttaagtcgtaaagcacaagttacacagattgtaagagaggaaaacatgcctaaagaaaattttgctagtttaaaccggataaatgttgaggtaattcaaggtccagctacaacagtaataaacaatatgatactggaatgtgaattgagtagtcagattcaagataaacaacaagatgatgcatatattcgagaagaaattcaaagaattaaagctggaaaattttctgaattcaaacttgatgataaggaactgttatggtacaagggtagaatctgtgtgcctaatgttccaaagattaaggaattaattcttagagaagctcatcaaaccaatacactatgcatcctggaagtcctaagatgtatatggatttaaaggaaagattttggtggagaaatatgaagagagaaattgcaaaatttgtatctgaatgtgatgtgtgcaggagggttaaagcagagcatcaaaacccggcaggattattacaaccattacctattcctgagtggaagtgggaacaaattggtattgattttatcacgggtttaccgagaacaaagaagcataatgatgccatatgggtaattgctgatagacttaccaaatcagcacatttcataccaatacgacagaatatggatactgacaagttagcaaaactctacttagatcgaatagtaagccaacatggagttccaaaacgaatagtgtcatatagaggatatagaggatcagtgtttaccgcaacaacggcgaatcatcggatcccgcaacaacggcgatctacatcatctaatcggattccgcaacaacggcaaccctcatcactagcccacactcacaggattcgcggaagtccttaagcccgcaggataaagccattaagaaagaactactaaaccagcctgtcccattccaggtcatatggtcgacacgattgctacggcgcttgcataccttgcagtagttgttaattaaccttatgatgttaagcatatacagctgaaccacacaacaaccaagttcagactgccaattattaagatcaccaaagaactgatccacagatccacatattttaatttgaatttttgcaacaaatatttgtcaaaaacattatgaattctttgaagaatcttagattctagagatagttgcattcacacatttcttgctattgatgggcttgttgagtaccatttgtactcatcccctatgttaattccttgtatatagatgttgaatcattagaatctgttgaacaagaatatatggctggaagtgaaggaactcacgttatggatgacaaccaggaaggactctacgatgatgctgagattgactatgataattagtgtataatatgcatggttcatatagttgctgtagtggtgataatatttttaaaccaagactaatatattataaaatttatccaattatagatttaatgaaactatgctggtgttgtaaatattactatttttttctgtagagttagtcaaactcaaagtagtttgactttgaccaaagtcaaaacgtcttataaccttaaacggatggagtacgatacatatccatttcaacgatggattttaaaacctgaaagggcaccgttcaatacaaattaaaattaaagtacacacgtctacccgtcgtacacctggtttgcaatagcttcacggtaagccgacatagctgcctcgctgttgggtgagtcgtaccatgtgcgtaggggtggcgcctgtggcacatgggggtacccgttgtacaatgggtgatgtgtcataaagtggaggtcgttactatcaatcttaaagttgtgaagagcaaaagtagcaactataatctttgtctgagcatcagcctctccaaataaaggaattcccgtaagactctccactgactcttgatcatcccaaaaactctttcagttgtattacgcaagctgagtgcatgtagttaaaagtctcttcctttccaactgggggtggagctttgtcgttatcgaaatcatccaagtggtatagcacatgtggatacggcggtaggaaaccgtacctactgggataaccatagtcaacaagcagatattttcctggaaattgaagaaatacaagtgtacgcattgggcacaagtgcatatttgaacttaaattaaaatgcaaatgtcaaagtttgaaaagattactaacctcatgacaaccttggaaacgcgaagggataagatcgcacagcctctgatagcactctctagtcgtggactgaaccaggccatccagcacctacaaacgtaactcgttcatcccaaccaataacggtgagcacattccttgaagtctcgttgtgacggttcccgtgtacagttgaagttgaggaccgcacgagaagaggtatgtgcatctcatcaactgcaccaactgcatcacagaaaggaaggcaggcaggctcttgccctagacggtaatgttgagcgaagttgtttggatcaacacatttgatgatgtcggctgccattgcatgcacaacattcaataccttgtgaaaatatctatttaccgtggcattgcaacgaaccatcctattgttgatagccctcacgaaatagccacctgccatagagtacagaaacattccaattccttccatagggcatacctcataggtaccatgcagatggtacctgttggtgagtagattatagagagcatgaatctagtccactctcatgcgaaacatgttgtggcactgctatatatgggttgcccatctccacaatccattttgttccgtactactgagggacacgtcttggagctcttatatgcacattcctttgaaaagaagcagccaacaactcaataattgtttcatcctcttcaccagtgtatccatcttgagactctgaggtgttctttgaactgatactcatcctcctaattcatcaaataagcaaatagaggttgttatgcatgttatgatcagtgtcatataaaactagttcatttgctctaaaaaaagttaattagaaacacgtaaataattaaactgaagcaaacaataaatttaggttagaatagtaatgaagacaggaaatttggttagttcatgtctgcacaagttcagctcaaatgttaataaattacaaaatattaaatttatattaccataagcacaacaaataaattgtagcacaaatacagaactaaataaattattccattaaaccaagcaactcaaatatcaaatgcaatgtgtgccacattattcatacatacatacaaataaacatgcatacaacgtttatcacaagtgttgattttaaaatcgaacacattattcaactatcatcacgatggaataaaaaggttgcttgagcacacttgagctttagcctcctgcagcagcaaacatcagcttttgcacttaatagcagctagcactcaactgcaaactgcagctcacaacaacagcacacacctcacagcatcacacacagcacatagcagcacactcccatcagcttcggcatacaacacacagcacacaacgctcccagcagcagcaacactaccagctccatcccccatcagcacaatgttgcaccatcagctcccccagtgccatcatccccagggtcacccccatcgtccccatcaaaccctccaccaccaggtggaaaccaacctcctgagcatgatggtagagggaaaacctccaccattaggaaacttcatggcatagtggaagagaatgtaatactcacgcatctcctgagtaatggcatcaccaaggaataactcgtaaaagtaggggtcacacttgatcagcacaatgcaagccctagcactcctcacctcttactcccgctgcttttgtgctttgctctcactggacttaaccctaagatttgcgagcctctacaaagcctcacctgtggagtcactgtgggtctttttggaacccctagatccactactcggtgttgccacacttttgtccctacgcctgataagccttgatggtggctcagatgatggtggcgactccgacaagttgacaaggtgctaaacatcaatgacaccagggttggctggcagcagctgctattcaggttcagctacaggaacacttgaacggttgccgacaacagtcctccctctgaaaacagcatggtgttcataaatgaatctgacatgaccacgcataaatgatcttgcccctctcctcatctgcatgtgagaaaaagagatatataagaggttgaatatgaagcacaattgcaaatgtattgcataaatgactgccgccgacatttgcatatccaatagcataatggagcaaaattgtgttgcagcaagcaaggacaaagtagacataccaaagttgaaaaaaacatcaactacacagcagttgtgcatgtttcttttgcataaccagaacaaaactgaaggcacaaacatgaatcacccaacagcagcaagcaaatatgtgtaaataaaccatagaatccatattgttgaagcaacaagctcacagtagcagcatgtgcagtccatacacatatgcagtgtgcagaccatacacatatctctactacttaaaaaattcgtagtggtggtcttgattcctgacatagcagacgcatctgacagacacacgtaatctcaaccatccgattgccatatccaacggcgtcaatcttctccccatcacgcgctcgctcctctcttgaatcgatctcctccccacgcccactcctcctcctcccacgccgcgtccttcgccctcctccctgggcgacgctcgccccgccgccgcatcgcctcctcaccagccacgcccgccggcctcctccgcgatcgccgccgccctctccaacgcgcctccacctcgcatcggatcgatcatccaccttcgccctcctccctgcgtcgcctcctcgcctcctcaccttcacacctcgccaccgcatcgcctcctcagcagccccgtgccccgcgccccgcgtcccgcgccgccctcgaccgccgacgctgcgacccgcgccgtctcctcgctgccgtcgccgcgccccgagtcccgcgtcccgcgctgccctctaccgccgatgcgggagcaggaggtcacgccgcgtcaacaccgccgaggagccgcttcctcgccgccgtcgcgacgacccgcgccgccctcgactgccgccacctccgcagatcgccatcgcacgcctccgcctctcaaggtcacacgctcatcgccgcccgacaccccgccgattggggaccgaacgctgaccctgcatcgacgccacaacagtcgacagaggggagatgttgaagacctcactccaacgacggctgcgcgcggcgacactaccaggcactgagggagagaatgcggtgcgaggtgcggcggggttgttcgtccttgcccagatcaatgccgccgccgatccctcactcgcccctcgcccaagtcggcgccaagggcggggttcgccaatctgcttcccagccgcctcgcccgctccatgggagaggtgacacctgtgcccgcctccagcgctccatgcccccggataccatccgagcacgatccctccttagcttctgccggagaagggacgcatgcgccgaccttcagcactctacgcgccctgtggataattggttcgttctctttacgttgcaatccattcatttgtcaagaatcatcattgtgagtgccgagggttattacagattgcaggatcactaatgctcttttttgcccataaggtgttcaacgaaatgctgcttagccaatgtattaccagaaattgatttctctgtaagtgagaatgtcatattgtcatgtcccctatgttgttatttatactaatgattgcaggattctctctgttgttatttatgctatgaagtgctgggaagttgagagtgttgctaccaagcaaaaagattcaattgatctgttggagcaaactaatttggatctcgcagtctcaaaactaatctggttcttgattgtttcagagtggatgaaaataaaaaatggaatgatgcagtgaagattatgtaagcaatgttcgtgatatatcgatcctgaaattctcatagatggccattgcacaaatacaaaaatttgcaggttattaattagtgaactacatctctgtaaatctgcataacatatgttaaagctagcccaagaattaatatgttgtaaatctgctctacagttgacactgcttacattttctactattaataaccctcagctgtgatagatctgatacctgcttaaaaatttgagctgagttttcatacctagcagtaggactaacattttatgttgtattgttcagctcaagatgaacaaccacaccaaccccaagatcaccaactaagcctatcctgcttcatgattgttgctgcaaactccaacatgcttgctgctggtgcaatctgagccggctggtggcagatgggagcctgccctatgttgttagcagctttcttcactccaagtcatgcttgctgcctgtggtcttggtagtttcttttttgtgttgtcaatttaattattatgatttcccatgtgctcggctattggtgttcttgtttttatctgttttgtttcagggtgtcattactatggagtagatcatttttttcttattttttttaatgccttgtaaaataaccaactagcagggatgttcataaatttctcccttttgtttggtttttttcagacatatatatataatgaaggcatatatacacaaaaggaggagctgtttgagggtctaaaggacaatagctcaattgactgggaagctgttgtcatatgctgagagcaatctgctaaatgttaaagaggtgcatctaacttttgtacccagtgaactgcaaatctgcaccttcatttttgattaatagtttctttggattcagatcaaaatagctcaacatgggaatttttctagcagaggatgggcaattcttggaaaatactatatatttcttgtcgttgaatatgatcatgtcccattattttggcacttgctgccttgattctgttgcctgtcccagcccttcagctagctctctatcacacatgaatgcgtgacccttgatggttgtatgcagttgggatattttggtgagttcatcccccttccccaccccacctctctctctctctctcaaaaccatcatttatcttcactattgacttacaatttcacttctagctgatgatgatcaatcaaagctagctcatatgtattagtgagtttatgaaaaaaaggatcagatattcaataacagagtcagctccttccgaacgatggcaaaatggtacctttataattttacttctcaacacgcacacatttttttatgacgagtttgaacttttgttctccttgtcagattttatctgaagcaagtatcatatacttctgtattagaatatggacgcaatcatatatctcctaaggtttagtgcatactctcatatttggaagtgaataccaaacgtgtatgaaatagtgcattcgatttaatctattctctcttgggcatttattcgcaaatgcaaagatttttgtaatttgatcgtagcatagattatggcaaccttggctttgtggtttgccatgtcatgtactgatatatgaatgtgatgctttaattaacgttgaaaagccatgaattatgtattcgaacgaattgattggatgtgtcctgaaatcggttcagactttcgttctttgggtactggcgtgagacggggaaaaagacgctgaagacatcaagcataacatggagttgataaaacatcgtcgactgaatcatgatttgtagtttttttggattgccagatttttttcagtgttcaacaaattttcactcaataattatttaatatcttttcacttaatataatttgaaattgatatatagcatttcccgttgcaacgcacgggcaccttactagtgtcacaagaatgtacatatgccacaaagtcctaaagtgtaattaaatagggaggttatccattgacctatgttgcatttgcaaaaccaccccataatgaggagtgaaacaagatctaaacattgtgaaaagcattcaataatgcatagcatacagctagttacagcagcagctaacttaagaataaagtttgcaaagataaaatgcaagcagcagcaaacagcaagcaagcacacttcatggcatttctatatgacagtagaagaaaaacgaccaaaggcatgcaaaaattctttaggtgtactatgcataacaacaacagcagacaacaaatattgttcagtggtaatgcatttcaatattttaaagtgcatgtaccttgcatcagtaatatgtaatatggtttgtttgtattaaaaacatcacaagatggagatgtaaactaaagatatgaggttttttagccaatcacaaaatgctctaatagtcaatgacaataaaatataactatagctaaatatgggagcaaccactattgtaggcaaagaaggtgatagttaaaatataccatgttgggagtagcaggtgttgtacatgtgttcatgaccttgtataaattaattgagctcttgcatgtactctattgcataataattaattgaaagtagtgctacgtattattcaaaagaaaatttggatttgctaagttatgaagaccaattgtactctagttggaagtactatatcatatttcattaaaaaaaatagcaaatttatcatctatgatggctttaggttttgaactcatataaatgttttagttttatgtccttgtagattctcaaataatgctactttcatttatcataagcatctacatttttgtatgagacaacataaggaaacctatgagatcataatgtactaaccttggaaacacaatgtgatgtttccatcaatataattaccatgatctacgatgactttattcattgaaaaatccatatgtacttcctccaatgaattctacatttctcgatcacacatacctaacttaaaatttgattacatctaattaaactatgtattctactctgccacagccaaaaattagttaacagctacatttaatcctaggttgagagatccaaatatgatggttttttctacccttatgtgaaaatgagttgtcattacagcaaaaaggagtactgtgaggacttaccccttccattgattcccaccactctgggctggcgccgatgctgccagtgtaggggttccttcctagcccagttgccatagattccagccatgtccatgtctagaatcggcggcggcaaccatcctagaaattcttcacctgctgcctgctgcctagtgacctgctttcctaccttggccagcatctaagcttgcgagttggcatacccctgagctttggggcaagacgatgtgatgttgcgagctgcaatttcctccatgtagctctctaggaacgcttgcagttcgtccttagtccagtgagtgtgccctccgccagccatctaaccacacaagttgagcaaacagaaacaaacctcagaaactcaaatctaggtagtagttacctttcttagtttgtcggatttgaggaggtcccaatccaacgagcgcacaaccttctccggcgtgaggcagcggatgaactaacagactgcttcagggttgttggcagctacggatgagagcgcacgagcgatgagctccacatcgtcttctgcagtggctccagacacaacgtcgaagatgtacaacttgctagaatcttggctcgattccaggtcagctgaaacctctcccaacttgccggcgtcaatgggcgacactaaagagggggaggtacagaggagaggttgaggggatggacattttctcttgattcctcttgctgccatgatcaactacgaggggtctaaaataggcgtcggcggctcttcaatggcgcacacaaatattgaagccgcgcgtcgacgattttacctaggcaaattttgctataagacactgccaatgtgtggttttagccctaggacactgccaatgtgtggttttagccctaggacactgcccaaacttacttttggaggaaaacacttcataaacgtggtaatttgccaatggacaccgcaccaaataaaataataatttctggttgaagaggagagagaaatcgcgtgaaatgtcaaaaatgcccttgggcccacatgtcagctatcttctctctctttctttttctttctcctatcccttcttcttcctaccgatcgggaggacggccgggtcgctgctgggcgcgatgctgatagtgctcttcgtccgccgacgaggttctatccaaagttccaaaccaaaccaaaccatttcccccttgtagattcaatccagttcttaaaaccattcaagcccattctaattccactgcaagccaagcgaagaggagtagttcatgttgaggcggaaagtggtgacgcccgcgccgaacaccccgtcgggccccgtggccgtgcggcactggaactgcatcatctcgttgccgtcggcgccgtaccgcgcggccaccctacacccacaccagccgtcaccgccgcagccatcggacttgccggcccgccgtggccgctccaccctcgcccttccaccgccgccgccgccgtcggacctcgcctgcccacctacgatgccgtgctaatgctgctcgtgcgcgtgtcaccagtgaccgccgcggtctatcgcagctgcagcgtctcggcgtcgggctggcgctctgtagacgctggaaaggggatagagagtggagataagagagctgacatgtgggtccaagggcatttttgtcatttcacgcgatttctctctcctcttcaaccggaaattaattattttaatcggcgcggtgtccactagcaaattaccacgtttatggagtgttttcccccaaaagtgagtttgggcagtgtcctagggctaaaactacacattagcagtgtcctgtagtaaaatttgccttctacctactgtactacacgagatcagtgcagagatcgatcaaatcagctcacaaggctgcaaaaatgcagcaggaatcgctgccaggctgcagcaatggatgttggaatcgctgccggcaactgcgcacaccacgcccctttccacaggatgcggtctccgaggggctgctcacgagtcattgatgtcacccgcgtcatcgcccggctgcacgccactgatgacaacgagcaacgaattcagctccgcacggcacgctgacgctctcctcctctgcctcgacaatcgccagtcggtagtatgcactcttacgcgacgtgtggaaaggggaaaaaccggtggacaatggggtgagctgctccttgcgatgggatcacgagagagcgctagaaggagaagatgacgcggtgacgaaggtctgacgtaaacgtcatgctcacaacggcgttataacccacgtggacttttatagtatactttaagcccaacacaaaattctgctacagtaacgactcccctagcccatgtcagcccatccaactcgccactttagagcgcacccaaaagctagattgctccctagctgggatgacagctgaaaactcctgaacgacaaacagctggtcaccaacaacgccaacaaaacatgaaacatatagcacgaccactacaacagtcccaaatcatcaggcagccttcccaccatacgaagttgcttggccttctgcatctatttgttatagagcaaattcaaatgaagattgtcttttcttctttgaaaaggattctccatctttgcatcagcgtgatcaacatgtaaaccaacctgcagaggaggataaatattagtgacaaagaaatgagggatgtcaagattactagttaggtgactatttagggataaaaacccatatccgctgtatcgatgcactgattgtacgtcttctgccaagcgatcgaaggcagactcaatacgcaccttctggaatctaacgatgacattgaaaaaggataattaattggccatgatttgctttaggattttaatttgcaagaatacttgttagctgtaaccaaaactattgagcaagaaacacatgcgagaacgaaattgcaaagtgagagagtacacagaggtttttggtgctgcgtataacttgcaccatatggccttacatctgtggacagcatcttgtagcgacgaatatgcatgccatcccaggcgttagagaatcatgcccgcgtgatgctcttcccgtgcgaatgaatcgtgcatgtagagcccaacggcacacaatcgattcattcatgcacatgacttgaacagaaaatatgcaaaaagaaaggagatggggagattccaaagtaacagaattaacaaaacaagcacccaattaacttcattcctaacaatactcattagacgttagcataacaatgttgttttatgcatcagcattggtacgtagcaagaacatccagatcaatcattcatgttctccatctggcactaaacactttacatctaatcagccctaggccatgtgtctgtagcatccaatgagaaaacatgtggttgaatagtataggaggagagtacactgcgtaacgtggatacgctgtattgagcctcaaggggctggtatatataggagtacatgggaaggagataaggaaggattacagatatgcaaggaatccacacaaatcaatcctgtcctaatatgactctaactaccatatactctaacatccccccgtagtccaagcgtgagcaatgcggacacttggactggagaagaaacctgcaagagtactcaatatggatgatatccctttgtgccatagtcgatgtagccaaagcgaagggtgcgaggaagctgtggtcgatgaatccgtgcgtagagtagccatggttgatgttgttgaaatcgggtgtgctgatgttgaggtagccgagccgcatcgcccgcaaggggtgctaaggagtagtcatagacgcacaggagggcgtcgtggaccaaggtgcacgagaacacgctggagacgaagacggtgacacaatcgcggcagtcgttggggaagatgacgccgaagagtcgatgtcgttgaaccgtgaaggacaagacattacgccgggtttgctagacctgaggacaactcgagttgaatgcgtgcaacggtgttgccaatatcgcgtgggagatggtaggagaccaccatcaatctatgacaatgtcagaggagactagcagagaaggcctccgagacggttgcgacacgagaatggtgtagagggagaattgccggagcaacatgcagttgttagagaagagtgaattgtagtcgaggaagatacggcaacgttggcaatgagatatgctagacgaagaagaaggtgaagtagcaggaccaacagtatggaatgacaacctcggtagccgaagtaggggcggctgaaccactggcctagagtggcaacggtagcagcctggagatgcggcggcgaggctcgaagtaaatgaagaagaccctgagcggctgatgatgaccagtgcggacaacgaggttgtcaatgcgcgaacggtgatgaatatgacaaaagcagcgaagctgtggtccaaagggacaacacagttgcagctcttatgtcgatgcagcagcatgaactccactggcggtgaggccatgctgaggagggcgcctctcagcattccaatagccaatggaggtggaccacgggcgatggcactgcagcctgagggggggatgcagcggcaacctgaagcttgatagcgtagatgcgtgcttgatgacaatcggttgcagaagtcattgtagccgagcacttgaataggtgatcaagccgaacatgcgcggggcaggacgacatagaggaagccagagccgatgccgatgtcggagacgcgtagatatcgacgaggcggtggacgacacaaacccggtctctgatcgggagaaaaaaaaggtatatgcaacagcagtaccacagcaatcaacacggtagcaacctcctcacaatctgcactatagcagcctccccacacagttgatccagccaaccattggttaaaatccccaacttgccaccccttctctctactcgtgccgactgttgaggggtcaaagagaaaagagagcagggaggtggcgtggaggagagcaaaggtgttaacacaaaaatttggtaagccccgaagtcatcatcggcctagagtcagtatcggtttcagagtcctggaatcagccaatgggcactatcagtcgccagtagtcggattcttgatgggttcagttaaggaaattaatcaattaagggaagtttatccagaagagaccgagttcaaggaggatgtggcttggaagtttatctattaattaggaagagtctgttagtttccttttatctttagaaaagtgtgtttagtgtttgataaggactttatgttttccttttaacattaggaaacaaattctcttgtccaataagaactagtatctacccatgtgtataaatatgtacacccggggtcattgtaatttatctctcgatcaataaaaatactcttggcgcatcgccaccctcttttccgaggtttttacttatcaccagcgaaacttggcacctgatgcggggttgcatcagctttcgatctccggtgaagaggtaagtcctacgttccaccggccttggcaattgtatccactacattggtgttgttcaaggctacatcgctttgacctcttggatcgctctggttcggttgatatatttgcctacctacctatcacatattttagttaatctagtttgacagctcaatttacttgtatcggctgggatctgctttagggtttttgccggtatcggctaaattgctttgccatattggattagctaaggtatccaccactattaaaaatcagtcaagggcttgattgtttagatattatgtttattttcatactttgcacaacatcagacctagtcgtgtttagaaccataatctctaccctgctttttgattgccaataagggtttcatcgtggtttcaactgatgagttatctggatgttgcatcgattcacaaggattacatacaagttggatttagcatgcaacaaaggtttcattgtttatctaatcatttggatttaataacatcggaccttcagctgatgtatgctttaaccatcatatcacttattctatcatattattattagtcgattggtttctactggattatattattgttatattacattattatcagccgattgtctttatatcattatctacattggacatatagctgattggttaaaaccatatagccgattgtctttatacattatctacattggacatatagctgataacttattagccgatcgactcttcggtgatcaacatatttatctatcttatcagttgcaagatcaaactggctggcacgcccgcatctcatcaagttttggacttgcactagagctaagcagatctccgaggctgttgtgttcgtcgacttagttcgcaccaacacagatctggcatcatcgaattagcatgcatcccgccacctaattagtgtgtaattagcacatgtcagttattattgtgtactagtaatatgcctgtacaaatgctacggggtggcgtttgataactcaaactggcacaatgacgtttgacattttaaaggcatttcatttccgcatagaatggatgctattaaggttcaagcaaaaagttacataaagagttatgccagtgacaatcacgcaataccgcacatgtttcttctggcgtgttgtacaaaatcaatcaaatggtagttgtcagcaggatttgaatttgtaatttgtacaactcgggcactaccataatgattcgggaaggattttgaaaaaaaaacaggggggggggggggggttcatgagttatttgaccattggttgcttagacaagttacctacaatgttattcttatcaagttattggaaccaagacacaattttattcaatagtcgctaccatttcacatatatacagtctaaatctatgaccttaagaaaataatattggccccgcatatataaatgcatgaataatccaaatatatctaccctgcaaattacatataacatggtccaatgacatcctaaatgcagcaactaaattcagtttggatgtttcatcattaactacacaacttgggcactaccatataataagacagtcatatttattcacaaagaaggattctgaaaaaaaaaaaggtggttcatgagttatttaaccattggctgagacaagttacctacaatgttattcttatccagttactagaaccaagacacatttttattcaatagttgctaccattttccatgactgatttttattcaatagtcactaccatttcacatgtatacagtctaaatgtatgaccttaagaaaataatattggccccaaatatataaatgcatgaattatccaaatacatatacatttcagtgttctaaacttcagaccacccaatgtttattaaaaacaactgtgccatttatctatttccatttcagcacagaaatataaaggcttccccccttcaatttgactatatagcaattttattgcacacattactatgtgatcttaaaaatgtaagcacatgtacttgtataggaatataaaggaattttgcttaggaataaatttagacatggttttatttttgacaaaatgttgtcatgtacaatgtacaggagatatgcatggtcatatgcatatcagtagtacctttctcccaaaattcaatgaagaaccagaattggacaacgataattaaaaaaaaaatatcaaaacagattttcagattatcaaaagagcggtaccaggaagttccacatgcaatctaatttcaaaatgactggaagaattcaagcatgaatattaataaatgtcaaaatttgatatgacgacatcaatgcatgtcactaaatttgatatgccggcagtgatttgatataagtctttccccttcaatttgactacacagcaaatctgctccacagaaattagaaatgtactactgatataagtctttccccttcaattttggtatccgaccaggcctcggtgctagctacagttgcagcccctttattttccttgacgtatatctgcaagccatcgaaatgagtcagctatttctagcattctttgtatccctcgggaatgctaaaaatagctgatttgtgtgcgaaatagctgactcaatgggctatttctagccggtgtgcatcagtttcagtttacagtgcaggggcttgcgtgagctcgaggacaatgcaacaggtacgactgcaggattattgtctgaaatccagattattgtctgaacatgggcttgaaatatatcaaaattcagtgtagaactaaatataaaaagtactaaattattttcttatagagataaacaagaagcttgaaaggcaaaacaagagtgaaactcattcttacaagggaaatttcaagagcttggtgctccttcctgcagaactctgaagcataggcctgcacaataatacatgatgctgaacatgagtataatgcaacaattcagtgtcatgttcttcacttcaactgtcgaaaccgtaaatttaccttgattgcatagggatgggcttaagaagaatgtacctttatttccctgaacacgtcctttgtagcatatgataaaactaatcagatgtctgaatgaaatgagaatgaatagcacatgcagcaactacgaacattttacttttacctgactgcttgcaagaaggccgtctggaagaaatgcatggagcttcctcaattggtccaccatcatggaaagcgctggactcaacaccagcgtctgtccacgcaaaatcattgcaagcacctgaacaatagcaccattaacttttcaacacaaaactatataacctcgaaatctcattttttgcagaacatatgatagtagaaatttgtgtttatatcaatataatgaaagatggccatgctttgttgttcaaagggcatacagtgaacatacaattaagttgctgataactgtagcagtgtgcagaaactgcgtggtggcaggggtcgattgcggactgccaccatggacgttggttgtgcgggtcgacgatgctctggcggcggagatcggcgcggtgtgcgagaggaaaggggattagggcgtgggggagagagttgtgggtgaggtgcggcggcgcaggaagtgatcggcggaggcggcagcgcagggagcgatcccgtcgatcaggaggtggcgcagggagcggttgccggtgccgccgtggatgtttgttgcgcaggtcgacgacgctctggcggcggagattggcgcggcgtgcaagagggaaggggattagggcgtaggggagagaggtgtggccgtgtgggtgaggtgtggcagcgcagggagcgatccggaggtggaggaaggaagggagacggatgtgatacgttggatgattttcatccgctggatttgatgaatgaagtacgaaggatgtaaacatcagttggtgaattataggatagatagaatagatagatatagcatctggcaacgcaataaatataggcgttatttttccacgtccttatttttttcagatttcttttattcattagtcctttttcattgtttcttttaacggaaacttttttatatgaattatttcctttatacatgtatagtttctatgtgtagattttatatatgtaaagattgtatatgtagattttatgtatataaactttctatgtgtagactttatttatataaactttatatatataactaatataaatattcgtatttttccggttgtcacatctaatttcgtcagagttttcatccatacacaatccgattaggttagcaatattgatgtaaaaaaattgcaaaaattgcaaaaaaaaaaaatcggcggccgccgacgccaccaccgcccgccgttcgggccgccacccttcctgccccgccgggccgcagccgcctccatgccaccggatatggaggaggcaaggcccggcccgccgcctccacgccgtccgggtcatcgcctccacgccgtccgacccgccgcctccatgtcgtccaccaccaccgccgccgcacctcccctccccccgatctcgcggaggggagggcgtcgccggccctcccgccaccgccgcacagagagcgcgggggagaagtggagagagtgaggtgcgagggagggcgtcatggtgaagaaggctgccgtcgccgccgctagcggtgggagagggcaccgccgcgccgctcacgatgggggagagcgtcgccgtcgccgccgctgctcgtgatgggggaggtagccgccgccccacgtcggtcgcgagatctccggctgccgctgaggaagatgggaatcgcggtagggaggtagtcgccgccatagccgttgcagctcgcggtagggcaagtagccgccgccctgcctccgctgtgagatcgccggtcgccgccgccaccgctcgcggtgggagagggaggagaatgagtttagggttagggtttcaacatggaatatatatatatatatatatatatatatatatatatatatatatatatattgaatctattctacacccttcccctagaataactattctacaccccctcctcccatgggtcaaacccacctccccaccctccctagggcccaaaacccccctcccacctcggtcaaagcgtcctcccgccggtcaaacctgcccaccactccctcccccgcccaccactttgctgctctcgtcttacaggaatcgtgcagtaacaggacggtcatcctgcagtaacaagacagcattatcgcagtaacaacgtcaaaaagtagtcatgatggatctagtttcgttaagcgtttttttatgaacttcatggtgcaaacggattggaaatacaagatatgatgtgagagatattgctctctaaagattgtgatttatctcttttttagttctcgtctcactggaacagcgtagtaacacgatggccaatatatagtaacacgtctacttttcgcagtaacaacattaaaaaatatttatgatggttctagtttcgttaagcactttttttttacaaacaccatgatgcaaatgggttagaaaaataagacatgacgtgtacgttagtactctctaaagattgagatttaaaatactctagatctaaaaaacattactactataaggccactgttactatgcatgttctctgttactgtaaatttcgttatattgttactgccaaaagtgcagtaacaaactataaagtttacagtaacaacctatacatttttgcagtaacatataatgttactatccttttgagataatgttattgccgaatcatagtaacaaggtatgattgttacatgtatataactgatttattcataaatcatcatatggtgatttggtaagaagtgctcgccatgaaccatgagatcatgggttcaagtcttgaagttgagattgggggaggatcaggaggagggaggagcgacgggagagagagggtatttttaatttttctaaaaaagagagaataaggagggagataaaaaaaagaagaaaagttgatattgggggaggatgagaaatcgggaggaagagagaagaagagggagagaaaaaaaaagagagaagaagagggagagaaaaaaaagaagaaaagttgagattggggggaggatgagaaatcgggaggagaagagagaaggaggagggagagaaaaaaaagaaaagttgagattgtgggggaggatgagaaatcgggagaagggagaatcggagggaggagcgacgggagagaggagcgacagggaggaagggaggtggggacggagggggcgcgagagggagaggggggcgcgggaggagcgacgggtagggagggaggtggggacggagggggcgcgagagggagaggggggcgtgggagggagagaggagcgatgggaggggaggagcgacgggagggagggaggtgggagggggtatagaatagttattctaggggaggggtgtataatagagcttttatatatatatatatatatatatatatatatatatatatatatatatatatatatatatatatatatatatatatctcaagcgatcctaacgttcgattgaatccgacgcctcttagcgcatctaagccgacttgggccacatgggccatgtgcacttaacaggccaagttgtggaagacattcggcccatccttatgggcctaattgagttttatctattgagttgatttaaactatttctcccttaagaaacttaatattttcctatgtttagtttttctttcttcatgttaaattatttatatctaaatggagtcaacaagaaatgtaattgtatatcaattaaaaataaataatagaatttaaatttggactaaaaataaataatattaattattttttatatggactatagcctctttcggagaatattactctcttccaatattatttattttataattcataatgtcttagtccaaaatacaaaatgaaaaccaaaatacacaaaaaaaaagtttgcagtacaggagttcaattagcttttctttcccttttcgtccaggagtgtgggtctgccccgcttttcttttcgctatttttagcgttcccactacatgattttaaagatttctatcgcacactatatttaacctaaaacaaaattcagctctcacaagtacaatgcatagaaaatcgagtatattctcacaattacattatatagattacaagaaaatataatttccgcatgacgtgtattcagacgtgtcctttgggcaattccattcatgtcctttggtcaattccattcatttttcattaggattttgtactttaaaaatatttgatttttctattcatcacttaaatttttcatcaatcactttctacgcaaaagcaatcacttttgttgttcatcatttgttcctctcttgctataatcattgggcccacgcgtcagaagtgtcatccacaacacgcaaatgtaaagtagattaattgtcaaaaacaaatatgatttgtttatcactctacatatagccgatgtttataatcatactatggtgttttggtaaatcattaatatcgaactccagtcaccccgccaattcccggtgcaacgcacgggcattttgctagtagaatttatatgtctgcaattataaagtttagtgtattaattttaatagaaatataaatgttgatcatcacaggatattttttaaaaaataaaatagctacattactccaatccaagcaaacctcgtaagtcgtgacaagaaaacataaagacttattttaaccgaagaaacaaactaccgggacattagccattaaacaaatcatgatttaaacacgtaattaggcatgtaattagctatgaggaataaaagatgaaacggtaatcgcaaaattcgcgagattcctagctcgtatactagacctaccaatccgttcgcgtctcccgcaagttcgcgcgatagacttcccctaaattttacataggcttgacctcgaagcggccaacgattggtaagttcctccgctgaaatgaatcagctctccacttttcaaccttctggtccaggaagaactgtgctgtgtcatcaacgtgcaactcctcgagaaccatggcgttctccaccaggaacttggtgagatggaccggaaaactgtccatctccttggccgtgaattccatggtcaccttcctgacggttttctccaaacattcgattgccggctcgcttacgcgctgacgcttaagctcaagatcaccttcgtccttggaagaagaacttgagcttgactcgatcctcctcccaatggagttcccggatatccttcggttgaagcgctgttcttcggacacggggtggctgtggctgtcatccttcgttgttagcctgagccggagttcagaaacagctgggcaggattggagcagcttcgccattgctgacaacgatatgggcgtctgatagcggctgtgcaggtactgtgcttccaggtggaggaacgcgaggttggggaagacggggagggcgccgccgccgccgtcgtcgagaatgtcgtcgacgcagtacacgcgcagcgtcatggccctcatcgtcgtggtgtcgccgccgccgaggctgcggaggacgcggcacaccggctcgtacttccaggtgaagaaggaaggtcggctgatgtccacgtcgacgagcgcgaggttcgccggcggtggtgccagcgagatcgccatcgggtgcccgccgtacgagaaggagaccaggctcggcgcgtcgagctggagtgcttcgatccttgacgtcacggcgacgagcacgagcgtcgtcaccgtcgggcagcggaggcggaggacggcggtctcctccttcgtcttcgccgccgagatcaggagatggacacggtccagtctgagcatggcgagcctcggcgcggcgtcgacgatggtctggaggaggtgaccacccttggacagcgacagcatgcatctggtcatcgctagatccgtcagggacgggaacgccgccacgacggacggcggcgacgagtagcagcagcagcacgcgaggtgcagcacccgcagcgtggcggcgcacggcagcgacgctagccgcagcttgtacatgccgatggtgtcgccggcgtcgccggcgccggcgaccggtagacaatcgacgcggaggtcctgcagcccggccgcggcgcggtgggagaggattgcgccgatcctgctgtcgaagttggagagaacagggcgtgccgcagccgagtccacggcgagcgagagcttcttgagggctgggtcgtcgccacggcggaggacggcggcgagggcgccgtcggcgaagcggaagaaggcattgtgtgtggggaggaagggttcggagtagaggttgaggacgcaggtccggcgccacaggggacgccacctgcgtgagaggacggtggtggcggcggcgtccttggtgtgcagggaggagaggatgtgcaggagtaggtcgtcggagagttcagagatgcgatccacggcggccatggatgatgttctcggctgggcaacagcgagaggctagatcgatccgttagggtttcttcgaggaaacgaggaggaatatcatatatatatatatatatatatatatatatatatatatatatatatatatatatatatatatatatatatatatatatatatagccacacacactagcaaaagtgcccgtgcgttgcaccgggaagcgcacagatcaaaaaaatatgcaattaattaaaatacaaattcactgaaatatttggtatttttaaataggtatgtgtataattaaatatatttacaagtaaagcaagtgtgagaaataaaatgacattgttaaatttaattttattaaattctccatgattagttacgctctttggaattttattggaattttcagaacttaattgctaattttaataatacaaacatcatttaataattatttaattggaaaaagaaagaaaatccttccggttaggtttgcttagaaataaacacattcaataaatataattgtaaatgcttatgaagaaatgaagcactaaaaatgaacttctctttttttttcggcccgagggacctaatatagacttatttccggcccgagggacctaaaatagacttatttccgttccttccgatcggcccacggccttatcaaaaccctaaccctaaccctaaccctaaccctccccacccgcccccccccccaaactcattctcctccctctcccaccgcgagtcggcgaatggcggcggcggcgaccggctatctcgcggccgaggcgaggcggcggcatacctgccctaccgcgggcagcgactggtggcgggggaggcaggcggctagggggagggggcggcgccgccggaggggagggggaaggaaagcggcgccgatggcgggggagacggccggctgggggtaggggggagaggcggnntcngagaaccgacggcggatctgccgcgggagggaggctagagggccgccgcttcccctccccctcccctctggcggcgccgccccctttccccctcctcccaaccggcggcttcccccgtcaccggcgccgcttcccttcccatctccctcctttctcgccggctcggtgcggcaacggcggggttcggcggagacggcgccgtcccaacggcggcgacgacggcgtccgcggcggcctcgctccctctccccctctccttcccgtctcgccgacttggcgcagcgacggcggggtgcggcggaaacggcagcgacgaccgtccctccccctctctctctccccccgtcggcctcgacggtgacggcgccctcccaacggccgcgatggcgtcggcttcatccgcgtgcggatccggcagcggcaatggcgaccgcgggcggatcaggcggcagcggctccctccggcagcggtggtggtatcggcggccgtcgattttttttttttttttttttttgcaattttttccatgactattgctaaccgaatcggattgtgcatggacaaaagatggacgaaaattagatgtgacgatcagcaaaatacgaatatttatattagttatagatatagatatatacgctcaaagaggattatacgtgaattacagttagattagatgagatggtaaaagataagggcccatattttcactttgggcccatcctggcccttcttgacccttcatttctcctacttgcggaataagttcactttgaatcccttaatcagtgactgaagttgatttgtatcccaggaccataataccggatatttcgacgccccccaactatcctaagtggttttggaggacgggttcgctgacgtggcgcctagtggcagtgttgactcgatcttcattccacatggagttgacgcagttttttaattctaatgcactaagcatcacgttgactccacatggaacgaagaccgagtcaacaccactaaatagacgccatatcagtgaaaccgacctccaaaaccatcgagggagtcaaattccaccggtttaatagtttggggggtgggtcgaaatatccggtatcatggttcagggatacgaatcagagagtcataatgaacttattcccctacttgcagttgacgaagtcaccacaggcgtctcgctgtcgagaggtacggcacctaccactgaaagcacaacgccattaaatcctagaaaattcgctcccatggggagttgaacccaggacctcaggtgctactgaggctcttgtaaccactaggctacaaggtttatcatatttgcacaagtaattccttttttttaacacgcaggagatctgcgtatcctttctttaataaggagaaagaaaggtactcgtgagaatgctagagtttaaaacccaatgcaccaccactaaggttttataactcataccaccatgaatttcagaggtacatttatctacaaaataaactaaaagtgttggtttctagggcactttaccgctgaatgatttcctctaataaaatggtatgggtatgtttcataacaatgacaatgaaattgtatttcataaatatctttaaaacaggatcaacaatccaaatatcgacacaatactgaaattcacccaacagatatattctcaactgtaccgaggatatagaacacctattagcaattcaaacttcaaaggataataaacaaacagtacaaacaaataaggagtataaatcaaggcacagaatgaatgtataattggtgagaaacgatagtataaagtgagcaattataacgacaatattttactcctaccattttataatttatacattaacgaataacgggagtgacaagttttggtaatcaacaatatcaaggtgttaaaatggcaagctttggtcatacttttgttggaagatggagaaagcaggtttgagtgtctacagtttttcaaatgtatttgccaaatcaggttatgcagaaactgtaagtttaagaataaaaaaattgaattgggacatgaacgtattagcatgttttttctcccgaagatagctcgtggtacagtcccttttaagaaaagactgattcaagaggataaatatcctgaccgtatgcctcagtggtgactactgttagtgatatgccctagaggcaatcatagagatgattgtatcacatactatgtttacatatttatccgatattgttccttgaaatagataactccttattggttaatgaatatataattttttcatgagactctttatgttgtttgttactatttctaaaggatccctgatcaaatatcatatgtgaaacaaatatgtttatatgatcagcacatgtattaattaatgatcatgtctcatggatcatggtatagagataccaaattaataatgtgtacacatgttagtgaacatgttgttggatagatccaacatgagacactgcaagagccatatgtgttgtgtcatcagtaatctcatttagtgttggtgttgaatccttagacctgagattatcatggttttcaatatatgtagcaacttacttagggactgctaaacgctactccgtaaatgggtagctataaaagtagtattcggatatgctatgaaacatgtagtgggatatgaataatcaagatgggatttgcccctcctatggagagatatctctgggtccctcgatgttgtagattatggaagtgtatggccatgccaaaagtgattgaggagtcaatcacaagatatataatctatcaacagattcgagtgaatgattgagttattagaggatggcacatatctagccttgagcttaatcgatatcgtgaggcaaaggggttcatacaagtatacactagaggttcagccgatatgatctttatgtatgcccggtgggtcaatacattctgctaggggccgctgttgacgcgtggaccgaaaaggagttttcgggttacagccgagtatatatgaacctacaaggtcgcacgcttaatgggccagaataaggggattggatagagatccaatatgagcttaattcggatagggatccgaataggagtcctacgggccttggaggcccgagtaatggattctatatattcgtgagaggcgtgactggcggaggcattgcatcacgtgagaaaccctagccgtcacttccgtcctcgagcaaaaccctagccgcacacgggtgctagcacatctgcgcgtggcgtttcgtccctgtacgtgtggataccggtagagacgccactggtttgcagtgctgatcggcgtgggagtacggcgaggagaacgcacgaggaggagaaggtcgagccggtgcgatcgactacttcctctacatcgatgcgcgctacttcgcgatagttccttcgacttctcagcgtcttcttccgctgtgcagcgcgtcgagtggtaacgatctatgatctaatgcttgcatggttcctggtttacgcgatagaaaattttaatttatgctatcgtagcccacgcgtatcccaacaactacatgggtcatcatgctctgttgctccttggagaaacaatcccagaacatttgctccattggacagtcgaccatgtacaaggttttcagcgagctaagctcctcagcctgctgcaattccgagcagtcctgcgcaagtaagagttgcaacttagaaagattggatatcctcctcaagcttttattgttcttgaccttgagccagacgattccgggatggtagacgatttcctgcaggctgtgcacaccttctataagaacccttcgtaggttaacaattctgtgcagatcttcggggagagctctcagttttgggcaatttatcagctgcaggtacctgatgcatggcataagaaagactgatcgtgagatggtttccgatgtgccatcagacaagctttctgtgctaaccgaccaactctgccagttgtacatgtcaacgatctcaagcagctcaagctttggaaatataatggtatgtgttggagacactacccctttaccaaagagttcatggccaatgctcacaactgcatcagcccctttgacatgaagaacctgcaacattggtagctggcctgcaggcggaagctctggacaagatattcagtggttgaagtgcaaatgagccaggttcggcagtgtgtcctgcggctctgaagataaccattttggaaacgcgtcaccagggaacccatctataaagatgtactgcaattttcgtgatggacagagcttgttgtagatctcctcgatgttcttcacttcactgtcctcgtagctggttcgacaatcagcttcttcacccattgtacaggtaaggccgagctctttgaggtgacgcttgttgcacaacacgggtgaagctggcggtgaggctttctccagcttgatcagcaagaggcgccgtatcttggagagactatctagttcatccaatcggaacccgccagtaccatcttggaaaactgatcgaagattatccatgcatcggaaattaccgatccctttgggaacttggggtcagtgctgtgccacctatattgaggaagcttatcgtggacagcgtcatcagactcgccggcagcgatgccaatttttcgcaaccagacactgagaggtgttcaaggcaggtaaggtttccgatggatcccggaagttgcttgatttcttcattacagctgacatccagcagcctcaacagcaccaggtgcccaactgactctggtatgctctggaggcctgctccaactagaattaagatgcgaagatgctccagcttcctgtaaatgtccctcttgactgatctgcatgcgtcgtggtgatacactaggaggcaccgtaggtttttctggtcttgtataccaggtatttcctcaacggcgttgccaaccgctaaacgccgaacatttggaggggtttcgtcctcatccatgaacacggctacgtctcttgtcaagtattggccaagcaaccttagtagatcatgcatggtagaaattcccttgtctatgtactctggtcttgcctgcagtagatttctcatgattagctcgtggtagtaatcttcagctacctcctgtatcggtctgctgccctctttcttcacaaagccttcagcaatccagaagtaagtgacatctcggtgaatatggaaattttgaggcatcaaggcacaccagaggaaacagctcttaagctgtggggataagtcattgtaacttaaatacaaggggccttgtatttcttctggaagtccttcataacaccatctgctctccaggactctagcccattcttccttcgttgccttcgaggacaggacacctgcaacggccttgatggcaagaggaagcccatcacatttcttgacaatctgtgatccaatatcaccgaatacatttatttcgtcttcggttcggaatgatctgaagaagttccaggccatcatgttccttcagcttgtgcacttcgtgaacatgtatcgcgttcatctgtgacaaaacatcacggctccttgtggtaacaagtacatgggcatccgcacatctctctattggggaccgaagaagatcaatccagatatgtgaacttgtcatattatccaacacaaggaagatactttgtccagtgatacaatttagtagagcttgtagaagttgatccttactcttgccctgataagactgtcctcctgccttttcaatggcctccttcagcaagtcagtctctgagatgctctcagaaattgacagccatataaggacatggtgaaacctctcccttatccttcgatcattgtatatcttctgagctaaagttgtcttgccaattcctcccatccctaggatcccgtaaactgatatggtgctctgatggccacatccaatgatcatttgaaccatatcatcagtagtttccttgatttctcttccgacaacatcaagttcatcaaccaaagcagccacatacctactaacaccgtttctttggagagtttgaggactcctcattgccagtggaacaaacatcttgctgttcattgtgatttgcacaagcctttcatttacatatttgattcttctggcaatcctgtaatcaagtggaagttgtgccagcctagagaacaggacacgatcacaacatcgctgcttgtacgagtgagctctcaaaaaatctacaatgtcgtcaacatcatacataacatccttcacatcactccaccatgttcctgtcactctattttccaaggccaaagcatcggcatcttcacgaacagaatcaaagtacttcagagattcacggagcctcctgatatctcttctcacaaataatgtcttcacaaattcctcccgcagtatcccaaccagcttttctaaacatttggatgacaaacacactaaaattgtccccatcgtctatgcttgtggcctgatctacagaacaaatttagaggtcttataaattgcagataccaatgcaagtcctggaaacacatttagatcgaacgccagtacctgaaaatggagatggctggaggtgttgaagcactttgagtgagcttgcgttgacctgcagcatagagtgttcaggcaggggaggtaaagcgaccctggattgctggaacaaggaaattgttgaggcacatgttgcaacactttctgtatgtctctgtgtgtgtgtgtgtggcaactatgattcctgataaggcctgagaaccctgacaacctggtttgtcacccccttgccaatattatattttgaaacaagacaggctgcagggcacaatgacttaagttcaccaaaacttgttaaagtaaatggagcaagaagcatattagcagagtatgtccacatgcaatgctatcaacaaaaataaataattgtgatatgtgttttaaaactaagtattttttttctatgtccacactaacctaacacgttacttattgcaattgattagttgtcaacaccagtagtaaataatatattcctagttaataaagaaaggctaggagctattgttgatttggacaagtcaccaacatgcagatcatttttctattgttgattattgctagcaacagtacatcattgactttctttgcagatcattttgactgttgcactgttgccgtctggttcctttctctccagaactttggtaattagtacacatggtttctaccactggcaacaaaccatgcaaaaccttatcaaaatgatgttgttactctcgaatatgaatcgttgtgtaatgaacatgtagttaaaatagcttgttaaagctagcaatccaagtatacataatttgttaaagcagcttgcttgcaaagatttattctagcgaaggcattcttaatgtggcagttaactaatctacatttgctatcattgttgtaggtatttgatgtggcatgcttgccgatgtgacagtggcctgatttttcaaatgaggtgcagccaaggctttggtaaagcacaaagtttgtgaggcagactaccaacagaacgatcggtgatgccagaacactcactacatcctgctcattgatgttatcaactgtaatgtgcagttgagcttaccatgagggcctgcaactgaagaaacaaataagaacggtaattgcaatttgaaatttcagatagagactgagcacaatgaaattgaacaagtagtaatagtcgttctatttgaatcaagcaaagcaatgagtagctatagggccttgaacaatgaagcaatcatttcacgatcgattaccttgaagaaacaatttgtcaacctgaaaataaaacctgatatgtacatgacacttaggatgaggttttgaggagaaaaggaatgccgggccctaaagactctacaggatacaaggcttatcagcctgagtgaaggtgatgcaacaccgttttcctaacatatgtggactacttcaacagttgaggttgactctgatggattttgaaatggcgtgcaaaatattagggcaacaccctgaatggttcagtctgaacctacccaagttgcaggactagcaacatctagtgaccgagattgaaaagaagagccaatatataatagcttgctgaagtactatatcatttatttgatcaagtaggcatgaacaattgaacacctcgaagagtgggactgagataaataatgttgcttcatgatcttgtgaagactttcacattatacacacagaccactgagaaatttcagcactacgatatggtaaataaaacagcgaccagacaccagagtatctgtagtgctgggtttagccaatgaacaggaaggtggtattgttgtcacaaatacattgtagtgaggcttacagaaaggtagactcaaactactggtctactgcagacaagaggagcattcacatttatctgtaaaacgttgttttcatgaaagggaagggtagtcattttttaagattctgataataaagcaatacctgcaaaagggtgctcgtattggccacagaaggatcataggcctgctagcttcattttgatggatctgggctaaaagaaatagtatcaacccattgatcaaatcaacacatggagttcagtagagattattctaaaatcaaatgtaaatggtataattgctatacctcaagaacaatccattgatctgttcatttcgaaagcagcaaaccaggaaacaaagagcagaagcagagcaaaagcaaaagaagaaagcatgagtacaagcaaaggaattacatatacaggcaccttatgataaaatcacaactggaagatttaaacagaaagagaaaaaacaatcggtcaaaaaaaatctgcaccagcatatacatccaattcaggtcgagatggcaaactgattaagcataacgcgtgaaacacatgtagcaaaagaaacataagtaatccctcaattcatgatcctcataaattagagctcaaaaataaaaaggcaaatatttcatcattggataattatgagaagaataaagagggaatagagtatggatccaaaacatgacaaaaaaatttgctcggtgaagttatttttatatctacaatgatcaggtacctgcctgttaaacaaagtttgcaagacagtcaatgtatcaaatacacataagaagcttggttaaaaacttctcagggttcctcctaactacagtaaattagcaacatgaattagaagagagcatcaacataatctactgcacaaaaaaaaattgctaatatccggaatttagtgaagatgagcatttaaattgtttccagtgcatagttaatgtaaacaagttaagagataaataacataaatgttctgctatgttttgaaagtaatcacattttacctactactgtaaagaagttgactgatttattacctgggattgctccttcctcttttgattgtagtcacatattctgaagaagtctcctcctggtcagagttcaaggaagcatgagcccctaaattaaacatcggcagcacttaaattttctttgaatttgccatgttatgtctgcaactacgggaaagcttttcacattcggctttgtatttgcaatcgaattacctcgaggcgaagtgcctggcactgggtaacggcggggtgagatcagcgctcaactcgagaggagcgagcagagaggcgcgcatcatccgcggcgaatcagcccttcccctacttgatggttgatgcgcggtgtgggcggcggcggcggcgcctacaacaacaatgccaattaagcttccgccgcgggtctcgcgctcccgaatcccgatccgattcattccccccatttgtttcccagaacgagttgttgaggcaaatgctcgtgatgatcgatcgatcgctcgctcctcgccatccacgatcaatctggcgtctcaatttggggaggggattgatggagctccgccgcgtccagacgcataggggcactcgatccagtgtagaggggatcgacgccgatgagcagcagcagtggcagtgcatggctctgacggggctgcagga

SEQ ID NO: 5088 - DNA, 10049 bp, Oryza sativa
  unsure (1)..(10049): unsure at all n locations
aatcacgccgcctgatgcgccgccgaatgagggaggagagctagggtttgccactgtgaaccggtgagaagagaggagaaaaaagggagataaggatgggaggaggtgagggcacgcgacctcttcacatgcgcgagtcgcgcgcggtcctgggccgccccgtccggccgaatcggccggatgcacagagccggcatctggagggaatattccctaggtggtggccatatcccagtaccgcccatcatccaaacacctccaaaatttgggcggccatatcctatcccagcctatccctccatccaaacacatcctaagtgttgtctctgctagtttactggctgaagagagtaccaactaacacaagaacagatctaagcatggcacaaaacttcttcactttcaatcagaagttcagagaaaggcagtctcaccgtatcatgtcagagaaaacttcagcagattcccaagtgcatgtccctgaacttccgcttgattcttcctggacctacgctttcctgggattgaaaaatggcatggacatctcatgatcaataatatacacaatttaaatcagaatcatgtacatctcatagtcaacaatattcatcacaatctaaatcagaatagtttgcgctctcatcgatcaaaggttgccactttaattgccttataataatttaacaatgttgttttcttctacatagcaaatcaataaatcaaaacgatggaacatgaggctcaattcttgtaaatccctatcatctcatactgatattcttgtttaacttcattagaatgatagattacatatttacagtgattaagcatagcattatagaataaaagcaataggacaagagtgcaagaccatgactaattcagacattcagtgactataaactatcgattcaccggttgcttagttgttcttctagctgctgttgctcgccgcctaatctgctagctgctcggctgtcagcgtcggcagtctcgttgcccagtcgcctggtaccttgcgcccttgcctgctctgcctccatatgctgctcgccggctcgccaccgcggcgcccggctgctgttccatgactgcgcccgcctccgcttattcgctatcgccggctcgccgaagcacctcgttgctggcttgctgcttcacccaaccgcccagccacccagccgcgagtccccaaccctaatctatagagagagatgcgtgcgtgaggtcgcggccgcaccaggatcgcacgacgatgacgccctggatggatgagtgggggcaacgtctttcggcgaggcaccgcagtggcgatggggaggagagcacggaggaggcgcgttggatgccgggagtggcggagggagcggcggagagagggatcgagccatcgagggcgagagatcgcggtggttgtgaggaacgaggagaggtcgacgactcggggggtggggaggggatgcatgtgtctgcgcctacagcacccattttgaagcgttggatatctggatccaatgggtacaatggcgcgtggctgtcaccactacaaaattttaaagtagtagagattaccggcaaggatcggtatcgctacttgagtttgcgagaccactcgctctcacgaactgcggtctcgtgtttttattgtgcaagatcgtaatatcaacggtatatctgtgcaaataaaattacaacccgaatatttatgagagaaaaaaataaacggtatatttttaatttttttcctttttttctgtatgcttgtagttgtagctagcaaccctcttggtagtacagatggtttacaaaaccaaacgggtttttttagaaaaccgggagctccattagttggtctaataagccaatgcaaaagttaaaatttaaagttttaaacttgattttgaagttgattttaagatatttttaactaattttcttagctttggattttgaattgcttcgaaaagtatataaaagttttaccaataaattaatttttattccctaataagctaaaaatatgggcaaccgatgaggctcgggacttcctgggtcggctagctctgaaccacaatccgcttggttttccagttaagttcaaaaggaaattcaaactggataattgttgataaagtttcctttatccttgtttgatgaaaacaaaacaacgaacacacagaaaatagggaaaccctgtattttattaatcatgattcattaacatgaatgtttacaaatatatgagggctcccgcaggagttcgccttttgccttcgtgaggaatgcttaatagaaaggtatgctgactggaaattgcgtgtagtccgctgattcccggtgcatagcaatgaggctaccggttaattacatccataggatgagcctatggaatacctccgattaagctgcgctttgtgatcactgtcttcaaaattaattgctcgccgaaggttgaggttggtgcagatttaacggtgaatatagtgaatgtggaacgggtggctttgtttcgccaaaacccggtcacactacactaccctcacatcggtgtgcggagggaatttggtgaagcgggtgactttttcctcgtcggtgcccagtcatgtatcctggcctttatcaaacatagattttacggttgcttttgcctcatcggtgcccagcaatggtgtatctagctcccgtccgttttagacgtgttaatagtatagtgacctggccttgtcggcgctcggccatggttttgtctagccttatccatcagacaaatgaaatgagtgaatggctatagctttgttagctttggccaatatgtcgtccggcttcatcggtctcggacgtagcacaaatattgataaattggccatttcatctcatcgacactcggccacgatgtcgacgtttattttaaatctgcacacctcgccctcatggctagcgttgttttatttagcgaataatgcttgtcttcaggaattgtgagaaattgctcccgtccatccggtagaatttggagagagaaggaattgctcccatacatgacatgcacgaggcaatatgtgactcatccggcatgaatataaatatgtataaatcatggttagtctgatgccaataagactcaaactcatcccaagtttatataaataaatatccacatccaatatttgatattgataatttagacggtccaaccctcacgagggtcaggctcgccttgtatttatttgcagcctatattaatggcttgacaaagatggcgtgtacatgtgtatgcgtcactggggatacttatatatccatggctacaagttcacaacacatccacgatatattcatcactactccactttactgttttaccgtccgggctgcgcaactgcacaacgctacggtgtatatttcctccctctaggagataatgccgggctatgcataatatctgcacagcactacggtgttgttgtgttatcttggataagcggcttgacggagaacgagatcagcttgtttctgaagactcgccgatagagatgccatcagtgccggcgattacaggttgctgatccgcgatcacgcaccctgtgccatgcgcatgcatcttctttctgatctctctgcgaatatatgtgggtgcgggtgtgtacctctagggcatattgctgcttaatggcgcagcgcttgcgccgtgtgttccctcttcttcctccgtcgcggggacggagtcggtgccttttataggcagaggcggcggcaacgatctgcctgatctgttccgaatttccagcataagccaacaatatcacacgttaattctcctgacaagccgacgcacagatgagctaatccatccacgagataaaaaccaaacacacgtactggagtctggagataatcatgcgattaacatggctgatgacggtgggccccatgtgtttaatcgccactgccaatttccaaattagagataatgaccgtgcatgctcacgtagcaaagcaagtaacgatagcacttgcttatttcttttcttttaatagctccaatcttttgaatcgtacatcggatttaaaatccatttgaaccattactttctattcaaattatacaacaaaacgagtccaatatcgaatatattcggacatcgtgatatttgaaatctctaggcccacatgacatagagacacgcctcgtgtatattgggttgcaaataatattttcatacaaaattaaacgcccaataaatttttttatcttctatgaatttttagcacaaaaattcatcaaacaatccttaaaaataataccatggtggcagtgagaaaacaatctatatagtaaaaatatagaaattgttctaccaggtggataacaaattttctttaaggacttcaaaatgttgaagtgattgttcctctataattcttaaacataccttcaaatttttaaccgatataagagtctagcgtcaggggattactacttctcatgtgaatggggcaatgaactcctcgcttgtactgccttctaattgtacatgatataacatatccttaaaaatatgaatttagacaatatatgaatttagacaataaaaaaggatgcgtcacattatattaaattaacttattatgagacagaaggagtatagttgtgacggagctcgtggctcctcaccgggagaccgcgcaggcccccctttgccagttcggccgggggcttagggtgaaatctcaagctctctctctctctgtatgtggaaagatcgtctgccagcaagaaacacgagacaccggcgatctatacaggttcgggccgctgagaagcgtaataccctactcctgtgttttggtggatctgtgtatgaatgagctacaagtgtgagctgacttctcccccgttctaagctctcgatctggaaaagaatcaaccaaccccttctctctgggcaaggtcctccttttatacttcaaggggataccacatgcacccttctctttccaaactggactgttctttttctcttgaatgggcggagatcagcacggttgctgtccgaatgacgctccgatgggacagcccacacctacctccacttccgccgggggtgagcgcgtcgtgggaacatggctgtgcgctgacgatatgatcagtgtcagactggtcacaaatcggtcattcttgtccaccgcgtgtaatcttggcaacgtgcatgtttgcccttcttcacacaacatcttgcctgtaatggttaggatgaagcctggcatatatcgaccggggctaacgtgtcatctctaagagataacacgcttaactccggcttgagacgagtgcatagaggctttcgtcttgacgggatggggcaaggcgtgcgtcagaccgccagtcgccacctaacccgtgatctgaccggtctgtgactgatcacagaccggataaaggaacgcgctgtactgcgctgcatgcagcgtgacgcgcttgaccagactgcaataaatgctgttaggtgagcacagctgtgctcacttatcccatatatgtggcgcagatttccttaaggggtcggggtgcctcggccctcggggccggggcaagcgcaacccgaccccccccctcgggggaaatcaggaggagggcggacacctcatcctcgggcccgacgtccccgaaggtgccaggccacgtgggcgattgcgtctgcctcaagcctctggtcatgatactcccggtcccatatcaccgacagtagcccccggcgttgtgccagagcaatttcccttcccaagggaagcggtctggcgtaacgccacccctaaagcctggtgacaggtgggaccggtctccatagttgggcaaaatccccaacggtcccaatccatgcacattggtattggtaactttggttgtccataatgggcggtctattcaagactgccacatcacttgagcagcgcgcgctggattcttccatcggggaggccgaggccctccgcttggcgggcgagatggggcccgacatgctttgggactcggtctcccgcatggatcgcgccggtcggcaagcgggcctttggaaaggccagacgaggacgcgccctagcaatctggaaggcctcgctccgcacctcaacaggatggcctgggttctcgaacgactccccgaggagcttgagaagaccattaagtcatcctcgagggacctcgcccggggggcggtcgaactcgtgctggcgagttaccaggcccgggaccccaacttctctccatggatggcgctggaggagttccctcccgggaccgaggacaacgcgcgcgcgcgggtcgggaatgctgccgaccacatcgtcaacagcttcgagggctcggcccctcggctcgcgttcgcccccagctccgacgaggagggcgacgccagcggcgaggacgacggtggcgacgaggccagcgacccgggtgcatttgaatgagcccccaggcccccgccaatcttaacttttttttttttttctttcttctaaggccttcatgcctcttttgtgtatagatcaacttaatctgcaatcaaaaatgatgaaaaattttctatgttaactttattttgctatgcatgtgagttgaggatgatctgtgccgtggtccttttgcgccttagcttgaaataagggctcgtgcccaagtcccggtcctcgaatggctcgggtcggggctagtgcctggggagatccgcatgtcgagactggccaggccgggaacgtggtgaccgaggggtatgggtgacccgattgtgggtttttgccggttcccccccggagttcaccacgccccggggcacggctcggttctgggccccgtttggcgattttagctgaccgaaccgagcccccgagggcaaggttgagcacgagtgaccttatttcaagttaagattcttcagaaggaaaaacggcacagacacaacctttaggaaattgaaacttcttttattgaaatgctgaaataaaggaaaaaggaatataaggaatatatgtgcatgtgtggtagcccccggccaaccctgcacaccaaaggggggtgcggggttggccccgagccaaaacctgacacccgaccccccccccccccttcaggggtagaagcgacgaaggtgttcgatgttccacgggtttggcagctccgtgccgtcgcccgtggccagccgtaccgagcccggccgggggacaccgatcactcgatacggaccctcccacattggtgagagcttgctcaatccagcacgcgtttggacgcggcgtaggacgaggtcgtcgacgcagagtgatcgggcccggacgtggcgctgatggtagcgccgcaggctctgctggtagcgcgcagctcagagggccgcgcgccgccttcgctcttctaagtagtcgaggtcatctctgcgaagctgatcttggtcagcctcgcagtacatggtggcccgaggagacctcagggtgagctcggatgggagaaccgcttctgcgccgtagacgaggaagaaaggcgtttccccggtcgctcggcttggagtggttcggtttgcccagagcaccgctggcaactcctcgatccatgaatcgccgtgcttcttgagaatattgaaggtcttggttttaaggcctttgaggatttctgcattggcgcgctccacttggccattgcttctggggtgggcaggtgaggcgaagcagagcttgatgcccatgtcttcgcagtagtcgccgaagagttcactagtgaattgggtgccattatccgtaataatacggttaggcactccaaaacgggccgtgatgcccttaatgaatttaagagcagagtgcttatcgatcttgacaaccggataagcctcgggccacttagtgaacttgtcgatcgcaacatacagatactcaaacccgcccggggcccgtttgaacggtcccaggatatcaagcccccagacagcaaatggccatgatagtggtatgatctgcagggcctgggccggctgatggatttgcttggcgtggaactgacacgctctgcatcgccggaccagatcgactgcatcattgagagctgtcggccaataaaatccttgacgaaaggccttgccaaccagggtgcgcgaggcggaatgggctccgcactcgccctcatggatgtcagcaagaagctcaacgccttgttcctgaggaatgcacttcaggaggattccgttagccgcgcgccgatagagggtcccttctaccagcacatagcgtttggaaacgcgctggacgcgttcactcccttcgcggtcctcaggtagagtcttatctgtgaggtatgtttggatctcagagatccaagcgatcaatctaagggagcttggagcactcccttcgggtcccgaggcctggactccgacgggcctcgggtgccggtctggcgcatccgtctcccctaaggggtcgggtcgcgctgacggctgggtaagcctttcttcaaaggcgcctggtggggtctgggctcgcgaggacgcgagccgtgagagttcgtcggctatcatgttatcccgtctgggcacatgccgaagctctattccatcgaaatggcgctccatacgccgcacttggcgtacataggcgtccatctgtgggtcagagcaccggtactccttacagacctggttaacgactagctgggagtcgcctaacaccaagaggcgcgggatccccagtccagctgccactctgagtccggcaaggagtccctcgtactctgccatattattagtcgctcgaaagtcgagacggaccaagtatttgagacgttctccagtcgggagggtcaacgtgacncctgctcnggcaccctgaagggacagaganccatcaaactgcatcaccagtggggtggtgtgagncagcttaagaggggttcgtgctggcctcggggattgagacggtctctggagccggggtccactctgccacaaaatcggcgagggcctggctcttgatagcgtggcgtggttcaaagtgcagatcgaactcagaaagctcaattgcccattttaccactcgtcctgtaccctctcgattatgcaagatttgcccgagggggtaagacgtaaccacagtgacccgatgcgcctggaaataatggcgcagtttcctcgaggccatcagaatagcataaagcatcttctgggcctgagggtatcgggtcttggcgtcccggagggcctcactaacaaagtaaacaggccgctgcacctttcggcggggccgatcttcttcgctaggggccgtatccccgaggtgctcttcgtccaagtggcctctcggggcacacttgtcttctgcgctgatgaccttggggtccgaagatgacaggtgcggccttcccacagtggcctcggggccgtcctgggagtcgggggctcctggcatcgttagatacgcgggcaaagggccagctccggtcgtcaggggcctcaggcctccgttcggctcgggggcctcttctccctgctctctcccgggtcgaatcagcacagggttagcctcggggtcaaagggtggtagatgcggccttcccgcagtggcctcggggccctcctgagggtcgggggcacccagcaccgtctgacaagcgggcagagggccgtctccggtcgtcaggggccttaggccaccgtttgactcgggggcctctcctccctgcttgctcccgggccaagttagcacagaatgggggtgcacgaaatgaggattgtcttcatcgcgctccacaaccaatgctgcactaactacttggggggtcgctgctaagtaaagtagcaggggctcatttggctctggggcgactataaccgggggagagttgagatatgccttcaactgggcaagggcattttcagcttcctccgtccaagtaaacggccccgagcgcttgaggagcttaaacaagggtagcgccttctctcccagccttgatatgaaacgacttagggcggccatgcagccggtgacgcattgcacatccctaagtt

SEQ ID NO: 5089 - DNA, 5197 bp, Oryza sativa
ggacgagctgggacccaggtcgggttgccagttcggtccaaatcatcgtaggccttgggttaaggcaggttcgtgagggttcacggccttgtttaataatactgtgtagctctaggatcgtctttacaaaatggctttgggcaactaagtgacttttaaatgctgtttactgcaaaacctaacccctattattatccccttgtaccccccttgcattaatcatgcatctgccggtgtggcttgctgagtactgtggttgtactcattcttgctcaatccttcccctcttcagtaagagaagctttggagaagatgtcttaggtggagtcctggcttataccccagttgagcgcctgtgaagatggagccgtaggcccgctagtccgctgctgtttatttttgattgtcaggccttaagtgcctttgtaataatgtaaatattatcgatataataaagatgtgtcttttatatcatgtttgtatggtgtaccccggcttttcctgggacggggattaatacactagcgttcgggaaaaggcaattttcccggtcgcgacaagctggtatcagagccatctcgactgtaggataagccaagtggataaaacccaaggacatattttataaataaaaattatttgcgaaagttcctttttctccttcccctaatgctatttgcaaaaggtttactccgttcttccttcttcggattttcaactagtactagatggtcaggtcagtgaagaagaggacatcgtcagttgtttgccgaagctccagaagactgcaggatctgctagtgaagtggaggaagcagtgaagccagctgtgaagatcttggagaacctgtcgcagaacctaagccaccctctagggtagagtcgttagtcgtgtgtttccttgtttgtgtgtgtagcgcgtggtttgcatcagtggggtgtgatgtaaccatgctaggttgtttgcttaatcaacttgcagaataagcctaacatacatcataacagcaaaagacttagatctgttaaggtcctatccttagtttctaatctgtctctcccctttgttttccctctctccctctccaaacctttgcaacagatggctgacaatgagaaaggcaataaggtcagaagtcaggacattggtacctcaagctcccgagtgaatgaagcaccagacaccagttgtgtggcagtggtccaacacctgattaaccagaaccaattgcttatagagatactacagcagcatcggatgccaattttgaacccgagtcagatgcaacctcaagtgcagttggaggcagtccaagcactcacaccacaagtcagcgcaccgccaacatcccagaaggcccctcatgccatgccacatgttgacccaaaagaagcaagtatcatctgttttatgtgtgatgagcaagggcactacgcaaggaactgtcctcagcagaaaagaaaagcaccaatgcgaaccgaagatgaagtccgtaagatgatcattaccagcacagaatggcctccaccaggaatgacaaaacatcagagaagaaattccttccgaggtgcacaacagttgacagagcatcttttagctaatggaggtagagtgtctggtagtgaagattcagatcaagtctcctcagatgatgaagatgagaagtctccccaaggttttaaccagaataaaatagaacttaaggcatgctctcgttgtggagaaatcggtcatgttgccagctcgtgtgcctctacatgcgttcattgtaaggaagaccatccacccgacaggtgtccaacgagcaggatcacttgtttcttttgtgaaggaactgatcatgtaccaaaagattgtcaattcagttttctgctgacgaagaagatggccaaccaacccgccagttccaacggagagaagcatcaaggcaatacaaatccccgccaagatcaccgtttcagcctaactccagtgccaggacagaggaatcgaaatgagaaaagaaaatgccgagtccgggaagacatctgttgcttcaattgtcaaggaatgggtcatttcgccgacaagtgcccaaaaccgagaaacatagctgccggcacgtcagtccacgcaactccctgcaatcagaagcttgctcctcaacgaattgtcatccatgcatcccgaagcagtcctatagcccgcgttgcaacaactccaattccaatgagtgcactaacacaaggtgtcaatgctcaatttcagccccagccaccagctgacaagacagaggccagtatctgcgttgtacctttggaagttccaatacagcagctgagaaatcaagtacaagatgaagaacccgagtgtaagaaagttattgtttgttacaactgcagtgaagaagggcattactccaaaaactgtccccaaccaaggcaaaatcgacctccacattaccgccaatttacacgaagcagacattccaatcgtattgtggtcactggagcaaacgccgtacccgtaaggcctcgtgttaatcagaacccatagcagaaacaatgcaccaatgctcctcctgctgcacctgactcggcaataaatcttagcaaccattctctgcatcgacagcctcagcaaagaattgtcgtagatggaagaagttgtgtctctccccgacctactccaggccgagccaagggcaatcaacctccggagggcgataccaagcagaagaccgtcatccgcttcaaccagcaatcagaaggaagcttctcctgtgaatgatagcagtatgcagtcctatcacatcatcacagaaccaatcgaggatgcagtcactggaacaatgccagctatatctctccagaatcaaaatgagcagccatgtttgtggttttcagtccgctacttatcatggtgtaatcgaaagtttgcagcaatcatattcatgtctataaacagtgagcttgctatgcttatggatgattcatattgagaatacaatgtaccgatgttaagcaccgtccctttttgtttaaggtagtgcctcgtattcatgtaatgagggagaaatgtgtaatacagacaagttccatgaggattcgtttgaaagatgcggatatgtgatcatgtgtataattgtttactgacaaaggagacctagggtctcgtgttagaggaactatattctaacctcgagttaatagccaacctgtggatggaaaagaaaaacaattaaactgtgttgggttaaaaagccaacgagacagtagttgaggataggagttcggatacgccttttacagatcaagataaggattgttggaggaaaccccgaagggtacccgccatgcctctacattgataagatcggatatacctgccaacagataaggagatccaggagacatcaatatttgagaacataatagtcgatggttggtaattagtttatctggtatcagaaaaaggtcaaaggtgatgtggcagaagaacaatttggatgctccccatctcgaggaagcactaaagatgaccatcggaaattaaaccctagtggtatagatacagatagcaggcaatgtatttccctgaaggtagtcagtgcagcttttgacgcaccacatcaaggtttcactgaaaggcagcaagccaaaggacctcatcgtccccagaagcgtccgcaatccacattaaagaataccacctgttagagataagccgaaagatgattgataaaagagattggcaaagatgttctctagcatgaaagaagtaggccgaaaggtgattgataaatagaaacatgctctgcatcgctcaaggaagacccctgattgtaattgccccgcaacagtcaccttgtcattaagtaagcaagatgacctaggtaaaagtgtttctatgaaggcaaagagtgaaatcttccactcggtatcagatgctacacggagtgaaaaatgcaagcaccggttaccaggcaacgccatgtcctgggagatgatccaacgggaaagaactcatcaaggttaaaggtgtaaaggaatacgttgagtgctaactgatgacaacatgaagagaatagcggaaagtaaactgaacataaagaaagtgaatctgagttgcttgttcgtgggagctattcccagttatgaaccaagtgatatgttcgaagataatctacagaggtcagattaaaagcacatctaacaacgaagcctcagattcgacagggtaatgattagacaataacaaatccagcaataaagccattgaagaagacgtcaaagtatgtcaagtgggatgaattggttctcttgggaagcataacttatagttagagtggttgacccttgcatcaaatagcagaagtagctatcacccggagaccagggaagctaatatgaggcagttggtggcgagttagaagcaaataacaagcatggtatcctagtaatgacaagcaggttacgacgcatgacatgaagttgataacttgtccgaggttgactccgaagatatgaatcatgagaagttctggaacggaagcatcacagaactaccgcaacctagtctgagtcagccaaaaggtgcaccctggtccaagtcaggtgaagagaagattccatccgcaacaggaggtcaagccaagcagttccgagtggtaaagttttgctggaagttcgtcaagacgcaacggaagaagtcagacaagaagagaagcccgcccaacctatcttcttgctagcctcctcgaatctcggggacgagattcttgtaaggggggtggatttgtcacgtcctgataaattcatcccaaaataaaaatcatcttctaaaaggaataatagaattaattaaaattcgaaaagaaattggcaaaccttaaaatacgtacaagaaaaattcaaatgtgacccggagaatttttgttaaattctccttggtctaaaaggagccctcaaattttagtggaattttcagagcacaaataataattgagaagaaataaacaaagttgaaaaggttttataaaaagaaaaaccctaaaagaagtcttctttcccccccttcccttcttgggccggctcggcccaactcttcctccctctctctcctctcccccgcggcccatcggccttccccgcgcgcgcgccgctgacaggcgggcccggccgcctgcctcgctgacgggtggggcccacctgtcat

SEQ ID NO: 5090 - DNA, 11909 bp, Oryza sativa
  unsure (1)..(11909): unsure at all n locations
tgagtgcacatcatgtgcattttataaaactaatgagactaaataattagtgcagaaaattttgacataaattttgaaaataaaataaatgtaaaaattaaaatttttatttgaaattttaataggacaatggattttttatcaggagcattcataaaaaaaatgttgtgaacattggtatacctatctttatatgaatgctcctcatttttatgaccttttttaaaaaaaataaatacgtatttttttatttcattatctaaaaatatttttttgggataaataatgcatcgcacaacaaactcataactataatagtctcatgcgagaagcttttatatttttaataatgtaattcatgaatttctttgttcatccaagggtaaaatggtcatttttatagaaaatacacggtcaactaacagtcaactgacgggaggggtatgcaagggatcaaaatcaaattttggggtatacaaggaagtaagcaaaattcaggggtatagaagggattaggaaaattttcaggggtatataagggattttctcttgaaacaattggcatagtgagaattgcactccatcatgtatatgcattgctcaagtatcaccctccggatcccagggcaatgagaacttaggctcatgtttgcattcagtgcatccactagcctcttaatgaatctccgcttgatctacccgtgctctagctcttgggaaaattcttcaggaatgagtttgcatatctatgaaaggccattgaggatttctagttctgccccttcagcatccattattctttccaacacctgtagtggaaccagcaatgtcatgtagcatgataaatatagttgtacaaactatagttatataattcattggtaaataaatgtgccttctttttaccaaaaatgacaaaaaataatagacagtgaatgcacaaatgatacggcatactatacacctctatattgcacttgtagtatgtattagcagggcttacctctcgcaaggtgtgagatagttcctttaggtctgattctgtcagctcatgttgaacgtgcaggcacatattatgcaacagactcgctgccacatatatgtatttatcatcatggattagaatcataatgaagcagttatgcgggttttctgatgacagcattaccagtgcttgcccgtcgacctttggcagcaagcaatcaacatctgaactaaaatgatccatgagaatcgaggaatgccttcatcagcctggtaatgagcattttcatttgtccaatctcctgccttgtgtctctgtcaattgcaaggtttctgaggatttctgccacgagcctccttagttctttttgggaatacgcaagaagcgcatctttgtattaagagaaataaagtttatttacagagatttgaaaatgaaaataaagaaggggatagggtaccggatggacaacaaaatgtaaggcctaatctcgtacaaaattttgcgaccgccactccgtggtcagtagaggtaactccagcattgccgcgttcgctaagcgccaaagcacggcctcagccgccatcactttgccacttcgacccaggtcttttgctgttggttgaagaccctgttgttccactccttccagatagtccaagctatcaaggctgcaacggtgtcgaatcctcgtcgctgagctttggcaaccttcattctcttgtcacaaagccatgagaggaaggagggttcattgaatggcagtatgtccgacaaaccaattgctcggagtgcgaaccagcacagttgacgtgactccgggcatgcgactaggagatgatcaatcgtctcgtcatcttgatcgcataggacgcaccgatcaggatgtggtaaaccctgtctccgcaaacgatcggccgtccaacatctgtttagtgccactaaccacaggaaatagcagcatcggggcggtgctaacgacccccagataggcttgtcctggaattggaccctccccacaaacatggactgataagctgagtgagctgagtattctcctgatgactcccatctccagatgattgaatctggctcttccgtgagggcatccaaggattgcaaagatgtccacaagctgaggtactctaggattgcttggatttcgaaagccccagatatatcccggatccatgttctaccttggagtgctttgcgaaccgtcctgcgattccgggttcttgctgcaaccgcggcatgcacagccggcgcaagggtgcggatcgacgacccctggatctagttgtcttcccagaagagcacgttcattccattgccgactcgacatgtcaaagagacttggagtaggttcctctccttttgcgagatcggaacattgagtccatgccatggcttttctggcgatgtcctcagttgccaagcccagcggcaccagagcgcaagtcccatgcgctcaagatcagggacacccaatccaccatacgatttgggtgcgcaaacacgtgcccaagcgacccggcaacttccaccgctagcacttgctttcccggcctagaggaagccgcgacggaccttatcgattccctttatcacccactttggcacattgatggccatcagcaaatagatcggtatagagctcaataccgcatttaccatagtgacccgaccaatgagcgccatctgctctgccttccataccggcaaccgacgggctatcttgtccacaaacggctacaggtcttctttgcgaagacggaagatggaaacgggcagccctaaataagtgcaagggaatgttgcgacctgacatggtagttcgtcctggatcagtgcaatgttgttgtcgttgcactgaattgggagagctgcacacttagcgaaattcatcccaagccctgtggcttccccaaagatgtgtagaatttcctttgctgtgctgatttcctcaggatccgaccgaatgaaaacgaccgtgtcgtccgcgtagagggaagttcggtagggcaggtgcagcggctgtaacagcccttcattctctgctttagagaaaagagagcttaatgagtccatagcgaggatgaacagcatgggagagattggatccccttggcacacccctcgccggtgcaagatagggttccccggtatgccattgatcaggacccgcgtacttgctattaggaaaagcatggcaatccaagcacaccaacggctaccgaaccctttgtgctccagaacctctaaaatgaattgccaggaggtggaatcgaatgcctgcgcaatgtcgagcttcaaaagcaaggaggattgcttccgctcatgcaaccgcttcgccgactgccgcactagcatgaagttgtcctgaatacatctcttcttgatgaacgcactttgattattggcaacctgagaatctagcttgggagctaggtggcgtgagaggatcttcgtgaaaagcttaacgaagctgtgaaccaagctaattgggcgaaaatcccgcaagttcctggcatctgggcgctttggcagtagcataatgaatgccttgttcaccttctccaaactcgaaccatccatacgatggagctgttggagagcagctagaacatccactttgatgatgtcccagcagcaatggtagaactgcccggtgaacccgtctggtcccggcgctttgtcgcaaggaatttccttgaccgcttgccacaccttttcgtcagtgaaagggtcctccaaatcggataacggctgccccggctgctcaaggaagctcaattcgagcgagaactcacgcggactgactgagctaagaacttcggagaagaaggactgtgcaagttacgccttctcttccggggcagttgcgacctctgagtcgaattccaattgctgaacaaagtttcaccgacgacgccaagctgcttgctgatgaaagaacttcgtgttcgcatctccttcttgcaaccaagtgatgcacgatctgtgcctagccattgtccgttctaaggaagagtacgccaaatacctcttctttagtcctcggtgcaggaatctttcttgtgccgagagaccgcgcacttcctccgctcgatcaagtttcccaatgagttctctaatcatttctagctgtagcttaacattccccaccttccgatcactccagctttttagggcacaaccaaccgacttgagcttggagtcaagcctggaaatgggatcgatgatggtacacgattccgaccaagattgctgcaccacatcagagaatccattcaatttgcaccaaaaattttcgaagtgaaatctccccttcgacggatgggccggcaaggttgaaaggagtagagggcaatgatccgagatcaaggaaggcagagccttgaggaagcattgagggaagagtttttcccagtcggcttcaagtcactccagggttgggttctcccacccattcgaccaggtaaaagcacgtccattcaggtggagcttgtggagagctagatcgttgatagtccgacggaaacgactcatcatccgatggttgaggttggcgttgtttttgtccctatcttggtagattagattaaaatcgccaacaactacccatggcccattacgcatacttctgatatcgcacagctcctgaaggaatagcaccttgtccgcatcggactggggaccgtagacgaccgtaatccaacaggaggacccattgtaaaaggatcctccttagttctttgattgctgctgctatctcccaagatctctgcaaggtttctcaataagaaggaatgttttgatatcttgtacctcagtgttatgccaatttccccttcaatgcttgtgagcctctgcagcaccttcaacgatgacattaacagaaccttctgttgtgcttcggaatttaccattgcacttttgaagcttgtgaatccaatgattttggggatcaggtcagttactctgtctatttccacgcagttattttgatcacaaccagcaaggctataaatgattgacatgcctagtgcagggaggagatcattgtctgtcaatggctgctcctttggaatcgaccagtacgccggtatcctctaccaaattctaggtatgtatctttggtcgttgatgtgcattgatcgggttggtgtttccagcaggttattgatgtttctctaaaaaagggttaaataattatatttatcttgaactatatatttttaaagaagccagtgtatttcttaactactttaaaagacaatcattttccttttttcgtcaaaaaccgctccctctcataaaaaaacatcatagaaaaccactcttccttgagaaaacagtccttaaaaaaatctcatgatcccaatataaaatacgtaagtagttttatataaaaatgatcaagtatgtccgtttgaaatgttggagtcttcatccgttactttgcattcccaaatttcaaccggcccaaatatggagtatatttcttttctacggaaaaaaaaaccgatttagcccatctatatctattatccatcacaaaaactacctaacggcatcatgtggtggtgcgacggtcacgggacaaacttaatgtgcccgaaccgttaccatctcacccccatcagctctctcatgaaagtatatagacccatgcgcgtcttttacatatgcgtcagtagggccaggtgataggttgatagctggtgactatgtgcatgcgtgcataatggttggcccaaggagcagttaactcctcttgcctactgtcacgcccggaatttctatccaaaattccaagcgcttacatgtgtgttaaaccctcgtccaggaatcaaccgaggcacacaataacaaattgataatatgtcgtaggctctccggaccttccattatatttgagagatgaagtgaataattcaagtcatcaaacaagcataatgaaacatccgacacctcgagagaggaatattggagacattgctgggcccttagcctgccagtcaacttcagcctgagatgtgcccgtcaaaccactcgaaggcggcgaccagatgtgttacacattcaggagacttgacaaaaatggctaaagatctacaacctctcaaatattcctaactcatactcatgtgaatctagttcccaggatgtgcactagatccacactttcatcttaagcatgattatacatagcaaacacaactaagatgaaagaacttaagacttacaacaacttaataattacataggccgaccggccaaatagacttaatagagaacagcggaagcttgactacccaatcacaagcacaccgactaggggtttaccccattaagttctcatcctagaagaagcaatcggaacccgcatcactcaaagactaagactaaacctgcaaacaaagggttatatcaacagcaagagtcagtacattaaacaagttaatgtactggcaagcacaagtcaatcctaccatactacatgtaaggcatatattcaaaggaaggcaatatgtagttcattttcagcataaagcaagttttgtttcgcaattcttttgtaaaagagttgatgcttcaattaacaaagacaagttttaagtttcattattaacttcttcataattccatcataaacaatctcttattgccatacttaacaataagtcataatgtatcaccacatacacaactcaacacatttatcaatttcaaaccaatgtcacaagatcacatttttaaaacatagtctatactcatgacacatcaccaaagctctcatgaccgtgagcacggctaatcgattagtttaaagaactctgcagagtttgtacagctttacccacatgatatgaactctctagtttgttttgagtttgcaagactccatcacactcttcatgttgaatgtgatctagaggtcataacgaagcctttacactacttagaatctagccttgcaccagcacgatacgtgttcctccatcctaggcatacttggaatatacctagaaccgttaagtggcgggcccacgccttaaacttaacgccgtggtggcggacacgacgggaacccaccacgtggcacaataccgttgtattggacagacttagtcacctaaactaccacgtcggggcaaataggaagttcctctgaatcatcgactaattcctcagaattatcgactaactcatacacaccggcctaccagaatgcaaggctagtcctaaatagattaatcagcttaggccatcccatactagcacatgtggatgtacggataactttaaatgggtgacacaagttcggtccttatggacttgggcaaacacttcccctatcggtatgcaactaataccatatgcacaccacttgccgcccaagtataaaatcacattttacacattttagttcgtaaatacccatcatattcattttattccagcaagggttcatgtataaaaattcacattttaattatagatggaatgagcatttgcatatttctaagcatggctgagcaagtagttgcacatagagcatatataaacccatttgagcacaaagagtgtactctaaccatttctaggggttcaaacagcaagaggatcaattattcaaggtggaatatgcagcaaataagtcataactaccttaacccaatttcaaataccgatatagtctaagttcacatgcaactttgcaaacaaatattttcattcctcaaatcatgggattcaatgtgttcaaaggatgggaggagaaaacttgccttgatcagagaattgttagcacctaatccacttcttcaccgattatgcaattatctagataaaggacacgatatgcaattaaacaccgaaagagctgaaaatccaaaatgctctaaaatgcatgatttatgcacagtgggttggtactgatctaaaatgaatttaggtgaaataattcctattttattttattccatttgggagttatgaattttagaagttttatcggtttatagtagtatagtcttaggtagtgttatgaaatacttttgtaaagtgatttttactagattagacttcataggagtgtgaagttgtgttttctaagactaacacatttggtttcacaatttttggagttataatgattttcttatagattttacaagttacaacatgttttaggcatatagtgttttatatgttcatgacttttgagtgataggttcagaacatgctacttcctgtttaagttgaataaaaggaataatttggttaactaaaacatttttagttcacatgtttatgatctttactagtatggttcatattttataaactagagatgctctaatctaaactagcaatatattatattaacctagaaattgttatatgagctaagttcttctaattttagtggatgaggatggaactatggcttcactggtcaatcaagtttttatttaggtttaattagacctaaagtgtatatatatacttatacatgtttatgtattacttaaacaacactatgtgtttaaattcttatttcactaagttaaggttttgatcaatgttctctacagaaggtgccaaattttattttactatgttgaagataactatttgctggttctatagaaactttgttcatttcatttggactaaaaatgaattttctacaagtttttacaaattaatggctgctctatgttagtaaatccttatatgaatatttagagacttttactacacagtaagtatataatattatttcataacttggaaatacatgttttaatgatcctacagaacttaagtttactcaaattgaagctaaattgggttctacatcaatttctaaagtttagcttatctaaaattaatcattatagagattatagttttagaggcatttgatgcaaagtaagtaattacttttatttcacctaatcagagactgtatgatgatgaatctgtagaatttgattttgtttcaaaatgagttgaaatgaattttctatgcattttataagtttgtacatgttttatgtatgacttatcttagataaatcttagagacattatttgtacagtaagtgtcaagttttatattcctggaataaatttcataacttcaagaatctacagcaactggaatcacttcaaaatgagctatatttgattttatatagattttacaactttgtgcatttttctgctaaacatataattgtttgggcattttcctaatttttcttcagattttaaaggatgggtccacatggctgtgagggaccaatatgcacaaaggcccttgaggtttctaggaatcaacccgcagtcctaggcccatatgtcagttactaacatttttcgcaaaaacccctggtttctcgggaaatagatcccgcagtcccctagttttaggtttgtatgcaaaacgatgcttgagttttagtttatttacagattattactggtcctacttgtaagtgactgttccagttgttaatacatccctgggagtctttaaatttcaaaagccatgcccttgctctggacagagcagagcagcagcacagccgcgagcttcacagcatcaccagtggcgaacaacggcgattcagcttaagctcccaaaacaaaaagtgtagagaacaaccgtgcgaacctattggtggctttctggcaagatttggtgctctatagcggctgttagggtgttagaggcggtggctaagctcggcttgcacatgcacgtgggttttgaggctcgatttaatcgtgcatgcgtatgataaggactctagggactactaggaggctcaccaagaatcaaacgcggctcggcgaagtcttagcgacggtgtactggttcggcgacggcgcaactgctacggtcgtcgtcgacggtgtactcccgggcttctactgcatatagagggtgcatgcttcggtttagatcagcacaaggtagctctaggcgaaaaagattgcgccgaagctcaccagagaaggagaaagaaaggaatggcgtcggcggccagagcgcgacggtgttccgagttgacgcggtcgcgttcccggagattggctgcactaaaagaggcgttcttggtggcgttagagacggcattgagagggaattacagaatgcttattgaacggaaatggagctcaccggattgcgacggcgtcgaggacttctctcaccggcgccggagttggcacccccgttcccggcgaatccgaggcggggtacctcggttcttccgcgaaacgagacaagggctgagagagagtntngagaagttgggtcgggcccgggtcggggatttaaggtaaccgggttcggccccgggcgggaaagaattggggcgaggggaggggaaggcctcggcctcttccgcgctcaacgcgtgctcacacgcgtggcgcgcgggtctgagtcgtgggcccgtgtggagagggatgtgaggctgacaatggggtcccactaggcaagagagaggtgtagaaggaggaagtgttggacagggctgaacctagcctaaggcactgacaagtggggccaactcgatggaaactaggccagggagagagatatgggtagaagactggtaaacttgatttttagattaattttcggaattattttctcctctaactttgtagcttcataacttaatgtgtggaccaaattatctagtgttgaatttactggaggtaaatgattacacctagattccattttctttggttgcactcaaaaataatgggtagactgctcacagaaattaaacaaagatgggctattagaaagctagattgaatttttaggaggcttaaacagaggaggaaaattctagaaaaattacatttattcatgataactaatctagtgtttgaataaatcatttcccatgttcacttatgtgcagttcaatgtacttttggatgaaatatggttttagccaattaaatttaatttgatttcttttagttgtctgcttcaaccgattaatttgagatatcaacttgagtgttaacatgttaccaaattacagaggataagtttgtgctaatcattgtccacataaatttttccatgattttatcttgcacaaaatattttagagaattaagttgacctttgtttgtatatgtgttcccacttcataattgcatctaatattattatagggattacattaaacttgttttagactgagaagatgatatttgagtttaatattaagtccacatgttatcactcaagattaactataggtttgtttagtgaagtaattcttttagattatgctcatgggatctattatggaatgcaagaccaaaactccaaatgcacaaagaactcgagcctaggcatgcattatgtacatgtatgcttggtgacatttctagtctaatgttgggaatgaaaagattttattttgttctcaaattttaatcatgcaatggtttaagttggtcatcacctaaattaaaacggaaattttggctctcaaaattggagaagttaacctctaactattttgacaagaaattttaagtcctaaaatttcgggtatgttacataatagagtacaaataaataactatttaatattcgcaaacaaattattacagaggtagatagttcctctcaaagaataaccttctacgcagcggaaaaaaaaataaaactataacaaactacggaacagctatggcgactccactccacaggcatcttaaccagaacaagctcaatccttcagatcatcaccttcgctgaaatactcctcttctgatgattaaatattgcaagaatgagcatatgacatactcaacaagccacacagcaagtatgcaagtgcacaaggataccaagggatgg

SEQ ID NO: 5091 - DNA, 6898 bp, Oryza sativa
  unsure (1)..(6898): unsure at all n locations
tcaaccctagtcaaactcacctgtgacgggctccaactatgtggccgtcagaggtggcctcacctgtgacgggcgccaaccgtggagccgtcacaggtaagaccacctgtgacgggcccaacactctgggccgtcacaggtgaggtcacctgtgncggccctacagatagagcccgtcacaggtgagtttgcctagagcaattttattttattttatttcacttagttcttttattttccttaacatattttcacatacactacatatttttttatacttaattattttatttcactaacagtagtaattgcacttcattattatactactttaattatattatttccaatgcttatacttgcttaattattttatttcacttctagtgggtgcttcacttaattattttatttgactatttcataagcaatatactattgatcattgcgaacatattagagtcatacagataacagacatgtagacataaactacgtacataaattacaaaaataatccttcctcatggtcgacacgtgcatattgaacttcatcttcttcctcctcctcttctagaggtatttcttgacctatgccgtggacgtgctggttgtaatcatcctcgtctgcaatattgtccaatccaacaattctccttttcccttcacgaacaacatgtagtttcttgttacacgggtcaactatgtagaacacttgaacaacttgtttggcgagaacgaacggttcatccttgtacgcgttgttagccaagttgacagtggtgaaaccttcattgtcaacttttacattgcgaagatcgacccatcgacaacgaaacaacgggactttgaacttcaagtaatctagctccaatatttgctcaactctaccatagtattgatcacgacgaccaccgtcactagcagcctcgatgcgtaaaccactgttctgcactgtgcatttgctgtcttgcttgaccgtgtgaaaggtgtatccatttatgtcatatccttgccaggtggtgccactccattcaggaccctgtgacaaccactgaagtgtttcactaggcaagttctgcaacctggcaattcggttcttcagccactcgttgaaagaagacatgtgcttattcctgacccaactctctgatcggcctgggttctcttgtcggataactgcaaggtgttcgtcaacgtacggcaccacctcagtcatatgctgtagtaccgtgaaatgagctttatcgtacaccttccgatccaacctaatagtctttcttccaacagtaccaacaccgtcaagcctcccttcgtgatgagatcgtggtaatccaattgaagatgtttctgacatgtagtccacacaaaattcgatggcctcttcggtggtgtaactctcgatgatactcccctcggggtgtgaacggttccgtacataacccttaaggatccccagatacctttcgcaaagatacatctgcgtcatgaatgctggaccacagcactttgtttgcctcacaaggtgcaccggaagatgttccattatgtcaaagaaagttggaggaaagtacatctcaagatgacatagggttctcacaagttctgcctgtagttcatctagtccctcgggatcaatgatcttctggccgattgcatggaagaaggaacacaaccgctggatcgtgtgtcgcaccttaggaggcaaaatattccttattgcaacgggcaacagctgtgtgataagaacgtggcaatcatgcgacttcattccaaccaacttaagatcttgcagtgaaacgagcctactgattcttgatgagtaaccagatggaacctttataccactcaaacatgttagcaaatcaatcttctcttctttcgagagagtgtagcaggctggaggaaggtaaaccctgccggattccgtggttatgggatgtagctccgaccgaacacccatatcttccagatctcgtcgggcgttgagaccatcctttgtagcacctgggttaagcagtaatcccattaaactctcgcatacattcttctcgacatgcatcaaatctatgcagtggcgaacttcaagatccttccagtatggtagtctccagaatattgacttcttttttcacatgctcctctcttttgtcttttgtttttccacatgctcctctgttttttccttcgatgtgctcttctcttttcgctttccaactttcctcttttttccaaactcgttggttattcccatcactaagttgtgcacctctgtccctgttagctctgtcgggggtccggctgtatctctgtgtccattgaaattctttctcatattcctatacgggtgataccttgggagaaatctcctgtgacccatgtagaccgtcttgtgtgaatgcttcaaccatttgcttcttgtttcctccatacactccgaacacgcccatttccctttcacagtttggccagaaaggttgccaagggccggataatcgttgatggtacaaaacagcatcgcatggaggttgaaatactcttgtgcatatgcgtcccatgttcgtgtgccctcattccatagcctttcgaagtcatcgattatcggttcaaggaacacatcgatatcgttgccaggttgtctcggtccttgaatgagcatggcaagcataatgtactttcttttgaaacacaaccagggaggaaggttatagttaacaagcagaactggccatgtactgtgacgactgctcaaatcaccaaaaggattaatgccgtccgtacacattgcgaaacgcatgtttcttgggtcatttgagaattcctggtaaatcctatcgattgtcctccactgcactgaatctgctgggtgcctcagcatagtatcgactttccgttcttcggcatgccagcgcacaagcttagcttgttccttgttcgcaaacattctcttcatgcgctccgcaattgggagataccacaccacctttgctgggcctcccctctttgacttacttccttcaccttcactctttgctcgtttgtatcttgatcccccacagatagggcagacatccaagtcagcgtattccttgtaatacaaaatgcagtcgttcggacatgcatgaattcttctgacctccaggcccaacggacataatacttgcttcgcttcatatgtcgtctgaggtaaattgttcccctctggcaacagatcctttaacagctcaaggagttctgtaaaactcttgtccgaccagccattactagccttaagcttcatcatttccaacatgcatgacaacttgctgtgcttcgacttgcatccatcatacaacggcatctggcaatcttccaccaacttactaaacttctcataatctctgtcgttgtcctttgcgtcttcaatgtcatgcaacattgtagatagacattgagtgtccaaatctatggtctctccacctaaaggagaaggtacgaacatgccttctcgagctgcggcggtgttctctacatcctgatccaacacttcttcagctgcgacatcaggcgcctcttgctctccatgcttggtccagcaggtatatttcttcatgaatccattcattatcaaatgagcatgcacttcatccttgtcttcgatcatctgttcattcttacagtccctacatgggcacaacatgtgcatgctcatcctactttttctgtcactatccgcaaatgtgacaaattcagtgaccccctctctatactcggtagacgaacgatgcgcatagtacatccatctacgatccatctgaaatcaacaacatacgaagaaaaataaatgatgatcgatatgttgagaatgaatggagaataatgtgttttttaccttgaattttagtaaaaaatcgccccccttgccctcccaaccgatttgtgaacagtacaatggtcgggatggaaagcagttggcagtttgggggtatttatagacccaacacacctcaaacgggttagataaaaaaagcccgtcaaaggtattgctcatacctttgacgggcttctattcaacggcccgtcactggtatccgctcacctgtgacgggccagaaatgaaagccgtcacaggtggcggcccatcacatctgacggcttctaatgtatcggcccgtcacaggtgaggggataccagtgacgggttggaagaaaaactcgtcactggtatacctctgacgggttttcctttcggcccgtcacaggtgaggggatacctgtgacgggccgcggccagatgcctcaccggtgacggcatcccgtataacccgtcaaaggtaatggtcaatactgaccaattcatttgcccgtcacaggtatcccgtcagaggtgtgaggatcccatgggaagctgacgccaagtaggcaagtacccactacgtacacacatcttccaattggggtttacggaatgagataatccaaaaaataacattgacaagtatccaaatctaagaaatgccatcaacaagtgtgggttctaagaaatgacatcgtacaaacgattttgtctcaaaaatgccatcgtcgttagggttccgtctattccgcgccattaagtgctataggatgaacagtgtatttaatgacacgggatggacggaaccctaacggcgatggtatttttgggataaagtcgtttatacgatggtattttttggaactcactcttgtcgatgacacttcttggatttggacgcttgtcaattgcatttcttggattatctcttagggaatacgacctgatgtgatgactagtagctggaaattattcgcatttgtgtgtattatataggtgtatatgtatatatccgcttcgtggagtcagtcttgctgtttcgatgcggtagaaatgcaaattcttcctccgttcttaaaaatgtgacaacctagtaccggatatgacgcatcctagtactatgaatctggacatacatatgtccagatttatcgtagtagaatatgtcgcatccaatattagattcgctttttatgggataaagggagtagacttgagtttcttgctggccgcttcatactagctggagtagactgtattagagcaaaagtcattgtttaatcaatgtattgttagttaaactattactccctctgtcttaatatgtagcaatctaggatgggtaatcccatcctaggactacgaatctggatataccttatgtccagattcatagtcgtagtatggaacccatcctaggttgctacgtactgggacggagggagtagtagtattttcttccttgttccgtacgctctcctgacacaagtggcagcgcatggcagtcaattggttgaattgctcatgcctgctagcgcttaagagcaatgctaatagtatagctcgttgctgactaatagcccattactaaagtcagctactatgttggctgaaaacatctcataatcaaataattaattataacatgcacatattagtgtgtatgatcaagagtgaagtgtatccttgtagccatttgtaccaggactatatcagagaccgtatcaaccaaattctctgtagcacaaaaattacaaggcactatctatctattatattattaaaacagttttgaaacgagtcaccacgtttgctacgaaggctagaaatttccacattaatcgaagaaaaagataaaatctacaccgttagatcgtgatagtcctgaattataacggttaagatttagtaaggctacaaataagttttgggaactaacttaaatgcaatagataggaaactaaaaagctacatagcactcggccgatcaatgtttggctctgtctaaggaaacataaattaattaggagtaggattctgacgtaatcggattaggactcgggcatacatatttgaatgcatatggcgctagggcctgtaatctgtgactagagtcatgcaaattcaccatgacaattgacaaatatataataaaacataatttgttaagcgtttaaaggtgatctaaagcaatataaactgaactaataaatggcagagcatatatacatatatatatacgcggatacgcccatgcattgctaagagaataggaacaactgaacaatacatacatatagcacataccatatgttgtatgcacaagcctatagaagtaaaggccatagtcatatggctgcactggcttacgattaattaggtagtctaaatgcaaaacgccagcggctaaaggcatgcgcgtaattcaaaatatacttaattaatttcataaaagatgagtcatcacgggaaaaataattttatgtcataagaccttcaccttcatggcagcttctgttggatagtatagggatgagagaaatactgcgtaacgtggattgattgtattgagcctcaggggagggcgatatatatagaagtacataggaaggagataaggaaggattacagatatagaaggagtcctcacaaatcaattctatcctaaaacatctctaactaccatatttcatcagtcagaagtgcaatttgatatatgtgtgcacttttgggtagaagaaaaaaataattgtaattcaaaaaaagaatattaaaagaacggtctatctagaaaacgacacaagattaattaaaattcaaaaataataaaataaatttcaacattagaaaaaagtaatagtttaagtaggataaaagctaaaattcataattaaaaataagaaatgttgcaagaagagaccatcttaaaagaaacatgagatcgattaattaaaatttcgagtaaaaaataaaataaatttagaaattataaaataaaattgagagtttaagtaggaatataatttctaaataactgaacatttagaatgaaaattctcatat

SEQ ID NO: 5092 - DNA, 7445 bp, Oryza sativa
aagaaatcgatccgagaaaaacaaaactcggttttggagataaactcgaaaacgagttcgattcgggcaagatactcaacgatttgctccgatttttgggggtaaagatagaggaggatgagaggataaaaacccccctaacaatcggactcggggcggctggattggggcggatttgagggcgcaaggcggcggctcgggcttggcatggccggccggccggaggtaggagaagggcccgacatgtgggccccacatgtcggtgtcccacgtgagggagggcgggcggtgtcggctgggccgaatgggccggctcggccgcttgggcggggagggggcatgttgggccaaactcggcccaacggcttaaaggaggagttttggaactttttaattaaaaaaaatttgtgaaatgttgtttaatttattaaaaatacttcccttgctcaaataattcccagaaaaatctagaaaatagaggagcaagtgtagtatttaataaaattttatctagctcatttttatgttgaaaattttcctagattattagggtttagcttgtcggcttttaatttaaatttctaaaaattccaattaaacaacaatttatataattaggatttttagggcgtgacaaacctaccccccttaaacggaatctcgtcctcgagattcagaagaactggcaaagagatgcggatgagctgacttcaattcatcttctcgttcccaagttgattcttcttctgaatgattgctccactgaaccttgcagaaccgtataacgcgattcctggtattcctctcgcttacttccaagattctgactggcttctcaacataagttaaatcttcttgaagctctatacgatcaggatctgcttcctccgtaggtacacgtaaacacttcttcaactgagacacgtggaacacgtcatgtattcccgccattgacggagacaactctaactgataagctacctcacctcttcgactcacaatcttaaaaggtcccacgaaacgcggtgccaatttccctttggtttgaaaacgatgaacacctcgtaacggcgtaacccgaaggtatacataatctccttcttcgaaagccaaatctctgcgacgattgtcggcatagctcttctgacgtgactgagcaacgcgcaacctttcttggataatcttcactttttcttctgcctctcgcagtatgtctgtcccaaaaacttgacgttcaccggtttgatcccaaaggagcggcgtacggcactttcggccatataatgcttcatacggagccatttgcaaactagcttgataactgttgttatatgagaattccgcgtacggcaaattcttatcccaacttccaccaaaatctagaacacaggctctcaacatatcttctaaaatttggtttactctttccgtctgaccatctgtgtcacatcctgattttcgtttcaggatttataaattatttaataaattattaatagaatttatattaaatgttctttaatttacaagtgaagttaaatgtgggaaataaaatttcttaaatctaaagcatggatggatttaattttggttaaattctccatggttaagtcaactctctgaaattttctcggatttttcagagctcaattcttaaataatacaaagaacagttcagtaattatttgatcattaatgatctaagtataattgttaagagcttttcttgtttaaaaatccttaaattataaattgttgtttaaaaggaattattagaaatgattttaaaagtctaaaagagaagatctaattttaatttgcaaaatctcaatataaaaaggggcctgataaaatttcattaaatactttgctcaattctataattcctagatttttctgggatttatttgagctaaggaagtatttttaataaatggaattgcatttaagaaataatttaattgaaaaaggttttaaaaagtcttcttttggctttgggccgaaagccggcccaaaacccctctctctctctttccctcggcccagccggcccagttcgccgagccgccgctctcctctctctctcagccgctgacaggtgggccccacttgtcggtttcgtcttcctccttcggccgccgccgcccgcaaaccctagtgcgccgccgccgccttctccttccaaatccgctcgattctttccttctccggtgaaatctttagaggggaaatgatcttctcgatctcctcttccttttctcttttggaatctccggtcaattcggtttggaaactcgatggaatcgagatcgaatcggattcctctctctcccaaaccctaaagtttccttctcgccgccggtcgccgtgggcctccgtcgccgctcgctagcccctttataaggacccccaagctctcctctacccgtcgcctccctcgccttcgcccgccgtcgtgtgtagcgccctagcctcgggagcttttgcgccgccgtcgctgccgttcgtccagccatgcgccgccgtcgctacggtcgtcgtcgtcactcgggaaggccaccgtcgggatcgccaagtcgccgccgtccccgtccgccgcttcgccgccgccgaagaccgccggagcgccgtcgccgttgtcgacccgaagagcttcgccgcttcctcctcgtcgctgccgccgtccgttggtcttccgccgttcctttggtcaccggtgagttcgccgcgtcgccctctacccattggtgccctccgttcgcgtcgtcgcgccgccgttcgccggcgagcatgtgagcccgagtcgccgagccgccgccgccggggtgacgtcatcgctgacgtcatcggggtcgtccgccgtgagccggtcgtggaccgatcaatctcggccgtccgttttggatagggttgatctcggtcgtccgttcgcgtgaaccgccgcccgtgcgcccggtccaccgaaaccctagccgctgacgcaataatccttcttttccttttcaaaaataattcattattgcgtcataattcgattaaaatccatataaaggttttaatctgatttaatctttaaaaattcataactaattcatcttaactcagtttaatgtggttcaagttgcaaaagttgtataaaataaagatctacatattaaaattgtccataaattgaattaaatttatttaattctttttaaatgggctttaaatagatttaatcttgtaaaattcataataaattcatatgaaatcagaatgaggccgttcaagtctctaaattcatctaaaatcatgatctacatgtttgtttactttttatgtattgtttatttggtttttattagtctttttccttgttttgcgtgatagtttgtcgtttccgtcgttgcgaaggttcgcgagtgcgccggaagtattcaagaagattaattgaagaccgattattgcaaggcaagtcacacagatcctaaacacaatcctttgagcatgttgatcctatatttaaattctctatttatttcaactgtgcatttattttcgaatgtcattgggtggaattaacctattctttgttatggcccttttgttcttgattactttattccttgataccttgggttattataattggactagttgagctttatatatatattggttcaactagatattagatatgattgcttagccatgcttagaaacattagcacacatttgggataactaatgtttcactatcacttatggttatatttaatggtagctcacgatggtcaatcgtgattggttaattaattacttgccaactaaaacttgataatggtgggttgtgagcacatggttttgagagtcgtgctcatgacaattaaggaccggttcgcgagctactgttgtgaaacattaaccgtgccaaccacaagccagcgtgggcaacggctttatcttttgtatagcatggttcattgcggggcaccagactgagaagtggcggagataagcccacgggggtcgctggggagtccatgccttgttttataagggggtgattatgatccaggaatggtgcgctgcggtggattgtgttatgcaaggggtactgtcacagcccctttccgaggtaccgtggtggtactgaggcacatggtgacatgatgtggggctgtgtcttgtgggtacagtggtacacctctggccagagtaaaactattcgaatagccgtgcccgcggttatgggcgagttgagcaatgtttttcgtgattagtcccacacctctcaccataattttagatgttataactggtaataatttgcttagctcctggtttggagttagatctgttcagccgggtatggttgttcagaatggttgggcctgtgcagcatgggtgtgctgttcagtgttggttaaaatttctgattaattactccactgttttacttcccttaaatgttttgctaaatgctgcttttgcaaatgagccgatattatgccatcctttggtatccttgtgcacttgcatatttgctgtgtggcttgctgagtatgtcatatgctcaccttgcaataatcaatcaacctcagttgaagaaaaaggatctcgaaggagaagacgtttggcttataccccagttgagctgcctgtgggagtggagccggagcttcgctagattttattttccgctgcagttttcttcatgatgaggactaagtgcctcataagtaagtatttatcgttttagttaatttgatgaatctgtatattaaattgtcagtttgtgtacctcggctgattcctggacgaggattttatgcacaaataagttcggaaattactagtgaatttccgggcgtgacaagttggtatcagagccatctcgactgtaggataagccaaatggtcaaaccttaaggactaattttccgaaaacatgatttgtgaaaatttctcctttcttccttatctagaattctttgcaaattgtttcattgtctactcccctctctctttcaacttaagtggttctgaaactagttgttgaaacttgaagacgccaatgtggtcaacttatggaggttaagtcaagtggatcgataaataagaaggtgatggtcgatctgaagggccaagtggtcaagatggaatgaagtttggatcctaccttagaacctatgccgccaaagtgtctttgaagaatagttagtaggatagaacgtttgttgtttgcttgtgtgtaggtatggttgcattcccgtcattggtgtggttcaatgatgagtgtgtaactatactaggttgcttgcttaatcaacttgaacaatataatggtctacacacatcagatcagtgttaacctggttaaggtcttaactttagcgtaacccctctcctcctatcttctctaatctgcaacagatggtgaacactcgtgctaatggaagtggaaacaataacaatgaagggaacccaactcttgctcaagttctggctcaacagactcagttaatgaacatgatgatacagcagatgcagaaccagctcaaccaagggaacaacaatgctccaccgccgcagaacaagttaactgattttcttcgtgtgaggccacctaccttttctagcactaccaacccagtggaagcaggtgattggttgcacactattgagaagaagttggaactgctccagtgcacggatcaggagaaagttgttttcgcttcacatcagttgcaaggacctgcatcagaatggtgggatcatttccggatgaacaaagcagaaggacaaccaatcacttgggcggagttcacggaagcattcaagaagacacacatacctgcaggtgttgttgctttgaagaagcgtgagttccgggcacttaagcaaaaggatcgtaccgtgacggaatatcttcatgagttcaatcgtctagctcgctatgctccagaagatgtgcgtactgacgaggaaaggcaggagaagtttttggaaggcttaaaggatgagctatcagttatgttgatctctcatgactatgaggattttcaggagttggttgacaaagcaattcgacttgaagacaagaagaacaggatggataaccgtaaaaggagaatgactgtattccaggaggcacaaggtagtagccagaggcagtgtatcaagccactccaaattggtgaatcttcttccgctggtcaaggacagtcgcaacagttgaacatcggtggtgagatcaaatcagagactaatgaaagcaatgaagttaacatcgagcaagctaatcagccggtgccagttcagcaggatcagtctcaggagaataacagtagtggaaggaagcagcaggtatgtttcaactgttacaagccaggccactttgctagagagtgtccgaagccaaagcatcagcagccgcaaggtcaggtcaacaacattgttgtcacaggagccaatgcagtgccagttgcgtcttcaagagttgtgtcttcaagtgttacaactcagccaccagtttcaaggcagcagtagttttcttcaaagccttagaataattatcggagttatggaataagatagactgcagtttacctattccctttttctttctagccgttccgaatctcgggacgagattctttgtaaggggggtagtttgtcacatcctgattttcgtttcaggatttataaattatttaataaattattaatagaatttatattaaatgttctttaatttacaagtgaagttaaatgtgggaaataaaatttcttaaatctaaagcatggatggatttaattttggttaaattctccatggttaagtcaactctctgaaattttctcggatttttcagagctcaattcttaaataatacaaagaacagttcagtaattatttgatcattaatgatctaagtataattgttaagagcttttcttgtttaaaaatccttaaattataaattgttgtttaaaaggaattattagaaatgattttaaaagtctaaaagagaagatctaattttaatttgcaaaatctcaatataaaaaggggcctgataaaatttcattaaatactttgctcaattctataattcctagatttttctgggatttatttgagctaaggaagtatttttaataaatggaattgcatttaagaaataatttaattgaaaaaggttttaaaaagtcttcttttggctttgggccgaaagccggcccaaaacccctctctctctctttccctcggcccagccggcccagttcgccgagccgccgctctcctctctctctcagccgctgacaggtgggccccacttgtcggtttcgtcttcctccttcggccgccgccgcccgcaaaccctagcgcgccgccgccgccttctccttccaaatccgctcgattctttccttttccggtgaaatctttagagggg

SEQ ID NO: 5093 - DNA, 57182 bp, Oryza sativa
ggaataagaaggatctcggtgcgggtcgcagggtgtccagtgttaacggggaatcagcgtgcgccgaggtagagttgacctgcagggtgctgctatctaggtatgagagagagcgtgggcttttgtgcgcgaaagggagacaaccgtctggggggaaggcgccggaagcgcggtttagtgggataaagttggggagagtggcggacggggatatagagttggaggtgcatctgtataggggtgtgggcctatagagagatatacagacaggcacctatatatatgtatatatatatatatatatatatatatatatatatatatatatatgcacatatatatatatatatatatatatatatatatatatatatatatatatatatatatatatatatatatatatataatattgtattatacattctcttgttttatagatgaacccttttcaatgggaaattgtatctttttcactagaaccaaccaccaaagaagtccatttctatggttaacaaacataactccggtgccccacttacattacaatatatatttcttgcacgcatgatcgagcactatatatatatttatatatagtagacacaaagggtcctacactataatgtgcactcaagcagatatcaatagtgcttcagaaagttctccatgcggtgaaattaagacatatacaacagtgtgtttgtactacattctactcgtgtcaaaaacatggagatgttgttttgggaactaatatgcatggccaccaatttaaagtataaccccgatcaacaattagtttctattacaatatatatgtatatatacaacctaaaggagttattatattataaaagtattattcaacacggcactatcacagaacagcttatcagtgccggttcaagataactcgatactgatgatggttttccgtcccaaaatacaagcttgcgccatgcatatgttctcttggcactgatggggagatatcagtaccgggtcttacaaccattcggcactaattgtttggcaacatatcaatgcggagtgttgctattaatcggcactgatgagtaacgcatcagtgtcgggtcttgccagttggagcgtgataactaattttggtaggaaaaacatcagtgccgggtttttaagagtactcggcactaatgccactcacatcagtgtcaggtattcttatgatccagcattgatgatctcaaccatattatttttgtttatttaggatatatgaacttaaccttttcatacgtactcggattgcaacaaaacatatatgggaattgtagctctcaacgagatctatgattttgtagttgacaaatttttcatttgaattcttttaaatattcaaatccataatttaaatctcggtaaggatggctcaaaaggaaaaaaaaatattcatttgctaacaagattgatgtgtaggtgagttggtaaagataggtgcatgagaggagaggtttttaggttcgaatctacaccatgacaagaattatatttgagttgaagaaatagtggttgcaccttcatatatacatagctatacgcttcttgacgtcaattcttgtttgtaggattatttacacttgcatcctatttgtgggtgtgtccaatgtctcacttcacagtccatctctcagtcgtgccgaacaatgtctcactgcacacagtccatctcagtcgtgccgaacacatataatgtactcaatcatgctaaagtgaaattgttgcaacataatgtttgcacaagacttcaacagagagatgaacgttgctaagcactcctgtcgtctcacattcctataggagaaatgtgcatgatatggagaaattcttttctctgaggaaatccttgtctcttttctttgcggggtgtatggatgactcatttgatatactttcagctagaaatcttatgttgttgagttttgaattttgctgcgccctcttacgccaaagaaaagatcgattctttttttttgttgcattgttgttcttgtgtttgtgaatttggagtagtcgctacacaccatatatattgcaagattgccaaacattttgatttcaagggcctacatttaatagattgagattataaaatgttccatgcgactcccatgatatcctggacaaatactcattgttaatatatctaattgcttcgtataccaaatagaggaatttttatggtccagcaggcagtttcagtaccaaatctcgtccattggattgaagggatctaacggtgtttggcatggaagggcatcactgtaatttagcattagacaagcgattgaatcggcttgagtatcatgaaagaaaccctacgtcgttttctctcgatctgaaatcatgtcagcgctgctcctgggagggaggttgatttgctcttggtttgtacttccacggtggcgcttccttcgtcgctacaatcgttatcgttgatttcatcgccaccgcgttcatcactggagcggtcttgctgttgttgctgttgcactcctcgctaaagcgctcatcgacaccgcaatgctcgctgccagcaacaaacaaagttgggggaagtttcgatataacttatctgtggggcacgaaggatggtgagaagatgaaatccccgaaggtattcaattgggcagagatcaggaaggagtagatgaagacaaatgtgtcattggattggattcatgaggtatgatatattctttcattcaatgagaggacgaatatggagagacgaccgcgcgtggcgctagctgggagagaggatgagtagggagaaaaacactacgacaccacacaaggataagacgacacaagtgcgttccgaaagcatgcccatcctacctagcttgatcggacggtcagatttgatttgttacaacgagatataggtacctcaagataccacttgttggatcaaaacaaatttctttagggaaagattgtccccagattcatttatttggacagaagagtaagtttagtattattaaataatttgcaactatatagcttaactacgaagctaacggcccggcgagaaataactaggaagctaacaagttggacaatacagttgatcaaacgtgaaaccagaaaatttttacttgtacaaacatgcgatgattaatcttggtgatgaacaattgtcaaaggtaagtatttattgaaaatgcagtgaacagtgttttctgactgtcggtgaacagtgtgttggcactgggagcctgtcaaactaagcaatgcgcaccaattagatcggaggtgtccaggtagcccgacggtcaaaccggcagactctgggagggagtcagttttgggttgttttcgtgaaatttctagattgtttcatatttatgactactaaatcatttctatacatatgtgatattgtttgtgtgctgatatgagtcaagttggtgctaacttgtactcggacatagagtttcattgttgttcatgtgcatgtgttgcttgaggccgtgggagtatagctggtgatggattgggactaggcttgtgaaaagttaaggtctagacaatcaatgacatgatgcgggatgctcaggctagacaacatgcacgtggaggtgaaagttttcatatgacatatacctggtgttgtgtgcgtttagaaagagtcaaaatttggattgcagtacaagtttggaaacattagagtgcggagttgtatggggatgctctttccctggtttgataggtttcctatatatgtgatcaatattcctagttgtagttggattcgtaactaggggcaaccacgttgtgggcacaaatagaagaggggttgattctaaaagatttcgactttctaggagatgagtgttagggtttgcttcaagatttcaatcctagttcgtgaggagagatgagtccattagatgtattttgtaaacacatattgatgcaataaagttttgtcgatacatgtttttctgggttccgacacggtcagactgttaggattatgccggtctaaccggcggcgagcaaccggtcagaccggctgtggcgagaaggcagtaggcaaggaggtggcaatttgaccggctagactacattggtcagactggcggcaaagtgcggtcataccgttgtacgtatggcggtcagaccggctacgccaaggatttcatcaggttagagggtaatttttttaattctatggaaagatctaatacgaatgttatacaagggtaatgattatataaatagaaagtatagaaattttttgttgaactaatatacacattttaggaggaaatattatacgtagaaaatttaacattttttataaaaaacactactagaaaaataatttattgccacgaaaaaaattgtagcatcaatgctaaaattgttgcaatagatacatgttgccacaatcttaaaatcgttgctagccgtggtaataaatagcgtggtaataggttattgcaacgatttttatttagttgcaataaattttgttattgccataaaatgtatgtggcaaaaaatatatattgcaacacttcatatcgttgcaataaataactattgccaccactctatgtgtggcattagttctacgtaccaaattaaatatttcaatattaatttatcatcctaactattttcttttgatatcttgtcatggctaggattcgaacccaagatctctccttcacgcgcgctctccatgaccaactcacctacgcatcaattttgtttaaaaatacatataattccatttgagactgcttaactgagatttgaatcatgaatttgagtatttaaaagatttcaaatgaaaaatttaaattgtagatctcatcgagaggtataaatttcatataaaatttgtcctaatccgtgtccatatgaaaagaataagctaaattatgagatgataaattttttattgcaacgtatttgttgatcatggcaatagaaaatagtgaaagtaccatgtattgtgcaaattgccacaaaaattaaatttgtggcgatagaacatgtttttttgcaatagcaatatttttatggcgatagctcatttcctattgcaacaaaaatactgaataaaacaacgattgtaaatcattgcaacaaagtatagttatttgccacagaaaaattatcattgcgatagtacaatatattgccccaaattattttcgttgcaattaattggtggcaatagctcaattatcttgtagtgaaaatgaatgtatatcatttttaaggatggtaaatataatcattactcttgtataacattcgtattagatgatatgtaaacacaacaaatatgctataggtagcataaataaaatcaaacatatactcttttcaataaataaaatattttaaaattttgatgatataaaaataatcttgtcgtggaaaaacctaatgcaacgcactcatgaatataatagttttatacaagtgtctacacttccaataatatgctgcaaatatttctatattccttccacgcctaagagaaaaattgaccatatcttagctattaaacggtcaactaacaacatggctataaatgtgatcaaaataaaaattcaagggcatacaagggagtgaataaaacttacgggtatataagggatcagctaaagttctagggacatgtaagtaattttctcttaaatattttgttcacatagttagggaatatggccagaaacaagcaacaattaattaggtcctcagtgctaattggtttttagaattaacttgcaagcacctcaaaaaacacaactgcaattaatcttttgaattgtgtgtgttgatccctatgtagctaaacatgaaatcacataaataacctatgaaacttagagtggagacgatactaaatggcaacttcagtggaattaggaatgaaaagtagcaaatgtaatatataattaaaaaaacataatgggctattaataacttctctagtaatagaaaattttggcctacttcttcaactgtccaatgctgaaaatgtttctttgattttggtgatttcagcataaacatcttggattaatggacgatctccaggtgactccagagagcattgtagaccaattttcagcatctgtgtgatacatctctccattatgctcatttcatcaacgtcattatctaaatcatggttccttccttcatgtgtataccgtggaatgatactggcctctaaaatctcaacaacattatgtggatatgcacagtccactaatttgtgaatgtttagcccatccttgaacatgtcatcagttggatgctttcctgtgagcatttctagcagaataactccatagctatagacatcgcctgcagttgatatttggcaacccatcccatattctgcattcaatattaacagaattgttttaaaaatattctaatttgctaagctggcttcaagagacagtatatgaagtaagtattcagtccttaaaataacaaggttagtagcgaaagcaagaattcacatgtgaagaaaacaagcttaaatttcttggatgatagtcgtatatgtatttctgaataagatacgcctaaattagtcaatatgaagaatatatagaagcatgaatgttcacctggtgcaatatatccaactgaccctcttggtcctgctatgcttgataaactgttaagccctgctgaagaatggttacagataaagtcactaacatgagcaaccatgtcctcatccaaaagtacattacttggcttcaaatcacagtgaacaagcggaggtgtgcaccagttatggagataatccaaggcagcagcaatgtccgttgctatctgtataattgatcctagacctaatggtcttctttgtcgatgtttttgtacttttggatgaagccaactttctaggttaccattagccatgtactccaaaattagagctttaaactcttttcccattggatcgaaggaggaacatagactaatcacatgcatgagatttcggtgccgagtgttccttagcacctcgcattcagccaagaagttatttgatgctccgatttcgtcaagtttgaataccttaatggcaactggctctgcatcaattttgaatctacctatgtagaccaccccaaatgccccggaaccaaccaagttgtctgatgaaaattcattggtagctttggcaatctcagcatatgtgaacttccactccttacaagactgatcaatttgctttcccaggttatttcgcttcttgtaaagaaatgtggcaacacatatcattaggaatgtagcagcactagcaagtgggacaactattgggatgatataggatttcttgtttgttttggatgatgttgatgtgcaaagtggtaattgcagcattgaagaccctgtgcataattccctattcccttgtacgaacaccttacttgaattgctaaatacaccatatgtaggaaccattccctcgagattgttgaaggataagttgaggagctgcaaagagctgaatgtctcaaaaaattttgggatttcaccagacaagttattctgtgagagatccatctcattgatgcctcttaaactcgtgaaggagtccgggatactcccatttagaaaattcacttctaattgtagggactccaagtgaaggcactcaccaagtgtatgcggaatctctccagataattggttgttggaaatgttaatagagtcaaggttaattaaactaccaatcttagatgggatgggtccactaaatccattgtaagacaaatctaggccttttgaaagtgaggagatcgacaagagctcgggtggaatgattccattgaaggtattacatgagaggttcagcattaccaaatttttgcaccttcctatgcttgaaggtatggccccactaaagttgttctcttggagataaagctcacctaatttttcaagttttccaattgattgtgggatttccccagaaagattattgcgatgtaaccctaggacaaacaagtttacaaggttacaaagtgtttcaggaatgtcccctgagattaagttttctgctagatgaagaacagtgaggttattgaggtttcctatctctgaaggtatggtccctgcaattctgttgttggtcatatataacgtttgcaagcttcctgggagattgccaatggaactaggtaagattccatgaatcctgttgttatccaaatatattgccaccagtttggtagagtttatttttgaggacaaggatgtccagtctacagattcaaataggttggcaccaaggtccaactgggtcaagttttgcaaagcccagaaagaaggaacaacaccagtgaatgtgttatcacggacctctagcacttgaaggttcaaggcattaactaaagaggttggcagtgtgtcggtgacatgggaccgggagtatcactactaaaggcttggacaggagcaatcacccacgaggcctgacccccttgggggggtcgggcccgagggtgacgtggccgccccccctctttgtctccccgaggggtcagaccgcttccgtttcagccctgagggctgaggcgccccgaccccttgcaggtttggcgccgcatgagtgggttaggtgagcgcagcggggctcacctaaccgcatttattgcgattaggacaagcgcgtcacgccgcatgtaacgcagtgcagcgcgctcgtttatccggtctgtgatcagtcgcagaccagatcgtgggttaggtggcgacaggcggtctgacacacgcctcgccccgtcctgtcaggatgagcgcatccaagcactcgtccctagccggagccggcgtgttacctcctggagatggcacgttggtcccggtcagacatatgctaggcttcatcccaaccattacaagcaaggtgttgtatgaagaagggcaaacatgcagattgctaaactgacgcgtggtggacaagaatgaccgacatgaccggactgatactggtcatgtcatcagcagacagccatgatcccacgacgcgcctacttccgacgaaagtggaggtaggtatgggccgtcccatcagaagatgattcggtgggcaaccatgcaaatctccgtcgattcatgaagagaagggaagtcaaattggtaaaaagagaggcaagtccccacacaaaaaagagaggtggtgcatgtggtatccttgagatataaaaggaggaccttgcccactgatgagggggattcggatggggagagctagattgagaaaaaggggagagctagattgagaaaaaggggagagaatatttagagtttgagctctctcgctctcgagctctttgtaagcttcttcatacacagatccaccaaaaacacaggagtagggtattacgcttctcagcggcccgaacctgtatacatcgcccgtgtcttgagtgtttccactctcgcgaaccttccacagaccaagagcttagaacttcacccagggcccccggccgaaccggcaaaggggggcctgcgcggtctcccggtgaggagccccacgctccgtcatctggcgcgtcagatagggggctttgcgtgtgtttttctaagctctcgtattctttcgtgggcgccaagcttttcctgttcagcccaatggccgagcaagcaaacgcgcccaacctttctccgagcatcagcggagacgacggggagccaaacccacgccgtcgagctcgtactccaccgccccctccacgccaaagtcctaggcgggaggaggcgctcaagagggtcgaaggatccgcgacttcgacatccacgggtgatggagaagggcggcgagatggggagcgtcgcatcctcgtctacggtgacggcagcacgccccagggcacgctccaagctgcgggcgcgctcctacgtcacccgcccgtcgtccctgacccggagtctccagcccaacgttggctggacgacgttgccaaattggtcatgacggcgcggcagcgcctagatgctggtggacggacctccgccacaaagacctctggtactgctgccaccggctccgcgtcgtcaagacgaagggcgcggcgagcggcggccgctgttcgccattcggccgccactccttcgtcaacgcctccgacccgggaagatccgcgtggggggccggacgtccgcaccagcatcgagcgccggcgtaatggccgacgtgctgcccacgcaacggagggcgcctcctcgtccagagtgtcacctcaacacggacgcggggatcagccctccgtgcccctggttggtggtgtcggctgtagagcctttgtggcgagtcttcggaatgtccgttggcccccaaggttccggcccaccatcgccgaaaaatatgacgggagcgtcaaccccgccgagtttctccaggtctacacgaccgggatcgaggccgctgggggtgacgacagggtcatggcgaatttccttcccatggccctgaaggggcaggcgcggggttggctaatgaacttgccacccgcatctgtccactcttgggaggatttgtgccaacagttcactatgaactttcaaggcacatatccgcgcccaggtgaggaagcggacttgcacgcagtacagcgaagggatgatgagtcacttcgctcgtacattcagcggttctgtcaagtccgcaacaccataccatgcatccctgcacacgcggtgatctacgcgttcagggggggtgtgcggcacaaccgcatgctcgaaaaaatcgcctccaaagagccccagactaccgcggagctttttcagctcgcggaccgagtggctcgtaaggaggaggcatggacccggaacccctccggttccggtgtggcagcttcggccgcccccggatccgctgctcagacagggcgacgtgacaggaggaggaagaagaggtcagcccattccgacaacgagggtcatgtcctcgccgtcgagggcgcttcgcgggccacccgaaaggggaggcctgcgagcgacaaaaagaagaaggccagcgctcctagcagggagcgcccaaccggcaagtggtgcaccgtccacaacacctcccttcacgacctcgcggactgccgcgcagtcaaaagtttggctgagcggacgaggaagtgggaggaggagaggaggcaggagcgccgtgagggcaagtccccggcggttccttccggcaatcggcgaagtgaggccaagcagaaggcccccgccgaggacatcgatgatggcgatgatgacctaggtttccaagagcctggggccactattgccactgtcgatgggggagcgtgtgctcacgtttctcgccggagcctcaaggccatgaagcgagagcttctggccgcgacccctactcatgaggcgacgcgccgggcgcgatggtcggaggttgccctcaccttcgaccagaccgaccaccccctgtgcgttgcccggggaggacagatcgcaatggtggtttcccccactatttgcaacgtgaagctaaggcgtgtcctcattgatgggggagcagccctcaacatcctttcccccgcagcctttgatgctatcaaggccccggggatggtgctccggccgtcccagccgattatcggtgtgacgccgggtcacacttggccgttaggtcatattgacctcccagtcaccttcggtggatccgccaatttccgcacggagctggtgagctttgatgtggcggacctcagtctgccctacaacgcggtcctagggaggcccgcgttggtgaagttcatggcggcggtccactatgcctacctccagatgaagatgccgggccatggcgacctcaaagtcgcgctcgcttgtatggagcagcgcgcggaccacctcgccgctgcgtccaagcccgagggtggcgacgaaaggcttagcacctctgtccccgccgccccgaggcagcggatgatcacatgcgacgaggtcccggtcaaggaggttgccctgggcgacggcccgtccaagaccacacgggtcggtggtcttctggatagcaaataggaagacgcgctcgtctccttcctgcgggcaaacgctgacgtcttcgcatggagaccggcggacatgcccggggtccccagggaggtgattgagcaccgtctcgccgtgcggccgggcgcaaggccagtccggcagaaagtgcggcggcaggccccggaacgtcaagccttcatccgcgaggaggtggcgcgacttctggaggccggattcatccgcgaggtcatccatccggagtggatggcgaacccggtcgtcgttcccaaggcgaacggcaagcttcggatgtgcatcgactacaccgaccttaacaaggcatgtcctaaggacccttaccccctgcctcgcatagatcagattgtcgactccactgcggagtgcgaccttttgtgttttttagatgcatactctggttaccatcagattcgcatggctagggaggatgaggaaaaaactgcgttcattacccccataggaacttattgttatacgacaatgcccttcgggttaaataatgcaggtcctacttttcagcgtactactcgaatttctttgggtaaccaaataggacgtaatgttgaggcttatgtcgatgacttggttgtaaagacgcgcaaccaagagaccttactctcggatctagcggaaacttttgagagtctccgctccgcccgcatgaaactgaatcccgataagtgcgtgttcggtgtacctgcgggcaagcttctcgggttcttggtctctgcccgaggcatcgaggccaaccccgagaagatacgagctatagagcggatgcgccccccagcaaacttagggatgtgcaatgcgtcaccggttgtatggccgccctaagtcgattcatatcgaggctgggagagaaggcgctacccttatttaagctcctcaagcgctccgggccgtttacttggacggaggaagctgaacgtgccctcactcaattgaaggcgtatctcagctctcccccagttctggtcgcccctgagccaaatgagcccttgctactctacttagcggcgacaccgcaagtagttagtgcagcattggttgtggagcgcgatgaggaaaatcctcattccgcgcatccccaccctgtgctggcttggcccgggagagagcagggaggagaggcccccgagccaaacggtggcccaaggcccccgacgaccggagctggttctctgcccgcttgtcagacggtgccaggtgcccccgacccccaggatggcccggcggccactgcgggaaggccgcacctatcatcctctgaccccgaggctaaccctgtgctgactcgacccgggagagagcagggagaagaggcccccgagccgaacggtggcttaaggcccctgacgatcggagttggcctctcgcccgtttgtccgacgacgccaggagcccccgacccctaggacagccccgaggccactgtgggaaggccgcccctgtcgtcctccgaccccgaggtcgtcggcacagaagacaagtgcgccccgcgaggccacttggacgaagaacgcccctgggatgcggcccctggcgaagaggatcggccccaccgaaaggtgcagcggcccgtttacttcgttagtgaggccctccgggacgccaagacccgataccctcaggcccagaagatgctttacgctattctgatggcttcgaggaaactgcgccattattttcaggcgcatcgggtaaccgtggttacgtcttaccccctcggtcaaatcttgcataatcgagagggtacaggacgggtggtaaaatgggcaatcgaactttctgagtttgatttgcactttgaaccacgccatgctatcaagagccaggcccttgccgattttgtggcagagtggaccccagcacccgagcccgtctcaatccccgaggctagctccgacccctcgcagctgcctcacaccgcccattgggtgatgcagttcgacggctccctgtctcttcagggcgtcggtgcgggggtcacgttgacctcgccgagcagagacgtcctcagatacttggttcgccttgactttcgggcgaccaataatatggcagagtacgagggactccttgcgggactcagggtggcagctggactggggatccgccgcctccttgtgttaggcgactcccagctggtcgttaaccaggtctgtaaggagtaccggtgctctgacccgcagatggacgcttacgtgcgccaggtacggcgtaaggagcgctattttgacgggatagagcttcggcacgtgcccagacgggataacatggttgccgacgaactctcacggctcgcttcctcgcgagcccagaccccaccgggcgcctttgaagaaaggcttgcccagccgtcggcgcgacctgaccccttaggggagacggacgcgcctgaccggcccccgaggcccgtcggagtccaggcctcgggacccgaggggagcgttcccagctcccttagattgattgcttggatcactgagatccaagcatacctcacagataagactctacccgaggatcgcgaagggagtgaacgcgtccagcgcatttccaaacgctacgtgctggtagaagggaccctctatcggcgcgcggctaatggaatcctcctgaagtgcattcctcgggaacaaggcgttgagcttctcaacgatatccatgaaggcgaatgcggagcccactccgcctcgcgcaccttggttggtaaaggctttcgtcaagttttctattggccgaccgctctcaatgatgcagtggatctggtccggcggtgtagagcgtgtcaattccacgccaagcgaatcaatcagccggcccaggccctgcagaacatacctctttcatggccatttgctgtctgggggctcgatatcctgggaccgtttaggcgggccctgggtgggtttgagtacctgtatgtcgcaatcgacaaattcactaagtggcccgaggcttatccggtcatcaagattgataagcactccgcacttaaattcattaagggcatcacagcccggtttggagtgcctaaccgtattattacggataacggcacccaattcactagtgagcttttcggtgactactgcgaagacatgggcatcaagctctgcttcgcctcacctgcccaccccagaagcaatggccaagtggagcgcgccaatgcagaaatcctcagagcccttaaaaccaagaccttcaacatcctcaagaagcacggcaattcgtggatcgaggagttgccagcggtgctctgggcaaaccaaaccacaccaagccgagcaaccggggaaacgcctttcttcctcgtctacggcgcggaagcggttctcccatccgagctcaccctgaggtcccctcgggccaccatgtactgcgaggctgatcaagatcagcttcgcagagatgacctcgattacttagaggagcgaaggcggcgcgcggccctccgagccgcgcgctaccaacagagcctgcggcgctaccatcagcgccacgtctgggcccgatcactctgcgtcgacgacctcgtcctacgccgcgtccaaacgcgtgctggattgagcaagctctcaccaatgtgggagggtccgtatcgagtgatcggcgtcccccggccaggctccgttcggctggccacgggctacggcacagagctgcctaacccatggaacatcgaacaccttcgtcgcttctacccctaaggaggatcaggtgtcaggtttcgggctcgggccaaccccgcacccccctcgggcgtgcagggttggccgggggctaccacatatgcatactcttatttctcttatatctgtatttcaataaaagcattttcaatctcctaaaggctgtatctgtactgttgtttccttttgaagaatcttaacttgaaataggtcactcgtgctcaatcctgccctcggaggctcgggtcggctaaaatcgccaaacggggcccagaaccgagccgtgccccggggcgtggtgaactccgggggggaatcggcaaaaacccacaatcgggtcacccataaccctcggtcaccacgttcccggcctggccagtctagacacgtggatctccccaggcactagccccgacccgtgccttttgaggactgggacctgggcacgagcccttaatcaagctaagacacaaaaggaccacgtcacatatcatcctcatctcatacacatagcaaaatgaaattgacacaaaaaatttcttcatttttgattgcagattaagttaatttatacaaaaaagaggaccgaaggccttagaaaaaagaaaagaagaaaactgaagattggcaggggcctaggggctcaatccgacgcgcccgggtcgccagcctcgtcgccattgccgcccactccgccgtcatcgtcctcctcgtcggagttgagggcaaacgcaagccgaggggccgaaccctcgaagctctggacgatgtggtcggcagcgtcccggacctgtgcgcgcgcgccgtcctcggtccagggagggaactcgtccagcgctgtccatggagagaagtcgggattcctgacctggtagctcgccagtacaagctccaccgctccttgggcgaggtccctcgaggataacttgatcgtcctctcgagctcctcggggagacgttgaagagttccggccatctccgagaggcgctgggcgaggcccccctggttggcggcgtacttcacagtccgcccgccccagaggcccacctgccggccggcgcgatctagatgggagacggcgtcccgaagcatgccgggccctacctcgcctgccaagcggagggcctcgacctccccggcggacgagtctagcgcgccctgcagatcggcgatggtgtgttcggcagctgcgaggcgggcggctaagtcgctttcgcccgcggccgccccgccgctgcgcgccctcgcgtccagctccttcgcccgcgcctcgagctcagcggcccgctggttcagtacggccctctcggcgcgggcaccttctagattacggcgcgcctgctcctcctgcgctgcctcgcggagggacaggctttccgccagccgttgcgacgcggcctcggccccctcgagagctcgctcccgcttagtgagcgcgtcctcgcggaggcggagtgcggactcttcttcggcgcaggcggcctcgtgctccgccagcgttgcctcccggatggcaacggcggcctcgcggtccgccaggtccctctccacggcgcaggcacgctcttccagcgccatggcgcgggcctcaagggtttcttcgcgccgccgggatgccacctcggtctccgctgcccgccgttctcgggcagcggcagcgtcaaggaccccttgggcggcgtcgagcttcttccctagctctgcctcccagctcccgtattgaaggcggagggtgtcctgcgcctcgttcatcacggcggtggcgatgagggcagccccccgctcctcctccatctccttggcgatctccgccagcaccttcttacgggcttcaagctccgagacgtgccggcggtgagccttacggcccacctccaccatggcctccaccgagcgtcgcccctcttcgacacgcgcccacgcggcgtcgagctccgcccgctctgcttgcagggcctccacctgggcacttaacccgtccaacaccgtggtgttggcggcggccaaggcctgcagaaggggctccgcgctcagtggggcaacagaaggtatggggaaaagccgcctcggagaggatgccgcgcggctcggcccaccgatgaacgtgccggactcggggatgtcctccggacctggttggtcctgagcgtcgcccgagggggtgggcccaagcgatacgcccgcggcctcgtcgccagctgccccggaagtcgtcgcctgagcgtcgcccaagggagagggcccaagcgacgcgcccgcggcctcgtcgcgagctgcctcggaagtcgccatcgcctcgtcctggcgagcccgggcggcctcctcccgagcggcttcctcggcctggcgagctcgggcggcctcctcccaagcggtttcttcagcctggcgagcccgggcggcctcccgagcggcctcctcggcttcccgtaggcgatctgcggcttctcgccggtcagattcccgcctccgggcctctgcggccgccggatcctcgacttcgggctggccggccttggaatggtgggaggaacgcgacggggtctcactaaaacagaagaaagatcagaagacaaacaaaatgggtgactgaaaactcgcgttgagaggatgaatacagccatgatgggcgtgggacaaacctgcgagggggtcggttaaacgaccaccttggaggggaaatgaggtttccccgagatggttctgtctcccccatcttgcggagccacttcttctttcgctccccctcgggctgcgacgtcggcgtggctccctccgggcgcctgctgttggcacgcgccgccccgccccctcggggaggagatgggggaggggatcctccctgcttcctcttcccccgggcgtcggcagggcggctgctccccgggcccccgtcgcggggcccagaagcacgaccccctctcggggtagattgttcccccctgcggctcccgcccgcgccctcgtggcctcgaggagcccgctcctccgacgccccgatcgcctgcataatggtcaggatggaggcgcggtctggatcgctacagagggggaggactccttggggaatgagggatgcctccacggagctgagattcagcacccgttggactactatcttgaagtcctcaggagcccagtcccatctgactccctgatgggtcctcatgtagtcttcggacccggtgtactcccaagcgccccgggcgcgtcgctggagcggcgcgatccgacgacgaaggtagtcgccgtacaccatggcccctgtgagcccctgggatcgcaggcccgccaggcggtcgaggacggcgtcatagccatctcccagatcaaccggagcccgccagctggaggcctgcgccgggggctggctcggaagtcggaggcgcgcttcgtctgcgaggggggtgtagaaccagtcgctcttccagtcatcccacttcttgcggaggacgcaggggatgtagcggttcagcaccggcccccgcggctggaagtagcagccaccaaccaccgacggcggcgacaccgactggacggtgaagaaccaccggaacagccgaagggatgggcgcactccgatgaacatctcgcacaagtgcgcgaagatggccaatgtcattaccgcattgggggtgaggtgcgccatctggagatcgtaaaactccagaacatccatgaagaaagaagaaaatggcggaaccagccctgccattgcaaaagggaggaagaagacggaccgccccgggtagtctggcgccgggtgtccctcgcccagcatgactatctcccggccggtggcaggttccggcatgaagcggcgcggcagcccggcctgcctcttgctcacaatgcgggaaggcggcagcacgctaccgtcaagcagagcagagccccgtgccatgacgccggaggaggaaatgattgagagcgagcgcgtgtggcgaaggtggggcacaggaaagaaggagttagggcgcaagtaggcgaagacaaggggaataatggcgaaaggaaggaagcaaatcttttcctcgatgtctttatacccttgccaacgctgtgcccggctcctcgcttctcgcgcccactatttcgctccctcgtttctcgcgcccacgcttccactaatcccattcgcccgcttgcggcgcatgaggtggatatgcggttgtggcagtcgagatagatcatatcgtgcgcgcgttaattacgctcgccgaccaaagcgccatcgccatatctccaggcaaaacgaaccggctcgtcccgattcgtgcaatacttgagtaatgtggcagtcttgaagaggccgctcattattcacagtcaagtcaccgttgccggagtgcgtgatttgagaccgctggatttctgcccaactgtggagatcggtcccacctgtcaccagacttttggaagtggcgtcacacctgaccgcttccctcgaagagagcgatcgccctggcataacgccgggggctactgtcggtgacatgggaccaggagtatcactactaaaggcttggacaggagcaatcacccacgaggcctgacccccttgggggggtcgggtccgagggtgacgtggccgccccccctctttgtctccccgaggggtcagaccgcttccgtttcggccctgagggctgaggcgccccgaccccttgcaggtttggcgccgcatgagtgggttaggtgagcgcagcgggactcacctaaccgcatttattgcgattaggacaagcgcgtcacgccgcatgtaacgcagtgcagcgcgctcgtttatccggtctgtgatcagtcgcagaccagatcgtgggttaggtggcgacaggcggtctgacacacgcctcgccccgtcctgtcaggatgagcgcatccaagcactcgtccctagccggagccggcgtgttacctcctggagatggcacgttggtcccggtcagacatatgctaggcttcatcccaaacattacaagcaaggtgttgtatgaagaagggcaaacatgcagattgctaaactgacgcgtggtggacaagaatgaccgacatgaccggactgatactggtcatgtcatcagcagacagccatgatcccacgacgcgcctacttccgacgaaagtggaggtagatatgggccgtcccatcagaagatgattcggagggcaaccatgcaaatctccgtcgattcatgaagagaagggaagtcaaattggtaaaaagagaggcaagtccccacacaaaaaagagaggtggtgcatgtggtatccccttgagatataaaaggaggaccttgcccactgatgagggggattcggatggggagagctagattgagaaaaaggggagagctagattgagaaaaaggggagagaatatttagagtttgagctctctcgctctcgagctctttgtaagcttcttcatacacagatccaccaaaaacacaggagtagggtattacgcttctcagcggcccgaacctgtatacatcgcccgtgtcttgagtgtttccactctcgcgaaccttccacagaccaagagcttagaacttcacccagggcccccggccgaaccggcaaaggggggcctgcgcggtctcccggtgaggagccccacgctccgtcacagtggaccatcaaaatgatttccttctaggatcaatgtttcaatgtttggtagagtgtatccaatgttggttggaattctcccaaaaaggttgtttacccctaggccaagataagtcaaagtcgagattgtgtaaagagatggtggaactgtgccggtcaaattgttataagccaagtctaattcttgtaaatatggaattttggttatgctatctgggatatttccttgtaggttgttttgagcaactaacaaggaagatagggaactcagatttcccaatgcagctggaatacctccaaagattgtgttgtttgtaaggatgacatgcagaatcggtgcggatatcagtggggcagaggggattgaccatctaatgaagttattacttgagagatctaaggaaagaagagatgagctgttgaagagggcagaagggattaccccaccaagtttattttgtgacaggtcaaggtatctgagtgatgagcaattcgctaagataggtggaatactaccagttaggctgttatatgcaaggacaaccatggacaatgatgttctacttcccaaagatctaggaatactacccacaagcttgttattagcaagcaaaagatatttaagattaggcagtgaaccgatcccaggagggattgttccattgaggttgttatggctgagagcaatttcttgaagaagtgaacaattagcaaggtttgatgggatctcaccttcgatgttgttgctccacatgtcaatgacctcaaggtgggtacacgatgatatggtatccggaatcatccctgtgatggaattcatgcctaggtttaggttcctgagctgggttaagcggccaatctcaggaggtatgtggccactgatttggttatccggcatgtaaattgttgtaaggaagctcaggtcggcaatgcaagggggtatttggccagtgaggctcagtgatttaaggcgaagagcgacgacgcgagctgcaccctggttgctgcatgtcaccccatgccaatcacagaatgcaagtgactcttttctccatgagtccagggctcccaaaggatcagagaactgtgatctgagacaaaggagggcttgccggtcggcttctgatgtgttatgggttctggatggtgctaatgaacttacacaaggacatgagctgacgatgaggatgataagtatcagaacaggttgtgccaataatgctttctgggctgctgctgctacaggcatcttgctctcccttttgctagctatagcagattccttacagattttggtttgatgaaactggaacatgctggcatttatatagagcacaagcctagtgaccactatgagcgtgtgagagggggcagacaagaatttgagtgggtgatgcagaagagaatcaatccctggttatattggtcaccagtgacgacacaactttgtttgtttggactaaaatttctctgtaaactgtgggtgtgttcagctcatatactttgactgtttccataaagcaacttttagaggcattttgaagtggcaggttgatgtcattgtcagcgtagagtcataatccaccacaatgcaacgcgctcttgattcagtacacaggtcagtcaaaaattcactatgtggtatatatatcacttagatggatagttattaggccacccgtcatatgtttagttgtctactccccgtatgtgatcattggcatccttcgtacgtttggttgtttactacttctatgtttatagaagaaatcccttatatttatagtgctcattagtacaaaataattgatatagatttttctgcccgatatgtcctaaagtttcataaaagatgtgtgaaagataggggttttcgtacagaaaaatttttatgtagtagtgagatgtataaaaatttttagtataaatttgatagtacctgttaataccggagttaccaaatattacgggggaaactcttgataccttattaagtacggtataatcactctaaatatttgggttgaagggagtagtagtacagttagtcgccgactattacatgcccttttttagaatgacgacgaagaaaatagttaagctgccaagtcgccgtaactgtttaattagtgcacggaaaacgaacgccacaaattaaagccaaagaatccaccagttgaccctgagtttggccggctgaaaaatacatccatcatataaacaagtgactcgaaacatccctggtattggcacaatggcactgaactgcagcatgttgtggttttgcccatctctgtcgatgccctggacttcaaaaatttacagtccacacttatgctagctaagtgtatgtgcgtgtgtatatatatatataaatatatatatatatatcctctaatcgactttgtcctgcacttgtgcttcgttattctgaaagctgaatcacaacaaatttcctagacaaattaaattagctagctataattaattgagatgaacacgacaagtttcttgctccagattctgctgctgctagcgatggtgattcttatggcaatggcaatggagcctgctgctccagagacaatggcgcgacgatctcccggtaagttttatttgattttctcatgctgcacaggccacggaatctgaaattatttgtacgaggtttgctccagttcaacaaaaagtatctcgaggtatcggtatctcacgataccaaatcgtttccgatcgttggatctagctaagaaaaatggtcattattagatctaacgattgaaaacaggaaacgatttggcaccgtaaggtatcggtattttgaggtacttttggttgttatgaagcaaatctctattcgtatgcatgttttttggctgtgttcttccctcaagattcatgacctcatctatctcgttttttgtgcctacgctttctaaactactaaacggtacgttttttttaagtttctatatgaaagttgctgtaaaaatcatattaatctatttctcaatttttttttaaactaacacttaattaattatatgttaattcgtcacttcgttttgtgtgcaaagcagagcatcttgctgccatgtgttcattcatgtagagcaattttggaactttttcatttgtcaaaaacttttggcccacttgctttgcattgcttcatgtctgcgtcattaattttagcagcatgcatgtagatctatgtatttatcataatttaagaattgaagtgattgattattggtctctgaaactattttgattttgggatttctgtgcaggaaacgtgaatgctaatcacgacccgtccaaacaatctggttctgcagtgcaccccctcaatacaccatgcaactacccaggacaagctggttgccctcattgatagttcgtgctactcagaaaaagatgaaattaaataacagattacaacaataagcgccaatacatgagcgtctggttatcgacctcgatgtgtccaattaaaccttgtactcgacctgattttcacctaatgaacgagtgctttccgctacatattttccctattttttatggttgctacaaatgcatggatgcatattacacacatgtcgatcagatcgcgcgaatgatgagaaataatttcgtgcaaaaattaaatacgggaatgcggcaattctcgtcaaaccatgcaagacctatcaaattttgtttgaagaaatcatttgggtgtggaaaatctctctcaaggtgatcctccattctgtgcaaccatacaggtgaaattcgtagtcgatggagagaagaaagacaacaagatcaggccgcgcagacgtacgatcagtgaggaatgatggcagtgcgacggcagccaccattcgttgctctcctcagcagggttagcatgcaatgcattcccgatgcctcacatgtccatctacgaattttttttttaataatggaatgaaacatttcggcctttgctcatcagagctacagctaatgttgatctacgaataaataccgaaaaagatttatcactgttagagtatatcaccatatgtaacaaacgtgtgattaagatcaggttcggccggcaatctagaggatatagctagctgtgtttgttaggataatgccagctgatcttatctaatcatacgtatatatatgtactcccatgcaccgtttgaggtgcttaattaacacgcagccgtcgaccctagcgtgaagggcgacgttcctatccatcgtgttttcccacatggtatcaaagcgctgaagttagatcccatctgccatggctagctcctcctcttgcacctcctccacaacaaatcccttgttcggcttccatgtctctgagaagttgaacaagcagaattatcagctatggtgtgcgcaagtgctgactatgattcgcggagcacgccttgaggggcacctgaacggcaagaccgtcgctcctatcagctatggtgtgcgcaagtgctgactgcgatttgcggagcacgccttgaggggcacctaaacggcaagaccgtcgctcctaccacccagatcgaagctgaatagaagaaagaagatgacaaggcgaaggccaagatcaagatcgacaacccagcgtatgaagagtggtttgctgcggaccaacaggttctcggcttcctcttttcatcgctgtcaagagagatactatcccaggttgccacggcaaccacggcggcagaagcatggacgatgatccaatgagatgttcaactccaggacacgcgcacgttctctcaatgtgctgttgtccctcaccagcactaggaaaggaactcagacaatctctgagtacttcgccaagatgaactcacggcgtcaggaaaacaatgcgatgctgaagaactaactgcttttattttgaatggattagatgatgattatgattctgttgtatcggctctagcagccaaaactgaacctattactctgtcagagacatatgcacaacttctgaattttgagaacaggctgaacctacggtgagaaggcaatctgacggccaacgcagcaggacgtggtcgcggcaacactccaagtaaccgcggcggcagtggcgtcggccgcggcaacggtgctcgtggtggcttcaatggtgctggtgccaactccggccgtggaggccgggtcatggacaacagcagcactccggcaacgacactcggcctgtgtgccaggtgtgctacaagcgcgggcacgttgctgcagattgttggcacaggtacgacgatacctatgtgccagacgagcgtcatctcgctgcagccgcctcctacgcctatggtgtcgactccaactggtacatggactcgggggcaacagatcacatcaccaacgagctggacaagctcaccgtctgcgacaaatacaagggaaatgatcaagtgcacacggccaatggagcaggtatgaaaatcgagcacatcggtcactctttagtgcacacccccatgcgcaatcttattctcaaaaatgttttacatgttccacaagctacaaaaaatcttgtttctgcatctaaacttgcctatgataattctgtattcgttgaacttcatggaaaacattttttggttaaggatcaggctacgagggaaacaaagcttgagggaaggcgacacaagggtctctatccacttccatctccatctcctccaaaggcagtctatggtgtggcaccatcttttgcaacatggcacagtcggctagggcatccatcgagtccaatagtgtctaaagttattagtacaaataatctaccttgtcatgacaaggctagcaaagagtctgtgtgtgatgcatgtcagatggccaagagtcatcaacttccttataataaatctactagtgtctcgcaatttcctttggagcttatttcatctgatgtttggggacctgcccccatttctgttggtagaaataaatattatgtgagttttgtggatgattatagcaagtttacctgggtgtatctccttaaagcaaaatcagatgtttttcgggtctttcatgaatttcaagcccttgttgatagaatgtttagtcaaaaaattattaccatgcaaactgattggggtggcgaatatgagaaactccattccttttttcgacaaataggcatctctcatcacatttcatgtccacatactcaccaacaaaacggggcagtagaacgaaaacatcgtcatatagtagaagtgggtttatctcttcttgcacatgcatctatgccactaaaatactgggatgaagccttcctagccgccacatacattattaatcgagtcccaagcaaagtcatttcttttgaaacacctctagaacgcttgttccataaaaagcctgattatcctgctcttagaacctttgggtgcgcctgctggcctcatttgcgtccctataataatcataaactccaatttcggtccaagcaatgtgtgttcctcagctatagccagctccataaaggctttaagtgccttgatatctcctctgggagagtatatgtttcacgagatgtgatttttgatgaaacagtgtttcccttttcacaattaaaatcaaatgcaggcgcccaactaagagcagaaatagccttgcttccatctgatcttgtagcgcatgatcaagggggagagcaacagagtgatcatgtacttgattttcctaatgccactaatggtttggatgattcttccagcagtacagatttttgtggtacagatgaacgcgtggacctaacacattcggcaacggcatcggatggagtgaatggagcgggaaactccactccgggatcggtgcctgacgtgaccagggagacagcgcaggcgccggaacagcagcaacatggcgaggatgctcaaccccactcagccagcgagacgtttccaagcagctgcacttcatcggctagacctgtaccacaccagaccgtgcctgcactgggtcatgatctgaccggtactagtgctgacacttccactgatggcgttgctgtgcaggacatcgagcaaggagctgaaggcgagctcgacttaaacagacccagaacaaggctacaaggaggcatcagaaaacctaaggtgtataccgatgacactgtaaggtactcctgcttcacctctacaggtgagccctggaggataaacactggaaggatgcaatggatgcagagtatacagccttaatgaaaaataaaacatggcatctcgttcctcgataggaaggtaaaaatattattgattgcaaatgggtatataaggttaagagaaaagctgatggaagtctagacaggtataaggctagattggtagcaaaaggttttaaacaacggtatggtatagataacgaagatacttttaaccctgttattaaagctgctactatcagaactgtcttgtctatagctgtgtccaggggttggagtctacaacaactggatgttcagaatgccttcctacatggagttctagaggaggaggtgtacatgaggcagccacctgggtatgaaaattcctctaaaccagattttatttgtaagttggataaagccttgtatggtctaaaacaagcaccaagggcttggtatgcaaggctaagtggaaaattgcaacaattaggctttaagccatctaaagcagacacatctctgttctacttcaacaaaggcaatgtaaccatgtttatcctgatatatgtggatgatattatagtagccagttccaccaaggatgcagtgccagctcttctacatgatctaaaggaggattttgctttgaaagacctaggagagcttcactattttcttggcattgaggtcaataaggtaaacaatggtttaatattgacacaaggtaaatatatatctgatttgttgaaaagaacaaatatggcagattgtaaaccagtaaatacacctctatcaactacagaaaagttgtctctacatgaaggtgatttactaggacccaatgatgctactcagtatagaagcatagtaggggctttgcagtatttaactctgactaggccagatatatcattctctgttaataaggtctgttagtttcttcatgctcctacaacagttcactgaacagcagttaaaagaatcttgaggtacctaaaatatacgtcaagtttgggtattaaatttaatagatcagtgtttactcttgttagtgcctttacagatgcagattgggctggttgtcttgatgatcgacgatctacaggaggatttgctgtatatcttggctccaaccttgtgtcatggagtgcaaggaaacaagctacagtttcaaggtccagtacagaagcagaatacaaggcattagcaaatgctacagctgaggtaatgtggattcagaggctgctaaatcaacttggcattcaagcaccaaggtcagcgaaaatttggtgtgataatattggagccaagtgtttgtcagctaatccagtttttcatgctcgcactaaacatatagaggtggattatcactttgtcagagaacatgttctgaacaagctgcttgaggttgaatatatttcttccggtgatcaggtagctgatggattcactaaaccacttgcggtgaaacaattagaaatgtttagaaacaatctcaacttgagaagtttagattgagggggagtgttagagtatatcaccatatgtaacaaacgtgtgattaagatcaggttcggccggcaatctagaggatatagctagctgtgtttgttaggataatgccagctgatcttatctaatcatacgtatatatatgtactcccatgcaccgtttcaggtgcttaattaacacgcagctgtcgaccctagcgtgaagggtgacgttcctatccatcgtgttttcccacaatcaccataatatctaaggatttatcgagtacgcagctaggaaatcgagcagggcttctggatgatgtggctagcacgcgagggcccttttatagtcacaccttttgccattttcaatatgcttcagccttcagcaattactgatgggagaattggcactggtgggaactctggtaaggagaattgccattgtccatttgtttatatacagcccgttatgtactttgtattttcaatgttatggcatgttaaaaatgttattatccacaatgtggacacatctttaataccttttttcaccagcaaattaaatcagagtaaacatattacacatgacaccgtagaaaaattactgcttgctggaatgcagctagaaaagttcagcaagtaatgaattgacacaagtttttttactgttgctatgataatttgttaatcaagacctaacagtagcaacatgatccaggaggatagtaatttgacttgaaatgggaggttatataggatagtgaacttttgtttgaattggaaatgggaggggaagggaatgggaggacgcggagtgagaactggaaaaaaaacaaaaagaaaaggacagatccgagttatgaatattccctctgcttcaaattatagcaacatggtactggattggtatatattgagacaaaaggtaatagcatgcaatgccttatttgttagagtaaaattcaatttagcccggttcttattgccaatgtggcttatttatgaggcaaaattgctacatgacactcaaaatttgtgtaatttgctgatagacattgaaaaaacgtgtcacggctgaaagacatagtaaaaaactagtaatttactagaggacacttttggctgaattggattgataaattcttaataaagacgataatgtccctataagaccacatacttcaaacatgatgttagcgtaaaaaacttaaaaattatgcaactctaaatttgccatcacccaagtacatcacaagcatacattgtattccatcttcgttgcagtctcggctcaaaaagatttggactctagtggtattcttgtctttttaaagaatttctctctccaattgagctgaaagtgtcctgtcggcaacttaccggcttttcagagtgtctttcagccgtgacacgtttttacgatatctaccagcaaattacacaaaattacacaaaatttgagtgtcctgtaacaatttttgcctatttattagagtagatttacaaaacttgagccactgcgctaattcatttgcataggttggtactggttgctaggtgccaatccacagcaccaagagtccaagattcccatgttcggtttggtggaggccttggccatgagcagcggcgacctgacgttatcaggatcattgtcgcattgctgcaatatatataatcctcgttttgaagggaacctctccttttgctttcttgcagctagcagtgccgctcgagctgcagcaccaggtgacctgcgattttgcctcgattatttgctgccaatttttcactccgcatcgtcacgcggtctgaccggattcatcatcttctgtccgtcggtgttttcgtgcaatagggagtaaaggccgtgttttagttcgtgtgccaagtttttttaaagtatacggacacatatttaaagtattaaacgtagactaataataaaaaaaattacagattctgcttgtaaaccgcgagacaaatttattaagcctaattaatctatcattagcaaatatttactgtaacatcatatatcaaattatgatgtaattaggctcaaaagattcgtctcgtaatttatacgtaaactatgcaattggttttttttcgtctatatttatagctctacatatgtgtccaaatatttaatgtgtgtccaaatattttatgtgatggaatttttgaaagtttgaagggatctagacgctgccaaaatctggctgtgtgatgggcgtatggatgccagaggccgtcttggaggatgcgagcgctaagtctggtcaccggtgctacctgatgtgtgagcaaggagaggacgacgtactggagcgagatagctgcgaagatgcatggttgcaatacatggttagaaatcctggtccaaactgaaaacacaacacttgctatatatgcatcggtccaatatgaaaatctgatgacaaataagcatggcccaagatgaaatttactctatttattatatatgtttaattgtactatttgtcgcaagtatattttaaaaaatattgatggatggagctttcaaagtttaataaaatattgttaaaaatgttactaagtttcccaaaaaaaaaacgttactaagtttgagaggaatgactgatatatagaattagaggaagtactaacaaaattttgatctaaacattaagtatttaaatatttatatatgttcggagggagtagtacagttagagtctgtttagttgttgcctaacattgccataactcaatttgctatagatgtggcatggcaaacaatttgtggccacaagtgtggcaatgtttggctagaaaatgagtatacgacatgtaagcccatgaaacaaaaaagtgtggcttgccacaactgaaacaaacaaccaaacgctaagctaacaatctgtggcatgcttaacatgtggtgtggatgtgtggcaccaaaccaaacagccccttttcaccagcaactaaacaaaacaaaggaaaattttgttcccttttttattcctttgacaaaacaaagaaaattacgctgccaagtcgtggtaactgattaattagtacacgggaaacgaacgtcacaaaggaaaagaatcttccagtaggccctgcgggtggccagctgaataatagagccatgcatgcatgtaaacaagtgactcgaccttccctagtatatgacactgatcagaatgtaattactttgcatgatgcttttgcctaactctgtggatgccttgcacagtccacacttatgctagctaaagtgtatatatatcctctaatcgactagcatggtagatatataacccgcatgtatgcatctttgttgtaaacttgtgcacttgtgcttcctgctcctctgaaaattaattattcaatcagcacaagttttcctaggcaaattaattagctatctaactgattaagatgcatactactactactactacaagtttcttgctccaaactctacttctgctagtgctggtgattcttccgtccacaatggcggacattgcggattctactgctccaatcggttgccagagctgcttctgcgatgaagccgcaacaccgtcagcaaacgaagggcagatgcagttgtcgattcaggctgcaacaggcagacgagggcgtcctcctttcatcccccattgcgatggaaatcctcgtaagttcgttgcttcatgaatccatatgtatatatgtatctgttttctcatgccatgcatccgtgtacagcagtttcgaaactgtttttgttcgttaataattcttcttgttttatgtttaattagcgcgtggcacgtagaccaaggtatattcatttggcctgtttagtagggtttcaactcttaaatttaactcgaatagttaagtttggagtgaagttgtcgagcagcataaaccatctctacctgtttagttcattattttgtgaaagtactgtagcccatttcacaccattttggatagagcggaaactatttggttggactctagttctagaaaagattgggctggagctcaaactctaccaaacaaatcttgaagtataattctcagtgcatggacctttgcttgattttggagttcctgtgcaggaagggtgggtgatagctctgatccgtcccctctacctggttctgcagtgcaccctcccagtacaccttgcaactacccaggccaacttggttgccctcattgatatatagttcgtgctactcagaagatgctgaaagtaaatatcagacttattacaataaagcgctcatacatgtatgtttggtcatcgatctcgatgtgtgaaaccttgtacatccctgatttttcaccgaacaaacgagtgctttccgctacatattttgcctatttttgtgatactatgtgtacatgaatgaatgttaccatggaaattgtgagttgtgacacgacggatcacccaaataccgataaatcacgccaatcgaactatatttgtattatttagtatgaaaatctctagcttgtgttgtttctgttagattgatctctggccaccgagtcagagaattgcgcaatcacaccaacgtgctcctaacgttttgagtaccgattccctcggtctcgagcgcatgttgctctctctcgcgcgatgatcggacacgctatctacgtaacggacccgcccccgatcccctcaacgcacacacatataaagggaatgatatcccgttggtgacgatcgacttacggcatacccaaaaccaaactgtcagactatcgatcttaaggtgcgttggaggggaacgaagggcgaattccattgccactaccgcacagtgatggagatcttaaggtgcattgaaagggaatgaagggcgaattccatcaccattgctgcacattgatctccatcactggcggtctactaccagtacaccgacacatctaatggcttgatcaagatccgatcaataaaccaccaaattccgcataagaaattaggtgatcatgcatagcctaagtgcatgattttaatatttaattcattggtttgacaatccttttgtccttattgccatagttacaattttgcatcaagaccatttgatcactagtccgatctactatatagtatagggtagtatggtctaccgtaaagcaacttaaaaaacaaatatggtgtcaacatcatcttgtccttcatgatctatcattgcatggttcgacaattcttatctccttattgccatagctacgatgttccatcaagacctttgatcgcttttggttttcctccacttatacaatgtattataatgcaatgccgaaccttgtttgacaccttaaatttcgttggacgaacgcattagggtgtaagtgaaaaagctctcctatctcggtgatcgatctttcatgggaaaaaaagggagactctcgattatgtgctatcatacatgtgaaatatttagtcgatcaagggaaagaaatcaagagcaagccacggacacatgattagtagcaagcgatggcaccaatatcactgctgtaatccagcaagatagatagccacgtgattggatgcaatacagtcctgatgcctcgcatgtctatataaaattaaactctggaaacatttatcaccacaatatcaaggatataccgagtgtatcatcacatgatacaactttgagtaggaaatcagacatgactccgggttgatgtggctatatagcacgagggcccacttacagtcacaccctttcgttttttattgtttcagcaattggatacgcatttggcactgttcaagttaagctacgatatgacgaagtgaccaggtgagtgagaacgcataaatgcaactaggcgtgtgtgatgagaatgtgagacgcatatcaagcgtgcatgatgttattatctcctagttaatctcttggtaccaagtattgttactagatggtaccaagaatatgttagctcatcaactcacctttggagcggattagattctggtagtgacacttgcctgttttggcacagcttcagctccagcttcatcacctctagagtcggaacccaaccaaacagttttagctccatatctgaaatgggagcagagctgggtttaggaatctctataactctactccagactcaactcctaaagctaaatttaggagttaaagctctaccaaatagtcccgaaatcatacgtaaaaggcgtatgatggagtgatggatggaaatggaatcgatcgccagctagttcagtacaatcacacaagatccatcgcaattcccccgcaaaaaaaaaaaagatccatcgcaattcaggatcgtgccgcgccaccaaatttgttctccaagcccagtcgtccggcccactctttctgtatagtctatctggcccatactctatccagtccagttctatctggcccatattcgctttagacagccacacttgccttggatattcagagctcccctgtagcatcatgtgtctgctcggttctccaagtcaatccctcaaagttggctacttcacaattaatgacagtacagtgtgctgctctaatcacaaaataattctataaatatcaagaaccaatatgttcttgataccatgaaggtgcgcgagaatatctgacgaagaccagagctcaactttttggaggataaaatatgcctaatgcctcacatacctaatcaatatattatatacgtactctactaacatacaaaacatgaaatgaccgaccaacaaacacgtctcaatcgatcagatcctaggtaagcatgcatgtagttcttttgtgaggcagtcctaaatgtaagggctataacgtctgtgtgttatttctcttctgttatgtatggacctttttctatggggaagggtatcttttccacataacatcaagctaccaattaatgcagtaactacatatctatattaaagtaaataattactcctgtacccactggcaattagatgtcctggtgttctctcacgcatgatctagtattaccccttcgttattatagtgtagtaatcccttcgttattatagtgaagtaatttctttgttacaaaaggacagttgcttcataaagtcaaagccatatcaataattggctgtaccagtcacaacaggcagtaatgagatgtagcttaataattggttgtaccgtgcttgatagcaacgatgagcgcggtggtgcttgaacacaaggatgaagagtataatgcacggtttgcggtgctctataagcattttacattggtgttgtgtgggagatcaatcttatcttttgagataagaaagctcgcagtagaagtctcaatgataccatgaagtttccagcccttgctgaatttacacatacaacctctctctattggcttgcaccaaaaggccaatttgtgttgtaggcatgcaaacttggtgggccaaaagatcctgatacctcacaatcctagccgcctctggtataaaccaatgaaaaacattattctccttcaaagtgtttttatcatggaaaatcaaatttgctttactcgaggagtatgtaggtcacccacctagttatgtgcttggagagatagctgtctgttactctgtttcatggtttacctatatcagtcttgaaatgttgcaagtgaataggactgatcagcatccgccgtctgatcaatgatttgtggtgtagattatgcaggagtccttgcctcgtgaattaggggcctggaaatcctcacggcccaataggcttctacttatgcacctcttgtagtcatatggttggagtccggagaaaggagatggtatcattggcaatagatgcagaggcggaggaagaggttaactccagacgatttcacgaggctctgtggctgggatatgcctctgccgatggacacgaaggcaacgtcggatcccagttggtggatgccgtgttggtgccaccgatgcacctgcagataccgtcaaatcctagtatttttcttgcttccattgctacttttctgtggaggacactcggactttatattattgttgctaattgaaatgaacatatcaagttaagtggttcacttactctccccttggccgaatgcaaaagtcatgtggtctcttaggaggcccacctaaaaaaataaacttatttttgtaggcggatctattaaggggccacatgagaaaatgtatttttcttacgacccgtgaaacttccttcgaatataatttttgcaggcacgacctgttacaacctgcctataaccttcgtatagaaaaatcgtttctgtagtagtgtatactgcgtgcttcaggaaaagaaaaacccaccataattgaggcagatcctcggcggggaccctgccctaacgaagaagttggttatactcgatttttctatagatattgaggccacttaattttcgttaccaaagcttgagctgctatagaaacatgagttgacagtagaaaatcaattctactgtatgaacactgtcttaattttcatgcaacaaccaactataatttactcggctaaacttagtttagttagtggaaagcttgattgagcataaacgtattttactcatcaagccatacacaatcactggtggagaaaccatctttgatcggtcggcccaattccacaatagtctcggttccaataaaaaccgggactaaaaagcatctttagtcccggtttaaaagctgagggttaccaaccgggactaaagatcatttttacttccggttgaagaggttgtcaggtcgtgtcaggccctaattatttttagtcccggttggtataaacaaccgggactaaaaattaccccaagccgcgtgcaatgtttatctcttcgcgtgtccattgtctgaccctcctcctcagtcttatccttaacttttcttcccctccacttgttctcctcctcactcctcctcttcctcctccccttcctctctcccctgtcttcctggcggcagcaggcggtggccggcgcggagggccggcggcggataaggatgggttttgaaccggtgttaaggatgggttccccagcagtgataaaaactgccttagaaaaaaatattttaaagcttatctttcttcagctagtagtttttttttaacaggacttgtactaactgcctggtaaattgcttcaggataggttttctctcgtcgaaagatatatattcaaatactccctccatcccaaaataaatgcagttttccattgttcatattcaacatttgaccgttcattttatttaaaaattttatagaattagtatttttatttttattagatgataaaatatgaatagtattttatgtgtgactaatggtttttattttttttataaatttttttaaataagacagatagttaaacgttagacacagttatccacgactacacttatttttaggacggagatatatcgagctttgtcatggagttgtgcaaagcgaacatgcctctgttatgtcattgatgattgggaatcatgtccagcaacgccagctgatctgaccacttgtcagcctcatctcatccagtgctttgaaggcctttccagtactaaagcatttattacagtgcaggatactaccaagtagggctgtcaacgagccgagctcgtctacccaagctcgagccgagcctattgcaccttcgagcttttaggcaagctcggttcgagctcgttcgagctcgagctcggtgccgagctcaaccataagtagtataatatatattttaataataatatcttaataagtataattattttctagttaatcacactaataaaaagagtagaaaatgattaaaataaatatattgtgctaatacatgctaatttattgtgtaaatagatacaaatatatatatttatctattagtttattatattaataaggtgaacatgcaatataaactatacacagccaagctcgggtaggctcggtagaagctcgagctcggctcggtaaagctcacgagcttttgctcagactcgagttcggctcatttggagctcgagccgagctcgaatcgagcctaggacgagccaagctcgagctgctcgcgagccacgagcttgcttttttgacagccttactaccaagaagaacctagtctgccatataggttgaggttccgataaagatcccaccctcacggtgcaggtcatgctcaacacgatgcttccccgccagtctttttcagttagattccacaccccttctctcacttcactagctgctttttcagctttttggaggaagcaccccatgtccatgcatagcaccgagcgtccatgcaaagcaccgagggtccacactttttctcctccacgacatcacgcggtgacgaagccacgcgccagcatggagcaaggcctaatccttctcgtttggcaagatggcttgccgcgagaatccaacaaaatgctggcccttattgaatttaatctttaacgtcttcttttgttggcgatgcacccaaatatttatgtgagagacccattgtgtttttcggtgcattgatacctcctgatatctcacaagcctatatgttatacgcgcagtaacaaatgaaacatcaaacatttatttacaagattgtgagcatggtacaatggtagaaactagattattatctctcatgcagttgtgggtaggtgcaagcagaacttgtagtgcacaatatatggccggagcctagagagatctcttctctgcggtttacttatatgcaacttgtttttcatttagttgatgtatattgtcctggcttatatgtacgatgcacttaatcaaatggtgcaagtctatttaatgttttagattttcttctgacaatgtaaattggttgtaccacccacaacaagcagtaatgagatgttgcttaatatccgaagaagtggcagaggtgcttgacagcaatgatgagcacggcgttgcttgaccacaaggacgatgggaaacaaatcccctgattttgtgcagcctgcagttgtaccactgatatgtgggcccaggcacaactgcaaagtgcacaaggcctgaggagtctaacccaggatgatgaatagtaggatgcatgctttgcagtgctctagagtctagtggtgtaggtgtggtgtgggtgatcaatcttatatctcttttgagataagagggttcatagtacaagtggaatgcccttgccgaatttacacatgaacatcctctctcgagcatattgcaccgaaatccctatttctgatgtaggcatgtaaacttggtggacggaacgatcctgatgcctcacaatcctacccgcctccggtataaacaaatgaaaaacattatcccccttcaaagtgttttatcaaggaaaagcaaatttgctttactcgaggagtatgtaggttgcccacccagctgtgcatgctcttgtgaaccatcggagcgagcttagaagacctgtgtttgtaggtgccaccgttgcacatgcagataccctcaaatcctagtaattttcttgcttctgttgatgcttttccgattgcacatgcacccgatttgtgtggttttcgtgtgaaacgtttgcatatgctgattcgcttggtacgcttggtaatgccaatacgccgtgaagttgctactgctgaatttatacacatgaacagaatctcttgagcagcttgcacccaaatgcccatttctaacgttggcgtgtaaatatggtgggtggaacgctcccgatgcctcacaatcctacttgtttatgggatcaacaaattagaaaaaaacaccaccccttcaaaatatttttctcaatggaatgtgaatttgctttactcgaggagctagtacgatagaacacccaccaaattgtgcatgctcttttatccagtcttgaaatgctgcaagtgattgggagagatcaccgtacgccaatccgatcaacgatgtgcggcgcagattgcgcaggagttgtccttgccttattgcaaattagtagccgtcacctcctagtaaatctgggccgcagcttctggacctaaaagtcctcatggcccaatgggcgtctgctcatacacacaggcctgcatgtctcctcctcggtaacaaatgaaaacacactgttaattcatactaaatgggattttgcttggaaacctagctgaaacatttatttaactgatggtaagtatggtactatggtagaatctcgcatacaaatttgtaacttgtcagctctcccaaattctgagaaagcaggctggtcggactatactagaaagccatgcatctgtactagaaaggtagaggagtgctcactgatctctgtagatgatggacactctgagtcgctggactgaacatcgagcggatctaatttggaaggaaatcttcttgaatcgaacattccatggatattaatttctgtatggttcgaactactgtaggaggaacacaactcgatcaaatttcgtatgattggcttcgtctgctaattctggttcaacaagcatgcagtcctgctgttatgacacaacaaggtcttgctgttcgtgttgcacgaactatctacactctcctgatgtttgcgcttccataggatggtgctataatggtggcaaggtttagacgtgataaaaaaacatggaggtatatatgtttgggatattggagcctttcatggcaatgtaactagctaccatatccttctcctaagcacattaagaaaaatgactccctaaataataaaattctatattttttaaaaaaatattataattccatatcgttttttttccatcagatgtcaaaaaactatagaaagtagaatattttcacctggtacacctaagcattctagatcaattgttgtacaacgtcaatctgctcgcacattctttccggaaagtcggcgtgcttaaacactgctttcacatgatgcttcaaccatatatctgatcatgaaaaatgttgaggaagcctttgtaccaattactcctgatacctcacagtccaatacgcattagacatgtataaacgatatactaacaaacatatctatgcaggaacaagggacaactgctctgtttatggtaaagtgagatagatcactacctcacgtgagtttgagccttgagcctattcacctttgcggctcttatataagcatagacacacattgtatattgatggtaattaccttcgctatttttccttttaattaacaaacttggtaatacatcaaaagtgcatccgattgaatgatgtggtgtgggcaggtactacattttccatcattatttggtatatatgaatactagagatttcgtactaggacagcatcacaatttaagcatgtgtggtattgtagtactatcaaccacatgtgcatcttaaaaacctaaaggaaggactacatgtgcatcagtgtgtgggcaggattacaaaaggttttgagagttggtatctcagttaatgtgcactaccgtagaagtgatttttgccgggtggggcaaaaaccacaattgtcccggttcagcaattaaccgggactaaaaccatttttagtcccggttttttaggtgcaacggaaagatatgatgtttagtcccggttggtaacaccaaccgggactaaagatcatatttaagtcccggttgtgaatgtgtcagaagttgttactaatcgggacaaaagattaatattaatccatcagttctcattttttcacttgcagttgcatgatccgtaaatggcttattgacattggaactatcaaacatgacggaaatagctaatggcagataagaacgtctatgaatccagacatccagtagaacaaacttgtggcatgcatttggtttctatcagtgtatcatgcttctctagaaagctataggagcacggtgatctgtagttgatcgacatttcgggccactggtctgaacatcgagctataggctctgatttgctaggaaattaagactaataatatctgaattcaatattccctggatattaatctctagctgaatattgtttgaaccattttgaaggagcacaactcagtcaaatttcatacgaatgacttcgtataccagttccagttcaacaaacatgcacttatgcaacagagtcttgctgttcatgttccacgttctccctacgctcttccgctgttcctcgctgtgacaagaaagaggatggccattcgattggagggctgatcagaggaccatccatcaccggatgcaagcaacgcgaagttcactgtcactgcgatgcaaagcagaagacgaggccacaatcgctaggctgtagaggaaatctattcagtttgcataataggtgagtatacttccacactcagcccatcctcaaaacatggtgaacctcgcaagcttcagctgtgtgctgatcgcatgctgcacatctcgggtgcagtatctcttattgatgtatcctgataatgtctcctgatgctccatatgcctatgctcatgcagctgatatttgagagattgaatggcatatgcactgtttaggtttttatgggagtttttggtttgtgcaagtggagggggtcacttgataaaactttgtgacctatgagactgaggttctctcttacatatatgggcagttcttcttgattgaacgaatgtatagttggtacaaacgagctagattatttgcttcatattaacagggccggtcctgatatttccaaggcccagagcaaaataaaaatagagaccctcaatgggtataatatgtagattttttttttcttaatgattgtagatctaaccaacctaaaatacgatgatactacactagactacgtcagcttatacttattaaattattgtaactattgtggagaaaacattgcaaacacaatccaattgcctattaataattccatgactttgagaaaattgtgacagcatcaagtaattcatgctagcatttttataagaaaattcagtgataattgtaattgtacgtatcaacatgaatcaggatcaatctgtatttagtggtggttatatatattaaataccattaataataatctcaataaagaagagagagagagaggagaaaatgagtgggacggtgaataaataatctagtcttgggattaatcaagacgtggagcttggagatcaatctacgattctctgcttctattggtaatcaatacgtaaatgtagcctatgtaggtgcatggccggtcggggcccttgtcacggtgggcccagggccaccgcaccgctcgccctgccccagggccggcgctgcatattaaaatacagagcagcaagagaatggacttgtggcttcgcattattgttgataacacattaccgttattatttacatcctgattaaatggactgttcttggcaagggttgatatttaataaatttatggagaaagttaattctgtaccattaagaagaagcacacactcaaaataaacaccatcaattatatacttaaaatttttattaaacttcttcaaaacgctcttaagccgtcagttgatgctctaataaattaaataaaaacctagaaaatctgagaaaaaaacatatatccctcgattttcacttaaatcgacagttccaatactataaatagttagattagatttcttaaaacaaaccgaccaaattcttatatagtctttccttcccttcagtaggaaaacgtacaaatattgaaacattgaccttccttttcttatttttccacgtatatagttgagacaataataattattattattagcgataatattttttataaaatagttactttacaaacatttaatatattatcatatcactctttacaaactaatgcaaataaattggctctacaataatatttaaaaacaaagttgacacccattattttatattgtgtacacattatttcagactaattttaataaaaatatttgtccatcgatttttacttaaatcagtattaaaccatcataactatctttaaataaacaaagcctcgaaatcacaaagattttgagaaaaaacacacattccctcgatttttcagttgaattgatatatgaccattgtattagacttgaaaaatcttgctaatcaaccctcctgatcattccggctaatcactcctcctatctcgaatacgtatgtacttacttgttacaagtaaaaagaatacatacaaccgccaaaccctctcattggatatatatgattaaaaaggactaatcccaccttacctcattgggttccatttatcatatagcatggcattatgagttgctccgcatattgcatataaaccatgctaaggtagttggttgaaaagctatatttgttaccattaaatttaaattgtaggactgcatgttgatatgtgttttcttttcaaaaaatattatatagatcacacatataacaggaaagcgagatctatgatatgtctttgttaatttgtatgtgagtatgtgataaattacatcattgagactttccctgcatatataaatctggactcttagttgtaccaagtgctctctctacttgttaaattgtatctaagtatgtgataaattgcatcattgaggctttcccttacatatataaatttggagtcttggttgtactaaggccctgtttgtttcagcttaagattatagtaatctagattattaaatcagattactctaagctggattataataagctgacatagaataagttgcagttgtttgtttctttggattattggaagcatctaagggtagcgagtctttagccacttaataatttggaaaaagctcctccagaggagattattagattatactaatttggcttatagataataataatctagcataataatctacttgtttgtttgaggttactcctaataatctagattataataatcctaagctgaatcaagcagggcctaagtgctctctctactaattaatgtgtatctaagtatgtaataaattgcatcattgagactttcccgaatttagcccacaaacaacctaatctgaaattcactcatatggagatttgaactcaggaccttggagtgctactcaggtcactataaccactagactatatgctctttcgcgatctactgaacctacaacgtgcaaactataagcagctaatgtaattatgttaattatgacaataatcagtatgagacacccatagggctgagaggcatctggagaatgtgacaaccatttgcataggttcctagaacgagtgagctaagttgaagtcctagttatcattctgatcctcttaggtggtgcatgtgcatatcaaaggaagtataggctgtgttcgctggagccggttctcaaccggaatagtgcacacggaaaacggaacggtccattagcgcatgattaattaagtattagctaatttttttaaaatgtatcaatattaattttttaagcaactttcatacagaaacttttttaaaaaaaacgcaccgtttagcaatttgaaaagcgtgtgcgtgaaaaacgagggagataagttgtaaaacttggagtaagaacacagccgtagtcgctgtaggctcatctaatgtgggtatcgaggcaagcgctgaagagacttgttagtacttgtttctgctacttgaaactcgatcatatctgctaaattaaaattcgaatttaaatgggaacaatgcatatatatcaatttttctccctgtgttaattgatcgctacgattgtatatgtatagttttatccctagaaatgcaaataatagatttgtaaatacattatttgtacatcaaaatgttgttgagttcacatagctcaacctttttcccacttgcctgagacctcaatgtcaagatgctcctatcatatcaatggaatacctattatagcaactccgtttttagagtccgtcctcatgacaagtttaacctcacaaagtttagcaatgtattactcgtacatcccttcaagaatgcaatacctccgaccaatgtgtcgtgacagtggctcctgatgcttcacatgcctatgttcatgccctcgacatttgagagatcgaatggcatattacattgttttggttttcatgtgagttttcgcaattgttttgtgtacgtggtgaggatcacatgataggcctttcctatcaggcagtggcgctcttataggcaacttggttggtaggagcaagtcagcttaattggttctcaacaagatgcagggtacagatacatcaatctacatagcagcaagtgaatggacttgcggcttcacattattattgaaaacatgaatgattaattgaatactgtgcaggctaagagttgatattggtttaatttatcgaaaagtaattcagcatcgtcatgaagagacacatacattaaaacaaggagttacatcaatcaaaatgacggcggcatcttagcattgtggttacaagcaagtaagaaaatgatccattgaactctctgaagtcatggcttcatgggtatattctaactggataactgtatagagtatagacacagaaaaaatgatcatgaattacgtattacagacctaaaaattcatagaaaaagttatctaagtaacactgatatatatagaaagattttagaaaaatcgtactagtgatgtgtagagtttttagcaaaaaatttacttttggataatcaaacctccatcatgtgttgttgttaagctatattaattgctgaatttagagatgtggatacaatgaatgggaaacgacagtcatgtgggggcgattcttaggttggattcttttcccttctttccgaactcaccttcctctttttccttgtgaacgcttctcaaactactaaacggtgtgttttttaaaagttttctatatgaaaattgctttaaaaaaatcttaggctaatacttaattaatcacatggtaatgcgcaacaccattttctgtgcgggaaggtggagttacctcccgaactcagcctcaatgttgctatggttgagttctttcccttaacagagccaactctatttttctaacaaaaaaattagccgaatttcgcacgcagttaagcaaggctatttttggcccaatcctgccggtctgaccgcgaccgtcaaagcaacacaatcttgttcatcatctgaaaatcaatcatctccacaaccacttcaccaataatctccaaatatcaaaaccaataacatcaaatgccaattcttcatcacaaataacaatcaatcacactttgattttacatggttttgccatgccaaccttttactttgtttgtcctacctatcctttccacctcacttgccatcttctccttgtcatccataacaatgaggcgacacttggccactacccgttggattgaagcttgattgaagcaagtagttgtcgtcaagtttgctgaagcaggtcaaggacagcgaaatggttcaacatcaattaccagtcattttgaaggtggacaagtagcctcgcaattcagacgtagtttaggtctcggattgctagtttcaggttaccctctcttgctttctacacccacagatctagcacgagcatcaacactttgggtatcgatgtctagcactccagatgcttcgcatgcctatgttttcttccaacatggatgattggaatcatccgcacacccttcccactggtattgtttttgcataggtagatatgaatggattactggagttttgtgcacttcattaccacaggtcttatttatgtcagaatagagactgttgtaacaccccaggaaaccacgtacctagagtgccagaccaaaaacactcgaaaccactaactctcaaaattactagaaatttcggcagagtctcccctgtaaatacggacatccacgacaggcaattataagttaaactaataacaatatcattcccacaatacgatccatccttataatacatggggaagaaactattagaaatctaaaagattattacaagaccgaaccataatatagtttaagtatcattatggacctaggcaatatagtttgatagtgtgcagataaatgtgtatataagggtgctacttcccgcccatgcatgttggtctcaatatgtacctaaaaccaaataaaacacaagagtgagtataaaaatactcagcaattacaatatggaactagaaaacacatatagacatcattggcaataaagcatgaacagaaggctttctttctttgataggaaacacattttcaaacaccaagtcaaagaagatagtagtttccatccggggcaggcatgaattgaaatagtagtttctatcccggacaatagtgaatatatcctagcatttgccggcaaagccgagtaaacgtgatcagcaattacccacaggaacttgaataaagaaccaaatttcactcccatgactatgcatggtacttgaataattgaaaccagaatcaaagaaccaaattgaaaccatattgcacattcatggcaagcagggaacttgaattatttacccagaaccagaatccggaatattgaaacaagaataacgtcgtaaacataggataaacatgaaaacctaaatggcgtgaacaacgatatgaatataagcagtcacatgtcacatagaaatatatcggaaataaatagatagagccaactatccatcaatcacacacttagttcgtcatgcacttgcctccaatgaagggttggtatcatgcacgatctgaaggaccaccacctaatcacaaacaaaacctcagcaaacacattcaaacatgcatataaaacaatgaaaaaaggtgaacctactgccccatcccatcaaaacgcgataacaaggaacgccgcttgcactataaacaatattgttgcttcaaacctttatatcttgaaatatgaaaaggctatgaccataaataaatctacagaacaaggcctacaactcttatgtggaaattatatttttattatgccattaaaatggtctaatttgcgcttgaaagcaggcttcagaatctgtccagaatttcagactatccgcactaaaacaatcataactggagttttacttgcccaatcagggtgtactttactaatatgaaaagctaagaaaaacctctacaactttgtctataggcgtcttggctgattccactgtttagcccatccaaaaatagttcaatctactactatccagattatgacataaaacaacagttatactcaaaaattcgtatcatctaaaccacttgagataaaatcacgcccttggtcagaagatagatataaatattatctacaactttctagttatacactttcgcaaaaaatatcatttagatctccgaaacttcgaaaaaccgaaaaactgtaaatctgccaacgtgtagaacagccaaattcgaaccacaacaaacaaaactccttctctaaccttccttatccacgaattaaaccactaaaaccaccctagaacaactgatatgacaaggggaaagcctcacctagggtttctttagagaacttgtgaggagacaataggggagactgtgatccaagcttattgatccaagctatgaaagtggagatctagggagagcaatttgctgtagaggggagaaatgcgaacataggagaaggggaggaaggaggcgccgccagggagaggggtggtggcactatgatgggaggtgggagttggttcccctctttctaggttttaggggagaactaatgggctgggtttataggccttctcatgttggcccacttctaaagatatatttttttatttatttctgttaacatctttattttaacaagtcaacccaaactaaaaaaataaatatcttttaatatacggggtattacaactgtattaaatccgcaaccaatgctggtaaataggaataggacacattgtttttagatttggcaatggctctccgtgatatatttctttgaaacaaaataatttctgagaatgcgactagtgtgtatttgacggctgtgacgacgcgtgcatggttcatatatacagttgtcttataggcagcattcttcactagctgactataaataatccttagaggatatcaaaattaatggcgtgtgtgcaccaagaccaaaagtttgttgcaattttgttgacatttttctactcaatgatattggttattccactgtagacagctagcccaattaagaatgcctgcctcttgagggccgggagtaagtaacttacatatgaatagaaaattttggaaccctcattgcactcttaaaaagcactaaaagaagaactacaatgccaaatagtactgtttggaatagtttcaaaacgttgtgcgagacggttactcagttattgtgttagtggtgaatgggacgttaattcatcggttctcatgcttgcactagcacgatccactggactgagcatccaacggctcagatttgcatcgaaggtctacatgaattcaaacattccttggatatatattagtctctcgaatatggtccaaacaacaacaggagaaacacaattccatcaaatttcgcatgaatggatttgtctgaagattctagtcagacaagcatggagtcacagtgctctcaaatacagcacgatctttctgtttatgttgcatgttctctctatagtctcccgttgttaagtaattaacggaagcgagaaaagtaattaagggaagccatagtcaactacaggtctgagggcagatgtacagtatatctaccggtgtcaggtgacaccgatggtatcttacaaatacaatatgatcctctgtgtttttagccaatgacaccatcgattaaagctcactgaccccagcagactaactaatttactctagcccacgcactaacagctagtaaacaatatactccgtattttgttttagggaaagccagaacaattttgctgttgttagtattacacgtgcaacagttgcttaattcacttctcgtatagtatagttctgtttataaatggtggaattaacctagcccgttgatttacttagttttgacatgttaaacaattaataaactagctagatgaaatgttacattactttgtttttatttagtttatactttaacaatgtagaataattaggagtagaacaaataagagctttatggagaaacacccaagggtcttcctagcttcacaaggtggtgggctatacgaccggggttcgaagcctcaccccttctaatttctaattatttgatattaagtcattctctaatggttgtgtctttttaataagagctttatgtatatattaaagtttgcaaaaaaaatgtttctttatactcgagaagataccataagttacactctctttttttccattaatcaattacatcattggtatatcttaatttttgtgagaagaaaccacaaataattagctagaaagtatggtgtcgtctagtcttataaatgctagtaccgtaaagtatgtattacattatgaccccggtggctccaaatccttgatccgccccgtctgaccagaggaaccactgccagtgacggagccaggatttcaaagttaggtattcccatctaagcgctgagccgctggccgcccctgcccctcgcggctaccggccacccaaccggcttgaccgcctgagcttggcggagtgtcgggtgccggccgtcgtggcaatggcctccccctccgcggtagcacgggccagctcccgccgccggttgccgccttgcctcgtcgcgccgccgcctagggtttgcaaatagggagcggcgcgagggagccgagctatggagggatgggtcacggagggagagcgagagggcgccgtctggtagagtggtggctaagtgggtcaactgatgtctgatgggtcacgacaaagtgggtcgggttggtaggaggcattgcaagaggtcggttgggtcatgtttggatcgaagagttgaggatttaggtgcactaatatgtgtacatgtatatatattagaagtatgcttattttttcataaaaaaagttgggtattcccgggaatacccaggaaccaaggtagctccgcccctgaccactgccgcctgccgctgtgatgcgaagcaaccaagatgccagcatcgctaggctgtcagtagttgttcctcagttcggataacaggcgaccggaaatatttttagagtccatcctcatgaccaggttcacatcacaagtttcaacgatgtattactcgtccaaccttccaagagtgtaatacctctaaccaatgtgtcatgagaatggctcctgatgcttcacatgcttatgttcatgccctcgatatttgggaggtcgaatggcatattacattgttttggttttcatgggagtttttgcaattgctttgtgcaagcggtgaggatcaaatgatagaaccattgctatgaggcagtggtgctcttatatataggcaacttggttggtaggagctagtcagcttaattggttctcatcaagatgcaggtacttgggtacattgatccacgcagcaacaagtgaatacaccagtggcttcaccactcgggtatattgattgatgatattaaaaacaattaataccatcaatcaatatcacggcggcatcttagcattgtgatcacaagcatgtaagaaaatgatccgttagaactctatgaagtcatgagcatattctaactggataaatgtacagagagtatagacacagaaaattgcacatgaattaagtatatatatagacctaaaaattcttagaaatggttatctaagtagcactaatatagaaagtttttagaaaaaatcatattagtgatgtataaagtttgtagaaaaaacatacttttggataattgataacaccattagcgatttaaaacacaagtgttgttgttaagttatattaattattaaatttagagatgtggatacattgaatggggacagtcatgtgggcattggcgattctgtggttcagtccttttccataatagagccattggtgaaagtatgagagtgattaacagtagaatataacaaattttaataagaagtgattgatgggataattaatactctgtagagataattattttgggacaatttctaagtatctagaaatacaattattttagaaaagaaaaagtatctagataaattattttagacctggataaattattacttttttttctcacacgctatcctgctgcattttataccatcgatatatgatagcactatattgatgttgcggtcccaggcaagtgggaaaatgattgagctacgtgaactcaacaacaatttgatgtacaaataatgtatttacaaatctctttttttcatttataggcataaaactatatcatatacaatcatagcgattacaacattatataatccagatccatcacacagggaggaaaattgaaatgcattgttcctatttaaattcgaattttaatttagcagatatgatcatgtttcaagtagcagaaaggcagaaacatgtactaacaagtctcttcagtaggggtgtaagtgggcttgtccgtaaacccgtttatagacaaaattagtatctaacctgcggattggaccagcgggttacctattaatttgacttatttatgaattatcattaatttaacctaaaagtcaactcgcgggttggcccgcttgcatccatagtcttccatagtcttcagtacttgactcgatacccgcgttggatgagcctgcatcgacttcctccttcgccatgcaccgcagaggatcacacgatgcccatgtatgttctggaatgataactagggcttttactttgctaactcgtactaagaacctatgcaaatggttgtcacattctcctgattctctcagccctatgcgtgtctcatactgaatgatgccataattaacataagctgcttatgatttgcacgttgtaggttcagtagagagagcactacaaatgtttggatctcaaaaatttttggccaaacgttgcgtgtcttatactgaatgatgtcactcacgctgtaggtccaagactccaaatttatgggtgtgtttagatatctcaaatttttttttgcctaaaatatcacatcaaatgtttggacacatccatggaacattaaatgtgaaaaaaaaccaattgcacagtttgtatgtaaattgcgagaaaaatcttttgagcttaattgcgccatgatttgaaaatgtcatgctacaataaacatttgctaatgacagattaaataggcttaataaattcatctcgcagtttacagtctaaatatataatttgttttattaaattcatccatggagcgccgccgccgctgccgccttcgtcggaccgcgggagaccgccgtgtccccttccggccgatttggcggaggggagggcacggcagctgccgccttcgccgggccgtcgccaacctcgggagcccgccgccaccgccgggcagccgcgggagaccttcacctcccctcccgccggatctggcggaggggagggcgcagcaaccgccaccttcgccaggcatccgcccgcctcgatcgggagcttgccgccagcgatggaggtagcctcgtcactagagagaggggagggagagagacatgagagggagagagacgcgggagggagtgcacaaggacgacgcgacgtgggtcagtgggtgggagtagataaggacaacatacggcgctcggctcatcggctcggctcgttttgtataggtgtaggtgtctgttttttaataaaccggcatctatagtattggtaccggtttttattaatgagccgacacctatagtgccttaaagatgttggttcttatttttttccgcgtgcggaggcggaaaaggcctgtaggtgtcggttttaaaggaaccggcacgtatacggcccatccctttgagggttc

SEQ ID NO: 5094 - DNA, 14917 bp, Oryza sativa
ctagatagagaagcactccaacctagcaatcatatcaacggcctcatcgtttcgcttattcggtaaataagtcaaacaacatatttacaaatgaaaaataatttgtgaataaaatttttatatacatgttcttaacgatctaaaagactaaaaaataaactttgatgaaaaaccccaaaatcaactttaaatttaagattaaatatttaaatttcggctgataagcatgagcgtaagcgaaaagataaggctgcaaagctgttcaataaggtagtgtttggttgctgggataggatgggatgggatgggatgaacccatttttaggggtgtttggttcaaggttgagtgggatgggttggtccctagaaaggaatattcctttcagatccgggaccaattgatccggccaaaccggccggaccaactcatcccccttggaacgagtgaccggcgtgaacgagcgaaccccttggcaggttggcggcctggttggggggttggtcttcaaaagacgccaccgggttagccaacgccgccgccgccgggttcaacaccgccgccgccgccgccgtaaaccgcttcggccacggcggtggcggacggctcgggcgaccgcggcggcggtgggctcgggcgacgtcgacggcggtgggctcggcgacagcggcggcggggggctcggtggcagcggatccggtggtggggaaggcggcggcggcggatccggcgatagggaaggcgacggcggcggatccggcgatggggaaggcggcggcgacggatctggagccggggaactcggcggcgggccgaccgtgcgtcgtcgcgcttctccgcccgcccgaccgcgatgatggccgtgctcgccctcctctccaccggcctctccctctccctctcccgcgcggacctcgttgccgtcgtcatcgccaagccgcggctgctctgcgcgaaggctgacaccatcgccgccagcgctcggttgggtcatcccgtctgtcgtagtcgcgctcctccgcccgctcgtctgtgatgccgacaccgtcatctcctcggtgcgtgtgacccaggccccgaccagcccaagctcatcgacgccatcaaggaggccggcgacgaccacgtccggaggtgagggcagaggcggcgtcggccatgtttgttgtaaacggcgttatcggtggttgcaaacagcgctcatcccatccctccctcgtcccttcaaccaaacaaaaaactgggatcgtcctattctacaaaccaaacacccgaatggaatcatcccaatcctaaaatcagggatggtttcatcccatcccacctagtcccagaaccaaacacacgctaagatttcaagcgtttcaaacttgtagtgtgaaactaacttttgataatcaaataattggctcctatgcgcctttttgtttttatggtatggtaccttctactaccatgtgtagtagtgtagtaaattttaaatctaactatatattttcataagtatataaaatattttatttgaagctttagtaaaatatatttaccaattcatctattttaatatggtatatgatacacgaatttattgtaatgttatatatattatttctaattttacccctatataatttctactacactactaccgggtgtagtacaataaaatcaaatccattgaatctgaagcgattaaaggctcataatcatttgagggtaccttaaaattccgtctttaaggccctcattagatcccacctcaaaattttacactctgccacatcgaatgtttgaacacctgcatgaagtattaaatataggctaaaaataactaattgcacagattgcgactaatttgcgagacgactcttttaagcctaattgctccatgatttgacaatgtgatgctacagtaaacatttgctaatgacggatataatatctgatgtgacacgcccaaactttacaatatctaaacaccccctcaattcccttctgtttaatgattaaacaatatgactactttcaggatattcacccgcaacaataggctggattatcaactgttcttccggacgagaggtgcctttagacgactgggctggaacgggctgatggtaatcgtgtgcttctccatttctgtggagattatgggtaccctatacccacacggcatggttatccgactagttataggggataacttatatgtatggaatatgtaacagatcatgacttgggtattacgtttccttatatattacggaacagcctaaagtcctggtttgataatattgtaaagtagatttaggaaaccgataccgtattggttaaggtttctatcttgtaatcctgccccccaccctatataaggtgggcaggaggccctctagggggcatgagcacatattgtcgcgaccgggaaaattgccttttcccgaacgctaatgtattaatccccgtcccaggaaaagccggggtacaccatacaaacatgatataaaagacacatcttcattatatcgataatatttacattattacaaaggcgcttcaggcctgacaaacaaaaataaacagcagcggactagcgggcctacggctccatcttcacaggcgctcaactggggtataagccaggactccacctaagacttcttttccaaagcttctcttactgaaggggggagaaagatagagcaagaatgagtacaaccacagtactcagcaagccacaccggagatgcacaattaatgcaagggagtacaaggggataataacatagaggttaagttttgcagtaaacagcatttaaaagtcacttagttgcccaaagccattttataaagacgatcctagagctacacagtattattaatcaaggccgtgaaccctcacgaacctgccttaacccaaggcctacgatgattcagaccgaactggcaacccgaccctgggtcccagctcgtcccaagccaaaccaggccgaccattccatattttagttgttgagcaaattttaagaattataacactgacttgggtacattgctcggcttgcccataaccgagggcgcggctattcgaatagattatactctgatcagaggtgtacatctttacccacaagacacatcttcctcacgtgtaaccacgtgccacataccaccacggtatacggacggaagacgtgacatagtttccaacccatcctagccatagacaagagtaccgacccaatcctgcctacggccggaacccccgggacaggcaggcaagactgagcccctagcagcagggcaccaaccctctgccaatgacatctcgactaccgggccgcagctcgtgtagccttcatttgccctggagaatgtccatcgacccccgacttcatccatctccaatccgtgtacttttgtttataaccagactgagccacaaactaagccttacccactagacatgtggaagtacggtagtgctttgcaacagaggcccgagcttaatccttatagtggccggggtgctacttcccacaactggcatgcacccaaaccccaccgaaaacaggttttaggggttttgaaagaggaagagaggtgtatatccaattccaccataaaccaacaattccatagtgtccaaatgatatgagaatttcccaaagtctatagttataaaaccacctaatgttgcctaattaatcagcgaagcatctacctaaattcatactagtggaaccacgaatagagtgtccactagatggggttttgtttaatctagggtgaacaaggtattaatatcaataacaataataataaggtcataacaaaggtaaataggcatggctaaataaaacagtgataacgcgggaatttaaataaagcgataatgcattaatttaaatcaaaataattttataaactgggattcaatatgctcaaggatgatgtgacttgccttgctcagagagaacggccttccgaaccttcggcgacgaccacgaaccacgctttggaaacctccggaacgacgaaagctacgcgaagcacacaagcaaagctacaagcctataaagaagcaataacaatacataaaaagaaagcacagggttctttaggttataacaaacattaggagacttgaacgggtcgattcggagctcgtatgaccaggatatgatcatccgaagtttaatgctgttatatggagatttgcggattattataattaagctttgcaattataaaacaggtgcaagcgctagcctggaaaagacaggaaggctgcgccgttgacatgcggaccccacatatcaacctaaaggaccgcggtagaccgagtacacagaggcggtccacgggtcgacggaagcggaccccgtgtgtcaaccgaggcgagtggccgacaaacggactccactagacaccacacgggttgcacacgtggaaaccacgcggctaccgagcgggcacactaacacggacactacacggtcaccacccgcacacgtgaacgactaccgacaccggtacacgggtaccggggtcgacgaccgcacaacgggtacggggcgacaccgaaaggacgagggcggggaagcgagaggacggatccttaccaccacgcggcgaggcgtgggaacaccaacgacgaacgggcgcggcggagacagacgggcacaacggagacgaacggcgaggggacggcttcggcggcgatccttggacgaaggcgagacgcggccggcacgaggcttgacgacgcggagccgaggacgaacacgaggacggggctgcagcgatcttgacgaagcgaggacgacgaacgagaacggcttgacggagggacgaacgccacgacgaccgggaacgacgagaggacaacgacgacgacgacgaccgggaccggcgaggaggcgacgaggacagccggcagcggctgcacggggacgaggatgacgtggaacacgccgctacgatgacgatgacggaggcggcgccgcgaggcgacgagccgggcgaccgacgggacgtcgacgacgagaacgatcggagacgacgatgatggaccgcggaggggtttggatggaggggaaacgatgccgaggacggccttgccgctgcgatgccggaggtggtggaggtgtggccgaccggtgcacgggcgaggagggacgggcggccgaacaactccggcgaggcggctggagaggttcgcggcgatgtgcggcggcttccgggcgaaaccgaggggtggacgaggtggagggctacgtcaccgtgccgagggaggggacggcagcgccggctgacgcatgggcatggcgaaaagggcagccgggggagatgccgccgaggaggaaggagaagccggcgcgggcgacggtgttccggcgaagttcgggcgaggaggaggtgatgccggggatgagagcggcgtcgtggagccgaggaaggtggtggcgacgtcgaccggcgctcaggcagggagatagaggcggctggaggcggccggcgcggaggaaatggaagggcgacggcggaaacgtagctccgggggtcacctcgcgagacggagggcaggccggggtggaggaggtggcggcgacgctggaagaggcgacggcgcggccggccggtgcgcgggcgaggcggcacaggcggctggaggccggccggcaacgtgggagagagagggcgacggtggggaggtggctagagaccacgggagaccgcgggagggggctaaagcgatagaacggagcgagggggttgcattttatagcggagggaagcgagccgagcacgggagagggcggaacggcgacgggaatggtggccggcggcaaaggaaggcggccggacttggcgcggccgttcccggcgattgggggcaccattcaaggggaaattaagggggaaagagagaggagggaaaggggattattcccctcaatcaatttgggaatcccatgcttgaatcgcgcggatttgagggaggaatggcgctagggttcacgggagagggagagaggacggctgggcgggaggaggacgatgactcgcctgacgcgtgggccccacgcggtcaggcggcggctcgggcaggggggggggctcggctgggccgggacacggcccaggtgggagaggagggggaggcggcttgggccgagcaggccgggaggggagaggggggggaaaggcagcccgggagagagagggaggagggagtgggccgggaggggaggaggcccaagaggaggagggagagaaggagagggagagaaagagagggaggaaaggaaaacttcggccgcgggccgaggggagagagggaggactttgggccagacttggcccaaagggaggaggattatttttagattttctttttattaaactttgataattgttgttgttgtttaataattatttccggtgttctgaaaattcaagtaaaatttgagggctccttttagaccaaggagaatttaacaaaaattctccgggccacatttgaatttttcttgcacgtattttagggtttgccaatttcttttcgaattttaattaattctattattccttttagaaaatgatttttatttcgggatgaatttatcaggacgtgacacatatgatcgtcagatcaatacacactcggcggattcaaatccccaaacaggagtagggtattacctctcattgagagggcctgaacctgtctaaatcctttgtctccacatccatccacttttaggtctcgtgcgctaccccgttttattattgccgaattcatgtttcgacagttggcgcgccaggtaggggtaaacgccgagtttcctgacgacgagtgcgatggaatcaactttatgagtcgccggcttcgtcttcgctttgggagctccttgattcctcgccgccgacgacttcaacaagacgaatcgtcgctgctattctctgcctgatcttgttcgcatcagcacgacggcaacgacggggcaacgacagttcgacggatttgatggtcgtcctcgtccaccaccaagcctactggtccaatctacccaacgaggatgccatggtgttgcaagatggatctacaaacacgaagcatgccaaaaccgatctaatcggatgcataggagacggctgcagccacgccgatgccttcctgccgtcctgcgtcgtgctgatggacaccaacgccgcccgcgactgcgacctccgcctcctccgctccgtctcggagtcagtcgaagagatcaatctcggcgagttttttccttttaatctccgacttcgccaggttttttccttttcaacttattgttgtttattagattgatctctaaatgtcagattaatctctcttggtattttctgctgtttgcatgtaacgccgcggcactactcttgccgactggtgtttccgtctgcacggctggcctattatgccgccgctgttgggcgtctacgacttcaccgccggcctgcctccgtcgccgccgagtggtgcctccgcctacacggctggcctattatgccgccgctgttgggcgtctacgacttcaccgccggcctgcctccgtcgccgccgagtggtgcctccgcctacacggctggcctattatgccgccgttgttggatgtctacatcctcaccgttggctcaccttcgttgccgtcgactggtgtttccgcttacgcggctgacctattatgccgccattagtgggcatcttcgctttcaccgtcgaccgccttcgtcgccgccgactggtgtcttcattgttattgatggacgactttgttcccacattggccacttctgccatcaccaaggggaatattacaaagctaagtcatcatttattttattctttatatgatattttgccttttcctctgcctcactacaccaattggtcttccattgagtagtgagtcgggggctacagatgttatatcatattttttaaacaattttcataatatttatcttgattgcttgcgacatattctgagtacaaaagtgcctatcgagttatggagttccatcttcctatgctttccgtttggtttgccaatggatagttgcctttaggccgattcctagcacccgggggctcgttggatggaccgagtaacgcaaggtgctaagtattattcggaataaatcaaaagcatagagataagataatttattttctgctcttaataattgcaaaagtacccgagtagtaaactccgatccgtgaaactttgttccattaatgacgaactcatgtcactcatatgcatgtttgggaagtgcttaggccgactcccagtgcttggtggctatgactagtcgggcagagtgtttaaacgtaatgagtcatctgcttggggaaatcaaaattaacaagagaagaaatacgtatttataaactgcttgattttttctcgagtattatatttatatcagatactactcatcctatatgtttgttctgcaggatccagatccagatatgcataaaagggattcatggctttaagcttatctcttacgctccaggaatggatcagtcagaacatcaccaccggctcgcctcgaccgccgccgactggtgtttccgcctgcacggctggcctattatgccaccgttgttgggcgtctacgtcttcaccgaccggcttgccttcgccgccgccgactggtgtttccgcctgcacggctggcctttatgccgccgttgttgggcgtctacgtcttcaccgaccggccgcctcgtccgccgccgactggtgcttccgcctgcacggctgacttattatgccgccgttgttggtcgtctacgtcttcaccgaccggctgcctcgaccgccgccgactggtgtttccgcctgcacggctgacttattatgccgccgttgttgggcgtctacgtcttcaccgaccggctgcctcgaccgccgccgactggtgtttccgcctgcacggctgacttattatgccgccgttgttgggcgtctacgtcttcaccgaccggctgcctcgaccgccgccgactggtgtttccgcctgcacggctgacttattatgccgccgttgttgggcgtctacgtcttcaccgaccggctgcctcgaccgccgccgactggtgtttccgcctgcacggctggcctattatgctgccgttgttaggcgtctacgtcttcaccgaccggccgccgcatccgccgctgactggtgtcaccgcctgcacggctggcctgttataacgccaactgatgctatcttcttcacggctggctacatcgctgtcactactaataggcatcagtatcttcaatacaagctgcctacgtttgccatggctgccgactggtttcttcacttccatggctgcatgattctgccagtgttgattggccttaccatcttcatcgccggtcgtctcgtctgctgctgactagtgccctcgcctctacatttggtttatacagctaccactactgatggacatcatcgtcttccgccgccaactcgtgttatgccgccgccgactagtgcttttatcttcacaactgcgcgtcttcactaccggtttgcttctgttgccgacgactcgtgttcacttcatcacggcaatgcaactttgtcatcatggtagagcgacttcatctttattatcttcggcactggcaaactctattgctgctacttcgcaagttttgctacttcaccaaccacgacgtctttgtgagcctcgacatctcggcatgcgatgccatgttattttactacaacaagaggctctccaatattcaggatttctacttggacatcttcaacacatatcttcaatcaagcaatgactactcgacgacaagaagctataattctcgactctatgttcagttgtttcccaactaaccaaagagtcgggggctacacaaatataaggctcaaaatttgacaaattttatataagccaatgagtcaactccaggagtcattatcttcatctttgcttcggaacagacattctacttcaacaacttcaaatatttcggtttggacgagttggacaacaacatcaactctcctccaagtgaagcatctacaacagctataacattaatttgatggattattgtcactgacatcatcaccagcacctctgcttcatcgaccctgacatctctgctgttgctaatggatgattatgttttcgccgacttattatttcaccttcacggttgacctactatgcaaatgctgatgagcgtctttgtcattatcattggttgctacactgctattggctggatcaccgacatcgtcatcttcatcatgtcggttgcgtttgtcgttgtcaactacacaactttatcgctgagcgccttcatattcattgctggctgacctgactgccgccgactggtttcttcgcctccatggctatgcgacttcagtacttttgattggtatcactatcttcactaccaccaatatttttgccacctctggtgggcaatattctctctatattggttatcttgtctctatgccaactgcgtcagctaccatcaatagacaattgtgactacgacataaggacaagctatatgctcaggggcttactagttcaaacacaagtattatgtctccaatttggacttgttccggatacatgcaacatgaatttatgatcatgggtctattttctatgctcaaagactggactatttattattccccgtaagggttatcaaccgaatacttgcgccagtcgggattcaatttttatatctattttggagtatcccataagggataatcactcagatcacatggtctatatcacccgggagcatgttacatgcgtcatcctttaaagggtatcgaaggcatattttttggccaaggcctaatatgtctgcagcccatattttcaggtgtggcctgtcatgttcttttagggacttaggcactttttgcttaggccaaagtgcgcgtgatcaagtgcccaataccttaaaatccttttataccgcagttactcaactttttaggagttggtacaatgcatcttaaaaggtgtcaaacagtaaagctttatatagctgccccgctgactttttaatatagtcatggtgctgtttgggtttttaagcaattgattggatacaatatcgttgctttttgccacgtaagtgtgcatttttattgaccaatattatggcttaggctgattatatattgtggtcatttttcaggcggttggtaaatcctttatgagtttatttactcggattttataccacatatgccatatatttccaggtgtggtggaaccatgtgtcttctagggacttaagcacatctgttaaagcagtgtgcgcatggggtatgcccaatactttggaaatttctttattcacaacatacaagcttttttatagctgttttgctatgtgaattttcaataatgtagccaactttaggttacactcatcatattttacaaagcagtcggtatatcactcggatcatgttattcagggatttacaccgcatatgctacatattaatatcaagtcgcttagttaactataattatcgaagccactcggttggttggattatttattccttgactatatgcttggtttgttcacttaaccgcatagtcgagggctacacctattaggtgcatctagtcgatgcacctgactttatttttcagccctccacagtcttcagatttggtaaaagtactcgggagaccatggcaaagatgattgaagtactcggctttggagtaatctggttcgagagaagattatcttttcgactgtgaaggtctcaggggctactgtggagattatgggtaccctatacccacacggcatggttatccgactagttataggggataacttatatgtatggaatatgtaacagatcatgacttgggtattacgtttccttatatattacggaacagcctaaagtcctggtttgataatattgtaaagtagatttaggaaaccgataccgtattggttaaggtttctatcttgtaatcctgccccccaccctatataaggtgggcaggaggccctctagggggcatgagcacatatgatcgtcagatcaatacacactcggcggattcaaatccccaaacaggagtagggtattacctctcattgagagggcctgaacctgtctaaatcctttgtctccacatccatccacttttaggtctcgtgcgctaccccgttttattattgccgaattcatgtttcgacaatttctatggtgtctacggttgtttgggaagtacgccggccacgtatagtgattgaaattatggtagtattgtttgctgctggccagtttctatgtgctgaagttctaggaatgcgcctacgcatcaacagtcggctacgccgtcagatatcgctgtggagcctagtggttgcactctttattacttgctttctgtgtttacagagagcacaggagctcatagctggccatgtggatattgtacggtttgctccttgtggttgtgctcctagtgactattagcaggctgcagttcccaattataatcagccgagtacagggtgatttgggtcgcaaatacatattttggcgcccatttatcctactagcagctcggaaagttccaagaaaaaggtatgagcaaaccagtggcaaatccaaaaaagacaaaggaactggtacaattttcaatgatgccagcagtgatggctctgatgatgaattgggcatcggaagtgaaaaggctgccattgaaacttcttcagatgatgcatcctcatcagctgactcaggtgggaacctcattgaaatagtatcactgaacatgctacttaccagtattctctccgattgcatttgcactttgttttgcatatgtttaaccgtggaataaaaaactatgccctctttgtttatctcttatacttcttctggaaaataccctgttctatgcaaaatgcaaaagcgatgaattaaaagaaagttaacgaagacttgattattgagagaactgatcatacaacagctagtgttgcaatttattttcgtacgttcacttggaattcctgtgttgatatttctttggctagtattatgttctatgtatcttcagaatatcatttaatatttgtaatgctggtttagtgctatggtgattacgatatggaatgtcaggagcaatgtactctttgtttagagcagacttttcatgatatatgccttgggattctgattcagtgtgattaattatgaaatattttctaacagtgcatctgatatgctacctagcttgcttatgaaagtgatctaattgatgtgacaggtatttcattctgagcccatgatagtggcgagcctgatgacgatggcaatgcatcactgtaagttctctaatttacaaagagaatggtctggtgtaggaattacgtttccttcgattttgtttatgtactccctccgtcccaaaaaaagtgaatctaggactagatgtgatatattatagtacaacgaatctggacaaatgtatggattcatagtactaggatgtgtcacatccagtactatgttggttttttatgtgacagagggagtaatgtagatgagcaggtacagatattgtatggtactgaatgttgatgatcgtcaacaaattgaaactttaggatttgctgctccaatgaggtgcacactggtttaggatctttcgctattgtctcagtgacatgtgggcctacattgagtggcaaatcgttctttggtgatgcaaatttcaaaacgtttttcacattatcaatagcgatttccaaaattttatagaatcacctgatatatctgtcatgagaatcacttagaagaacaaggctaccttctggtcttttgctctagttgaagaccgctgacacgttttctttttatttcttaccatttgttcagatcacagaaatctcgcaaaggggggcttggctccatcctcagaggctcttgtagttacaagaaggcaaagcagaaacaagccgtgcaattggatgacaccgaggttcctgatagccagccaatggacattttctgagactgaacttgatacttgaaagaagaaacacggacagctttggttttccattattttcatccacctgatagcatgccctggagtttgagcattgcatattagtatcccaaccagccttgataccatgtagtgggaagaaaaatgcacttggctgattctcatgttaccacatggcttttctgctccttgaactaaacaagcgctgcgatctcagctggaatgtaatcactatctggtggattgtcctcaatcagagattccactgatttttttatgaggcggtgtgcaactcttccaaaaaggataaatgtagcattggagctggcatcaccggcgatgagcactactttatatctacatgggtaatatacatgtgtatattaatgtgtgcagcacaattagtaagcatggaaaaatctggaatgaggtgtggtatgaaccttggatctggtattcctatgttagaacagcttgagcatttgtagctagaaccgtatggcttagaagttctatagcataatcggcatgaattgtaccaccaggaattttcgctgcatatcctcctaacagtgacattgacaatgaaacgtgtactctgaaaaagcaaagaacagaaatgatatcactattattgaaagtgagaaaatgtgcagcgatgtattgaacaaaaaactggcaaggaggtaccctgttcttgtgaggattgagggcaagtatttcttgaatagttttttcctctgcagtgtcctggttgtaacctgttgctgggttatcaa

SEQ ID NO: 5095 - DNA, 10496 bp, Oryza sativa
tgcatatacatgatggagtgcaattctcactatgccaattgtttcaagagaaaatcccttatatacccctgaaaattttcctaatcccttctatacccctgaattttgcttacttccttgtataccccaaaatttgattttgatcccttgcatacccctcccgtcagttgactgttagttgaccgtgtattttctataaaaatgaccattttacccttggatgaacaaagaaattcatgaattacattattaaaaatataaaagcttctcgcatgagactattatagttatgagtttgttgtgcgatgcattatttatcccaaaaaaatatttttagataatgaaataaaaaaatacgtatttattttttttaaaaaaggtcataaaaatgaggagcattcatataaagataggtataccaatgttcacaacattttttttatgaatgctcctgataaaaaatccattgtcctattaaaatttcaaataaaaattttaatttttacatttattttattttcaaaatttatgtcaaaattttctgcactaattatttagtctcattagttttataaaatgcacatgatgtgcactcaaacaaaattttcaattatttttgaagcttatatttaaatctaaaacatcaagggcaaaaaggacatttgcaaccaaacgaacagtgaaatgatggaaaatgtaacggtaggggcatggaagggatcaaattgaaatttcaggggtatagaagggatcgggtaaattttaggggtatgaaagagattgagtgagttttcaggggtacacagggaatttactcttgtttcaatgaattccgaatgatggatgcagtgtcgatgatcgaagagacaccctcaagggctgagaagtacaagtttttcttcggtgacgcaggtttcatggaatgtaacacacctctctctgacctagtggggagggcaaaagaactgttgagtcgccagtggtcgcatggcatcaacagtgccacctgaaaaaaactgaaagatgatttcgtatttacagtcaaacgaccatgcatactttttagtatatggtaaataagtgattgtgcatatgacctttctagaaagaacatagatttgcctttgagatgaacaaaggctattgtatatgtacctaggttcaccagtcgatgcttgtggatttcaatggactgccgctgcttcgcttccgccatttcatttactttatttgacattttgtaatatgcatgaccatgcttggtctatttggggtcccaattgggtaacccttgtattttttttttagttcaaccggcgcgctttattacatactaggatcagtgaaatcacgatccacaatagtttgaacaatgtcagggacagggtcagtccacacacttgcttgacccggttcccagcacacacccatttgagatagcttatgcgcagccacattacatgatcacggagcataattaaacacaacactagagaaatttaaatggacgaggtccttgatctcccttacgatagaactgcatggagacagagcataatcatgagagtggaaggctctctctaggatggatgaatcagtttccacctggacggagttaataccatgcgaaaaggcagcttgcaggccagctaaacaagcttcagcttcagctgcaacagcatcgtgcacatgttccaggcatcctgcacccgcaagaacagcacatccaagatgatcacgaaccaggaatccataaccaccggacttgtttgcagctcagaaggctccatcaaagttgagcttcaatcttccatctacagggggaacccatttattccgttgcacattcacatggggacgtttatctttacgcattgaggcataatcatagaccagcaatttcaccttatggaccacttctttcactctgattaactcctcacccgacttcaccttattgcgtgcataccaccaaacccacaaaagaaagaagacctccattcttcgatcatcctccagcttcaaaatggtctgtaccacatctctagcagaaacaagctgaatcaagcttaaacggatatcttcaaggcataaaattctccaacagagtttcatgggcttgcatttcaggaaacagtgtccaccattctcatcaaaccgtttgcagactgggcatagagttttagcgtctggtactctccttttaatgttgattttcagggggaggctgttatgggcaagccgccagataaacagtttgactttaggaatgcattgcaaactccagattttatcccactcgaaattccgctggtgcaccgctccagaagaggaatcgcccacttgcttcttcgccgatctctccctttgatcttccaggacatgatacgcagatttaaccgagtacattcctctcgtatcaaaatgccaggcaacaaaatcatctgtgtctgatctcaccggaatcgccagaatgttcctggcatcagactcccaaaaaatctcctccactagtggtttatcccagcaacccgtaactgggtcaataagatcagctaccttgttcagcacagtgcctcttcgtggagttatcagtcttcgggtaactccggcagggatccaaggatcctcccatatatctatgccgctcacattgccaaccctccaaatcatcctagccttcagggcagaaagccctcggataatacttcgtcaagagtatgagataccaggaccttccttgacattcaacaaattaccgtcaggataatacttagccgttagaactctcgcgcacaaagagtctggctgatccaagagtctccagcattggcggcctaacatagcaaggttaaacaaatgcaaatccctgtaacctagcccacctttctccttccggctgcaaagtaactcccaagaaagccagtggattttatattcctgttcttgctgagcccaaaaatacctgcagatcatcttgctgatctcatcacaaagagtgcgggtcagatcaaaacaagacatagcaaaggttgggatagcttgagctacagccttaattagaatatcctttccagccttagacaacagtttttctttagtcacagaaaatgatgtcagcttgtgatattcgactgtgccaactgtgtaccacctattgatccagggagtggtactgtattatacatggggtttccggtatataaaaccgggggccgacaaaagttccgattataaacaagttttagatacatgaaaactataaatacgactagtttatttgaaaaaaaaaatcaaaatatgaaataaatctaacatttttggaaggagtacatgatatagaaataaatggcccactacactggccaaggtcacctgtgacgggcccaaaccctcatctttgacggcttcgcgcatggtcagtgatcagtggtcactggtgagtccagtcacctttgacgggtggccggccgtcacaggtgacacccacctctgacgggcaagttactagaaagccgtcagaggtgttggtctccgctagccttgagcgagttaggacccgtcacaggtgactcatctctgacggccctttaaataaaggccgtcagaggttgaggtctccgtagttagaagctgtcacaggtgatctacctgtgacggccccaaaagtaaaggcccgtcacaggtaggtcacctctgacgggcctttatttgctagtccgtcacaggttatgttacctttgacggatttttgttccgacccgtcactgatgagttaattccagaaaaaaaataaatgctaaatattggctagcctcaggatttgctagccatgccctctgaaaaatagaaacatcacagatatattccagtcacagatccatcacagatacatcacccccccaatataacatcacagatccccaacaacacatatatgcagttcaaatgccacaattttgcacagcaaattcacaccccttgaaagccacaatttcggtcgttgctcatagaaccgcatatatacttaccaaatggattaaagccataatgtcatcgacctgcacaacctgtcaataaggaaaaaaaaaggagaaaacagatgaatagtacaacataaatcgtagttgatcaaatgtgatgacaatttagtaaagtaccataaatattgcacatatgaaagtaaattacattgcactctataaaaacataattttttacatcgccagaaattataaaaacatcttttttacatcacaataaattatctagccaagttcatgagtctatttggcatgaaaacgtcctttcttgttcattatttctgcaagaataaaggcgcacaattcgcctctgatagcgggggggttgatgggtgagatcttgaagccagctctaactttctgtttaataaataagaggttaattagcacgttttgaatagcaatgtagatattgaaatgagcttattcgccattagcaacaaccttagggtcgaaatctttcacctctcttagaagtgttgacatgttgtggcacacgtggaaaccacattggtctccgatctgttgtgcgcatgcaaacttggtgtcatgataaaattcattcttgccctccttgtgcctaccacccttttccacatatgggccccaagccatatttaaggccttggtgatttcactgaaatcataatctttggacttattggagttaaggtaggtaaccctactccacttaggtacgatgactaggagaatccaatgtcgcctgcgcagtggttatgtagcgttagtactaagaaccttaacttcaaaaacaatatacacgaagggtattgtcctcttactcttggttgtgtgcgcacatgatgtactccttgtcttgatgggcccataaacaccggttgacatagtcaaccaccttagtgaagctctgtcgtaaattaacctcattcaccatggatggatcaaggaacccaacctgattaccatggcgacgactctcgatccaacacaaccttaaaatatttacgtattagaactaatttaattaggagatatagtccagtcatatcacaagtatagaaggtatgcacttacaaggagtagcattttagaagaccagtgtccaacttccggatcctgaaaaggtcgaagaggtcatcaaagcctatagttatataggcaggcgacgataggaacggctggtggtcgtgatgtccaactatggatgactccctcattttccgcttggcattgcttagctccatgtattgcttatgtagctctcggcaagcaatacccatcacagctaacacattgtcctccaccaatggcatgcctagctcaaattgggctggcgccctcacgaccttccccgatttgctcaccggcatcgacgtcgcagccttgcccctttttggctccggcgccaactccccgaccttccccttgcctcgttcacgcttctggcccttgacaagtggtggggagctatcggcctttcttgtggtctttattggagccaaactttgagctatatctgccaagtccatatcagctccaccgggagaatgaggtactgacaatgccggtccacggggagcctcaattgatagcttagacttgggaggtgtaagctccgtcggtcgacttggacgaggagtcatcttcacaactatgtcttctttgggccattgtatgaacgtcttgcgcgcatcgcccaaagtcatgatttcatcatttgggggcacgggcagcggatagcctgaccaggtgtcctttactgtatcgatggacaccttggcatacccagctagcaggtctgcgccgtggaccttgtctgtaaccgagggcttgaaagccatgccctcagcgacttcaggagcgaaagttgggtggactctcgctagtaggacacactgtgctgcgccctgcataaggtgaaagtttgaatttaatattggaatgtgtaaatgtcttttattagatatggatcggataacaacaatcacctcgatgtggtccactgcagctagtggtgcgatcgggagaccaggggccggcacctctgtggatgcacaactactcctatgctgtgacggactcgcgtcgtgttgtacacgaggagttggttgcacagcaggtgttgtgactcggggtatattcatgtcggcgagcaccttgttaaccctttcttccacccttgcattcatgctagcttctagttcttgaatgacctcaaccttaagttcggccttcaaacgagcgtccctctcttccttggagactttccgtttcctgtattgggagctgtactgagggagtccatacttccagggcacatcgctaccaattccccgagttcggccaggatgttctttggttccgagcgcctttgtgaggatgtcatcttcgcgcctcttcggcgcggactcaacctcgctttgtgaagcttgttcagcaaccaagcccaactagaaaagaagatagtcgtttatacgaacttgtactttatacgaacggaaattagttaggttaagtagtgaactcaccagttcctgatagacgacggcatcacttttgttctcaaatgtgacagagccgtccgggttgaccttaccccttgcccgcgcccagttgcgagctctttgttcagggatgtctgaaaacggggcagggacattcgctgctgcagcggctgcatcttcttgggcccatattgcctccttgccgatgtaccctgcggtgcccagccgatgcgggtgctcattccgctgttgcagtacgcgatgtgcctcgcttgattccctaaactgttgggtggtcttgagagagcagaattcctcccacaccgcttcggttatttgagggtattcatcgaacggcgtatgattgccgggcgggttgacaaactcggtgaagagcttcgacttccaattcttccaagctttgcccatcttttggaatgccttccgcttgagcctatcctttgcttcggctggaaatgtgaaccatttctccattgtcgtccaagctcgctctttctcggcttctgtgaccttgccgatatctttatggaggatcccgaagttctcacgtgccgctatcccgcagcagttagaccatcttccaatgacagtcctgggcgccgtgggcctaccactagcgtcaacctctcttataacttgcactgtggtcggccatatattttgtgaccgcggatttctactagacctacttgcacttgtcccgcccgacatcgacgtatgttgttcctgcggcaattctgcagcacaaacagaaggcaatatttgctaaggggtgctagctaaaatttatgtggtcatgtggtgaaaatttatcctataaattaccatgaatttcgggttgttggaccgccgttgtcgcgggatgaccttcggcaactgcctctgtggctgggtttgcttcttcctggatcctcgcaggtgttggggagggcgggtttgcgccgggcgttgacatggtttaactttcgcgaaaaagattataaatttcctaccattagactaaatagcattagatccaatgtaatacggggtatactatgaaagatatggcctcagttttgctgagaaatatgcatcaattacaatcatttgcatgaagggataaaaagaggaaatcataacatcaaaagagcaagtgcagaaaatctgttcttatgcataaaaaaagaacaagtgtagaggtatataaccactgaatcaatcatgcaaatttaaaaaacagcagcagcaagggtacagaatttgcatgattgacataaaacagcagcaggaggagtatatatgccacaggggtagcaacagcaggggcaaattaactaaaacaacatgtctagatatactcctcttatcaatccagaagaaaagagcaagtgcagaaaatctgttcttatgcataaaaaaagagcaagtgcacaaaatctgttcttatgcataaaaaaagaacaagtgtagaggtatataaccactgaatcaatcatgcaaatttaaaaaacagcagcagcaagggtacagaatttgcatgattgacataaaacagcagcaggaggagtatatatgccacaggggtagcaacagcaggggcaaattaactaaaacaacatgtctagatatactcctcttatcaatccagaagaaaagagcaagtgcagaaaatctgttcttatgcataaaaaaagagcaagtgcacaaaatctgttcttatgcataaaaaaagaacaagtgtagaggtatataaccactgaatcaatcatgcaaatttaaaaaacagcagcagcaagggtacagaatttgcatgattgacataaaacagcagcaggaggagtatatatgccacaggggtagcaacagcaggggtatataaatgaacaagtgtaggggcaaaaaaatgaacaagtgtagataatctgttcttattgagcaattcatcactggccatttaataaggaacacattgggcagcagcagcaagggtatataaatcatcaaagaatgacagaaaacaagtgtatatagtctcctcttatcaatccagaaaaaagagcaagtgcagaaaatctgttcttatgcataaaaaaagaacaagtgtagataatttgttcttattgagcaattcatcactggccatttaacaaggaacacattgggcagcagcaacaggggcaaagatactccacaggggcagcaacaataggggtgtattaacataaaacatcactggccatttatctagttaaaatcatgcaaaattcaaccaatgcagcaaaattaatcctaaaatcatctaatacaaaaagactaattcatctaatactgcatatatttcatccacaaatagtccaaattcatcacctcatatagcccatatctcaaatatgcatatatttcatcaaaaaaaatgagacagtactactaacttcatgtaaacagcaattcatccattcaattcaatcaagtgtagataataaaacagcccacaatcatttatgtggcagcagcagcaagggtatataaatcatgtatataaacaacaattcatgcaattcacctattcatagacaaaaagggtatataaatccacaagtttagataatctgcaaagttccttaatcatcaaagaatgacagaaaacaaaatgcatggagaattttggtgtctaggtcggttccgtccatggactacactgaccaatccaccaaaattccccatgcattttgtattctgtgatggtttgataacctcggaacaacattaaatctgcggccaatcaatcaattcttccatttgaactaaatttcaaaccctaaacctaataaagttccttaattatcaaagaatgacagaaaacaaaatgcatgaaaaattttggtgactaggtcggttccgtccatggactacactaaccaatccaccaaaactccccatgcattttgtattttccatttgaactaaatttcaaaccctgtatatgctttatttataggaaaagggaacataacccctaactagctagctagataaactatttctagctagctaccctaccaagctagaaacactgttgccaatctatcaatccatcctttttcagctaaatgtaaacattatccccaaaattcaatagttctagcaaaagggaacaaaacaacatataaagcagtacacactccatgaatggttacatgtcaaaatggcacttaaatccacattcaagttttaaataacagttgcaacaatctgaacggaatgacaaaattcatcgttcatccaaagttcatcattcatccaaagttcatcattcattcatccattcaattgcatcatttattcatccatccactgcaccattccattcatgggcatcagagagagaggggtacctggagaggagacgacgagcagaggaggcggcacacggcgacgacgagtcccggcaggcgcacggtgcacggcttctcagcacggcggcgcggcggcggcttcttggcacggcggcgctgaggaggagaagagggggttaatcggcgaccaatagtaaacgaggggaggcggggggagtgggctcaccgtggaggtcccggtcgagaggaggaggcggcggagaggagatcccggtggcggcgacgacggtcctggcgtggcgactgagaggaggtcccggcggccgtcgagagagtgagtgaggcggcagcggtggagaggtcgaggcggcggtggggagggcggcgtagagggcggagatggcggtagagagggcggcggagatggcggcggagaggtcgatggagatggacggcggcggtcgagagagtgagtgaggcggcggcggtggagagggcggcagagaggtcgaggcggcggtggggagggcggcgtagagggcggcggcagagatggtggcggagaggtccaggtcgaggcggtggagaggagggcgtaaagggtggcg

SEQ ID NO: 5096 - DNA, 34576 bp, Oryza sativa
  unsure (1)..(34576): unsure at all n locations
tgcatcaccaaagaacgatttgccactcaatgtaggcccacatgtcactgagacaatagcgaaagatcctaaaccagtgtgcacctcattggagcagcaaatcctaaagtttcaatttgttgacgatcatcaacattcagtaccatacaatatctgtacctgctcatctacattactccctctgtcacataaaaaaccaacatagtactggatgtgacacatcctagtactatgaatccatacatttgtccagattcgttgtactataatatatcacatctagtcctagattcactttttttgggacggagggagtacataaacaaaatcgaaggaaacgtaattcctacaccagaccattctctttgtaaattagagaacttacagtgatgcattgccatcgtcatcaggctcgccactatcatgggctgcagatgaaatacctgtcacatcaattagatcactttcataagcaagctaggtagcatatcagatgcactgttagaaaatatttcataattaatcacactgaatcagaatcccaaggcatatatcatgaaaagtctgctctaaacaaagagtacattgctcctgacattccatatcgtaatcaccatagcactaaaccagcattacaaatattaaatgatattctgaagatacatagaacataatactagccaaagaaatatcaacacaggaattccaagtgaacgtacgaaaataaattgcaacactagctgttgtatgatcagttctctcaataatcaagtcttcgttaactttcttttaattcatcgcttttgcattttgcatagaacagggtattttccagaagaagtataagagataaacaaagagggcatagttttttattccacggttaaacatatgcaaaacaaagtgcaaatgcaatcggagagaatactggtaagtagcatgttcagtgatactatttcaatgaggttcccacctgagtcagctgatgaggatgcatcatctgaagaagtttcaatggcagccttttcacttccgatgcccaattcatcatcagagccatcactgctggcatcattgaaaattgtaccagttcctttgtcttttttggatttgccactggtttgctcatacctttttcttggaactttccgagctgctagtaggataaatgggcgccaaaatatgtatttgcgacccaaatcaccctgtactcggctgattataattgggaactgcagcctgctaatagtcactaggagcacaaccacaaggagcaaaccgtacaatatccacatggccagctatgagctcctgtgctctctgtaaacacagaaagcaagtaataaagagtgcaaccactaggctccacagcgatatctgacggcgtagccgactgttgatgcgtaggcgcattcctagaacttcagcacatagaaactggccagcagcaaacaatactaccataatttcaatcactatacgtggccggcgtacttcccaaacaaccgtagacaccatagaaattgtcgaaacatgaattcggcaataataaaacggggtagcgcacgagacctaaaagtggatggatgtggagacaaaggatttagacaggttcaggccctctcaatgagaggtaataccctactcctgtttggggatttgaatccgccgagtgtgtattgatctgacgatcatatgtgctcatgccccctagagggcctcctgcccaccttatatagggtggggggcaggattacaagatagaaaccttaaccaatacggtatcggtttcctaaatctactttacaatattatcaaaccaggactttaggctgttccgtaatatataaggaaacgtaatacccaagtcatgatctgttacatattccatacatataagttatcccctataactagtcggataaccatgccgtgtgggtatagggtacccataatctccacagtagcccctgagaccttcacagtcgaaaagataatcttctctcgaaccagattactccaaagccgagtacttcaatcatctttgccatggtctcccgagtacttttaccaaatctgaagactgtggagggctgaaaaataaagtcaggtgcatcgactagatgcacctaataggtgtagccctcgactatgcggttaagtgaacaaaccaagcatatagtcaagggataaataatccaaccaaccgagtggcttcgataattatagttaactaagcgacttgatattaatatgtagcatatgcggtgtaaatccctgaataacatgatccgagtgatataccgactgctttgtaaaatatgatgagtgtaacctaaagttggctacattattgaaaattcacatagcaaaacagctataaaaaagcttgtatgttgtgaataaagaaatttccaaagtattgggcataccccatgcgcacactgctttaacagatgtgcttaagtccctagaagacacatggttccaccacacctggaaatatatggcatatgtggtataaaatccgagtaaataaactcataaaggatttaccaaccgcctgaaaaatgaccacaatatataatcagcctaagccataatattggtcaataaaaatgcacacttacgtggcaaaaagcaacgatattgtatccaatcaattgcttaaaaacccaaacagcaccatgactatattaaaaagtcagcggggcagctatataaagctttactgtttgacaccttttaagatgcattgtaccaactcctaaaaagttgagtaactgcggtataaaaggattttaaggtattgggcacttgatcacgcgcactttggcctaagcaaaaagtgcctaagtccctaaaagaacatgacaggccacacctgaaaatatgggctgcagacatattaggccttggccaaaaaatatgccttcgataccctttaaaggatgacgcatgtaacatgctcccgggtgatatagaccatgtgatctgagtgattatcccttatgggatactccaaaatagatataaaaattgaatcccgactggcgcaagtattcggttgataacccttacggggaataataaatagtccagtctttgagcatagaaaatagacccatgatcataaattcatgttgcatgtatccggaacaagtccaaattggagacataatacttgtgtttgaactagtaagcccctgagcatatagcttgtccttatgtcgtagtcacaattgtctattgatggtagctgacgcagttggcatagagacaagataaccaatatagagagaatattgcccaccagaggtggcaaaaatattggtggtagtgaagatagtgataccaatcaaaagtactgaagtcgcatagccatggaggcgaagaaaccagtncgcggcagtcaggtcagccagcaatgaatatgaaggcgctcagcgataaaagtgtgtagttgacaacgacaaacgcaaccgacatgatgaagatgacgatgtcggtgatccagccaatagcagtgtagcaaccaatgataatgacaaagacgctcatcagcatttgcatagtaggtcaaccgtgaaggtgaaataataagtcggcgaaaacataatcatccattagcaacagcagagatgtcagggtcgatgaagcagaggtgctggtgatgatgtcagtgacaataatccatcaaattaatgttatagctgttgtagatgcttcacttggaggagagttgatgttgttgtccaactcgtccaaaccgaaatatttgaagttgttgaagtagaatgtctgttccgaagcaaagatgaagataatgactcctggagttgactcattggcttatataaaatttgtcaaattttgagccttatatttgtgtagcccccgactctttggttagttgggaaacaactgaacatagagtcgagaattatagcttcttgtcgtcgagtagtcattgcttgattgaagatatgtgttgaagatgtccaagtagaaatcctgaatattggagagcctcttgttgtagtaaaataacatggcatcgcatgccgagatgtcgaggctcacaaagacgtcgtggttggtgaagtagcaaaacttgcgaagtagcagcaatagagtttgccagtgccgaagataataaagatgaagtcgctctaccatgatgacaaagttgcattgccgtgatgaagtgaacacgagtcgtcggcaacagaagcaaaccggtagtgaagacgcgcagttgtgaagataaaagcactagtcggcggcggcataacacgagttggcggcggaagacgatgatgtccatcagtagtggtagctgtataaaccaaatgtagaggcgagggcactagtcagcagcagacgagacgaccggcgatgaagatggtaaggccaatcaacactggcagaatcatgcagccatggaagtgaagaaaccagtcggcagccatggcaaacgtaggcagcttgtattgaagatactgatgcctattagtagtgacagcgatgtagccagccgtgaagaagatagcatcagttggcgttataacaggccagccgtgcaggcggtgacaccagtcagcggcggatgcggcggccggtcggtgaagacgtagacgcctaacaacggcagcataataggccagccgtgcaggcggaaacaccagtcggcggcggtcgaggcagccggtcggtgaagacgtagacgcccaacaacggcggcataataagtcagccgtgcaggcggaaacaccagtcggcggcggtcgaggcagccggtcggtgaagacgtagacgcccaacaacggcggcataataagtcagccgtgcaggcggaaacaccagtcggcggcggtcgaggcagccggtcggtgaagacgtagacgcccaacaacggcggcataataagtcagccgtgcaggcggaaacaccagtcggcggcggtcgaggcagccggtcggtgaagacgtagacgaccaacaacggcggcataataagtcagccgtgcaggcggaagcaccagtcggcggcggacgaggcggccggtcggtgaagacgtagacgcccaacaacggcggcataaaggccagccgtgcaggcggaaacaccagtcggcggcggcgaaggcaagccggtcggtgaagacgtagacgcccaacaacggtggcataataggccagccgtgcaggcggaaacaccagtcggcggcggtcgaggcgagccggtggtgatgttctgactgatccattcctggagcgtaagagataagcttaaagccatgaatcccttttatgcatatctggatctggatcctgcagaacaaacatataggatgagtagtatctgatataaatataatactcgagaaaaaatcaagcagtttataaatacgtatttcttctcttgttaattttgatttccccaagcagatgactcattacgtttaaacactctgcccgactagtcatagccaccaagcactgggagtcggcctaagcacttcccaaacatgcatatgagtgacatgagttcgtcattaatggaacaaagtttcacggatcggagtttactactcgggtacttttgcaattattaagagcagaaaataaattatcttatctctatgcttttgatttattccgaataatacttagcaccttgcgttactcggtccatccaacgagcccccgggtgctaggaatcggcctaaaggcaactatccattggcaaaccaaacggaaagcataggaagatggaactccataactcgataggcacttttgtactcagaatatgtcgcaagcaatcaagataaatattatgaaaattgtttaaaaaatatgatataacatctgtagcccccgactcactactcaatggaagaccaattggtgtagtgaggcagaggaaaaggcaaaatatcatataaagaataaaataaatgatgacttagctttgtaatattccccttggtgatggcagaagtggccaatgtgggaacaaagtcgtccatcaataacaatgaagacaccagtcggcggcgacgaaggcggtcgacggtgaaagcgaagatgcccactaatggcggcataataggtcagccgcgtaagcggaaacaccagtcgacggcaacgaaggtgagccaacggtgaggatgtagacatccaacaacggcggcataataggccagccgtgtaggcggaggcaccactcggcggcgacggaggcaggccggcggtgaagtcgtagacgcccaacagcggcggcataataggccagccgtataggcggaggcaccactcggcggcgacggaggcaggccggcggtgaagtcgtagacgcccaacagcggcggcataataggccagccgtgtaggcggaggcaccactcggcggcgacggaggcaggccggcggtgaagtcgtagacgcccaacagcggcggcataataggccagccgtgtaggcggaggcaccactcggcggcgacggaggcaggccggcggtgaagtcgtagacgcccaacagcggcggcataataggccagccgtgtaggcggaggcaccactcggcggcgacggaggcaggccggcggtgaagtcgtagacgcccaacagcggcggcataataggccagccgtgcagacggaaacaccagtcggcaagagtagtgccgcggcgttacatgcaaacagcagaaaataccaagagagattaatctgacatttagagatcaatctaataaacaacaataagttgaaaaggaaaaaacctggcgaagtcggagattaaaaggaaaaaactcgccgagattgatctcttcgactgactccgagacggagcggaggaggcggaggtcgcagtcgcgggcggcgttggtgtccatcagcacgacgcaggacggcaggaaggcatcggcgtggctgcagccgtctcctatgcatccgattagatcggttttggcatgcttcgtgtttgtagatccatcttgcaacaccatggcatcctcgttgggtagattggaccagtaggcttggtggtggacgaggacgaccatcaaatccgtcgaactgtcgttgccccgtcgttgccgtcgtgctgatgcgaacaagatcaggcagagaatagcagcgacgattcgtcttgttgaagtcgtcggcggcgaggaatcaaggagctcccaaagcgaagacgaagccggcgactcataaagttgattccatcgcactcgtcgtcaggaaactcggcgtttacccctacctggcgcgccaactgtcgaaacatgaattcggcaataataaaacggggtagcgcacgagacctaaaagtggatggatgtggagacaaaggatttagacaggttcaggccctctcaatgagaggtaataccctactcctgtttggggatttgaatccgccgagtgtgtattgatctgacgatcatatgtgtcacgtcctgataaattcatcccgaaataaaaatcattttctaaaaggaataatagaattaattaaaattcgaaaagaaattggcaaaccctaaaatacgtgcaagaaaaattcaaatgtggcccggagaatttttgttaaattctccttggtctaaaaggagccctcaaattttacttgaattttcagaacaccggaaataattattaaacaacaacaacaattatcaaagtttaataaaaagaaaatctaaaaataatcctcctccctttgggccaagtctggcccaaagtcctccctctctcccctcggcccgcggccgaagttttcctttcctccctctctttctctccctctccttctctccctcctcctcttgggcctcctcccctcccggcccactccctcctccctctctctcccgggctgcctttcccccccctctcccctcccggcctgctcggaccaagccgcctacccctcctctcccacctgggccgagtcccggcccagccgagcccccccccctgcccgagccgccgcctgaccgcgtggggcccacgcgtcaggcgagtcatcgtcctcctcccgcccagccgtcctctctccctctcccgtgaaccctagcgccattcctccctcaaatccgcgcgattcaagcatgggattcccaaattgattgaggggaattaatcccctttccctcctctctctttcccccttaatttccccttgaatggtgcccccaatcgccgggaacggccgcgccaagtccggccgccttcctttgccgccggccaccattcccgtcgccgttccgccctctcccgtgctcggctcgcttccctccgctataaaatgcaaccccctcgctccgttctatcgctttagccccctcccgcggtctcccgtggtctctagccacctccccaccgtcgccctctctctcccacgttgccggccggcctccagccgcctgtgccgcctcgcccgcgcaccggccggccgcgccgtcgcctcttccagcgtcgccgccacctcctccaccccggcctgccctccgtctcgcgaggtgacccccggagctacgtttccgccgtcgcccttccatttcctccgcgccggccgcctccagccgcctctatctccctgcctgagcgccggtcgacgtcgccaccaccttcctcggctccacgacgccgctctcatccccggcatcacctcctcctcgcccgaacttcgccggaacaccgtcgcccgcgccggcttctccttcctcctcggcggcatctcccccggctgcccttttcgccatgcccatgcgtcagccggcgctgccgtcccctccctcggcacggtgacgtagccctccacctcgtccacccctcggtttcgcccggaagccgccgcacatcgccgcgaacctctccagccgcctcgccggagttgttcggccgcccgtccctcctcgcccgtgcaccggtcggccacacctccaccacctccggcatcgcagcggcaaggccgtcctcggcatcgtttcccctccatccaaacccctccgcggtccatcatcgtcgtctccgatcgttctcgtcgtcgacgtcccgtcggtcgcccggctcgtcgcctcgcggcgccgcctccgtcatcgtcatcgtagcggcgtgttccacgtcatcctcgtccccgtgcagccgctgccggctgtcctcgtcgcctcctcgccggtcccggtcgtcgtcgtcgtcgttgtcctctcgtcgttcccggtcgtcgtggcgttcgtccctccgtcaagccgttctcgttcgtcgtcctcgcttcgtcaagatcgctgcagccccgtcctcgtgttcgtcctcggctccgcgtcgtcaagcctcgtgccggccgcgtctcgccttcgtccaaggatcgccgccgaagccgtcccctcgccgttcgtctccgttgtgcccgtctgtctccgccgcgcccgttcgtcgttggtgttcccacgcctcgccgcgtggtggtaaggatccgtcctctcgcttccccgccctcgtcctttcggtgtcgccccgtacccgttgtgcggtcgtcgaccccggtacccgtgtaccggtgtcggtagtcgttcacgtgtgcgggtggtgaccgtgtagtgtccgtgttagtgtgcccgctcggtagccgcgtggtttccacgtgtgcaacccgtgtggtgtctagtggagtccgtttgtcggccactcgcctcggttgacacacggggtccgcttccgtcgacccgtggaccgcctctgtgtactcggtctaccgcggtcctttaggttgatatgtggggtccgcatgtcaacggcgcagccttcctgtcttttccaggctagcgcttgcacctgttttataattgcaaagcttaattataataatccgcaaatctccatataacagcattaaacttcggatgatcatatcctggtcatacgagctccgaatcgacccgttcaagtctcctaatgtttgttataacctaaagaaccctgtgctttctttttatgtattgttattgcttctttataggcttgtagctttgcttgtgtgcttcgcgtagctttcgtcgttccggaggtttccaaagcgtggttcgtggtcgtcgccgaaggttcggaaggccgttctctctgagcaaggcaagtcacatcatccttgagcatattgaatcccagtttataaaattattttgatttaaattaatgcattatcgctttatttaaattcccgcgttatcactgttttatttagccatgcctatttacctttgttatgaccttattattattgttattgatattaataccttgttcaccctagattaaacaaaaccccatctagtggacactctattcgtggttccactagtatgaatttaggtagatgcttcgctgattaattaggcaacattaggtggttttataactatagactttgggaaattctcatatcatttggacactatggaattgttggtttatggtggaattggatatacacctctcttcctctttcaaaacccctaaaacctgttttcggtggggtttgggtgcatgccagttgtgggaagtagcaccccggccactataaggattaagctcgggcctctgttgcaaagcactaccgtacttccacatgtctagtgggtaaggcttagtttgtggctcagtctggttataaacaaaagtacacggattggagatggatgaagtcgggggtcgatggacattctccagggcaaatgaaggctacacgagctgcggcccggtagtcgagatgtcattggcagagggttggtgccctgctgctaggggctcagtcttgcctgcctgtcccgggggttccggccgtaggcaggattgggtcggtactcttgtctatggctaggatgggttggaaactatgtcacgtcttccgtccgtataccgtggtggtatgtggcacgtggttacacgtgaggaagatgtgtcttgtgggtaaagatgtacacctctgatcagagtataatctattcgaatagccgcgccctcggttatgggcaagccgagcaatgtacccaagtcagtgttataattcttaaaatttgctcaacaactaaaatatggaatggtcggcctggtttggcttgggacgagctgggacccagggtcgggttgccagttcggtctgaatcatcgtaggccttgggttaaggcaggttcgtgagggttcacggccttgattaataatactgtgtagctctaggatcgtctttataaaatggctttgggcaactaagtgacttttaaatgctgtttactgcaaaacttaacctctatgttattatccccttgtactcccttgcattaattgtgcatctccggtgtggcttgctgagtactgtggttgtactcattcttgctctatctttctccccccttcagtaagagaagctttggaaaagaagtcttaggtggagtcctggcttataccccagttgagcgcctgtgaagatggagccgtaggcccgctagtccgctgctgtttatttttgtttgtcaggcctgaagcgcctttgtaataatgtaaatattatcgatataatgaagatgtgtcttttatatcatgtttgtatggtgtaccccggcttttcctgggacggggattaatacattagcgttcgggaaaaggcaattttcccggtcgcgacaatatgtgctcatgccccctagagggcctcctgcccaccttatatagggtggggggcaggattacaagatagaaaccttaaccaatacggtatcggtttcctaaatctactttacaatattatcaaaccaggactttaggctgttccgtaatatataaggaaacgtaatacccaagtcatgatctgttacatattccatacatataagttatcccctataactagtcggataaccatgccgtgtgggtatagggtacccataatctccacagaaatggagaagcacacgattaccatcagcccgttccagcccagtcgtctaaaggcacctctcgtccggaagaacagttgataatccagcctattgttgcgggtgaatatcctgaaagtagtcatattgtttaatcattaaacagaagggaattgagggggtgtttagatattgtaaagtttgggcgtgtcacatcagatattatatccgtcattagcaaatgtttactgtagcatcacattgtcaaatcatggagcaattaggcttaaaagagtcgtctcgcaaattagtcgcaatctgtgcaattagttatttttagcctatatttaatacttcatgcaggtgttcaaacattcgatgtggcagagtgtaaaattttgaggtgggatctaatgagggccttaaagacggaattttaaggtaccctcaaatgattatgagcctttaatcgcttcagattcaatggatttgattttattgtactacacccggtagtagtgtagtagaaattatataggggtaaaattagaaataatatatataacattacaataaattcgtgtatcatataccatattaaaatagatgaattggtaaatatattttactaaagcttcaaataaaatattttatatacttatgaaaatatatagttagatttaaaatttactacactactacacatggtagtagaaggtaccataccataaaaacaaaaaggcgcataggagccaattatttgattatcaaaagttagtttcacactacaagtttgaaacgcttgaaatcttagcgtgtgtttggttctgggactaggtgggatgggatgaaaccatccctgattttaggattgggatgattccattcgggtgtttggtttgtagaataggacgatcccagttttttgtttggttgaagggacgagggagggatgggatgagcgctgtttgcaaccaccgataacgccgtttacaacaaacatggccgacgccgcctctgccctcacctccggacgtggtcgtcgccggcctccttgatggcgtcgatgagcttgggctggtcggggcctgggtcacacgcaccgaggagatgacggtgtcggcatcacagacgagcgggcggaggagcgcgacgacgacagacgggatgacccaaccgagcgctggcggcgatggtgtcagccttcgcgcagagcagccgcggcttggcgatgacgacggcaacgaggtccgcgcgggagagggagagggagaggccggtggagaggagggcgagcacggccatcatcgcggtcgggcgggcggagaagcgcgacgacgcacggtcggcccgccgccgagttccccggctccagatccgtcgccgccgccttccccatcgccggatccgccgccgtcgccttccctatcgccggatccgccgccgccgccttccccaccaccggatccgctgccaccgagccccccgccgccgctgtcgccgagcccaccgccgtcgacgtcgcccgagcccaccgccgccgcggtcgcccgagccgtccgccaccgccgtggcccgagccgtctaccgccgccgccgccgccgtcgtcgagcccgccgccgccgccgtcgcctagcccgctgccgtctctcgaggacgagcgcgcgagcagggcggcgagcgtgcgatggtgttcgctcgttcacgccgttcactcgtcccaggtgggatgagttggtccgccagttttggccggatcagttggtcccggatctgagaggaatattcctctctagggaccaacccatcccactcaaccttgaaccaaacacccctaaaaatgggttcatcccatcccatcccatcctatcccagcaaccaaacactaccttattgaacagctttgcagccttatcttttcgcttacgctcatgcttatcagccgaaatttaaatatttaatcttaaatttaaagttgattttggggtttttcatcaaagtttattttttagtcttttagatcgttaagaacatgtatataaaaattttattcacaaattatttttcatttgtaaatatgttgtttgacttatttaccgaataagcgaaacgatgaggccgttgatatgattgctaggttggagtgcttctctatctagtgcaagcttgcaaagtcaggtggcatccaaacaggaaaaaaaacgctaattgcagaagattatcaatgtattatagaaatggaattccatctatccaaattcttgtcagccaaacattgcaagaccaggagactttgcatgtatacatacctcgtggcttctaggaaaaatatcgcagtcgcataacgaaaatcgctcttgagaacggacggatagccacccagcaggacgacggtggcccaggtgaaggccaccgtgccgaaggcgttgcccacgctttcgatcaccgcgagcaagcggacgaagtagttcagccacttctccggtgccgcggcgaccgccttatgatcagcttgtcccgactccgatacctgtatccggtgctcctggacagcgctgccgtcgcccgtcggcggccatcatactgattaacttaggtaattagcgatcctgcaggaaccacaagctatagcctcagcacatttgtagagcaacccaaacaaagccgatactcctatatatgtaccaaaagtgtcgaaactagatttcggcaataataaaagggggtggctatcaagctggaaaagtgtatgggtttggagacaaaggatttatacaggttcaggccttcttataaaagaagtaataccctactcctgtccggggatgaatccgccgagtgtgttattgattgtatgatttggagaaaatcaacatccgccgctagaggcacccggaccccccttatatatgggaaggagtccgtgttacaaaagataatctatatccctaacggaataggcagatacagataaaatacagtcgtgaccgactagatctcaaggtatttcctttacgtacaagttaagaaacaaacccgagatacacacaagatattctatctatattcggtatcctatattcaacccaaatatcatcgccgtgtagatatgggatatccataatctccacagtagcccccgagacctttgcagtcaaccattatagccttctcaaagatagtaatccgagtgcttcaaattattcatgccaaggcctgccgagtagcgaagacgaagactgtaaagggcgaaacaataaagaatacggtgcatcgaatagatgcacctaattaggtgtagcccccaactatgtgattagttaacaaactaaacatatagttgagaacaaaataatagcacaatcatgcatcatatgacaaaagcatacgcggcgcctaaagaggcatcctagccgactgctttttagccataataaaaggaatccgagtggtttacactctaaaaggttcacgaatgaacacacttgacagtcatccgaataaaaactctaaagattacccaccaagtattataaaaattatggtaataaataagtctaatagcctaggctatgactatttaccataataaaaacaggcatataacataccagggaaatgactatggtaaaaacaagccactccaagttaacccagacagcttttgtagcctaaaaaagcttacaaaaagcagcatgacgcctttctgtcgggcaccttttaatttgcattgcaataattccaaagaattatatgaccgcataaaaaggattttatcagcattgggcaacactattgtgcgcataaattgccaaagcaaaaaatgcccaagtccctaaggaacacaatgggccacgctgttaaaagtattgggctgaggtactgttcaggcctaggcccatttgcacctccgatacccttaacaagaaatcccgagatccaagcgacgcttcgtcttccccgccggaactctcgccattttccccactccctgctacagtaaagaactgcgccggcaaactagggttcaccattccactcaaatccaccttcaaaaagtgatcaaaatcctccccgtgatccaccgcctcaattcctcacctctcccaagccatccctcgaatcaaatcagcgcattcggggaaaatcgatggcggaagagaaagaaagctttgaaggccagtgggcgccgtccgacgtaacagaagagaacctgaaggagatggtggcgcacggcgttctccctgccaaggagatcatcgggtggcggccagcgtgcggtgagatttttccgacccccgatacacacgagattgtggtcttctctcatttcttctatggcggcttcgctcttccgacctcgaaatttttccgcgggatattaagtttctatggaatcagtttgcatcacctaaacccaaattccatagtccatatcgccaatttcgtccatgtttgtgaagccttcttgggaattaaaccccatttcgctctgttccgccgaatcttttttctcaagccccaaccgaacaagaataagccatgtgtagtcggaggggcaggatttcagttgaggggaactctgagccagaagtatttctctatgcccttcaagacctcaaacaaagggtggcatgcgaactggttttatgttcagaatcctgagcctgctcttcccgagtactcttgtcttcctccggtgtaccaagatacttggaactctcttcctatcggagataaagctgctcaagccttggaattgatggaccgcatgctaaaactcaaagaacaaggcttgcaaggagagcagattactcggcatttcatcaaatgccgactggcaccaattaaagaaagatcccgtacagcgttcgagttcgacggcaagcatgatcccaatcgtgaagaaccagactctctggactttaaaatcatgaaggagagaatgtataaaattttctcaaatgctattgtcgtcagctactcgcatcagctgccagttgtgccatataatgcattcaatccgcctccgcaggtatgcatctgaaatcttcaatctatgactaaaacattatcttgtcttcatgttgaattaattaaccgtggaagcatctcatttaggaatatgcgttgatgaaatctgatcccccaatcactcagcgccggtcgcctcgtcagcacaccgttcagggaggtggagggccaaaaatcagaccagatccgcaacctcaaacctccaatccaactggacagacaggttctcgcaagagaaaactggtgctcgacaacgatgaaggcgacgacgataaatctggggacaagggctcgcctaataaactcccaaagcgtaccatgcccaagaaaaaactggctggccgtcaaatgccaaagattagaacattttctaggtataaacctctcggtaccatttcccttcgacatgcttctctcatagaaattatactgaatatcgaaagaacactttgcaggaaaccatccgacatagatcccactgggaaagattctgatccgactgtgacagaaccaaatttatccaaggatcctgagccaactgccgaaagccagccgactgccgaaagccagccaaccggcgcccatgctttgggtgataaggccaatccgagtgaccggccgccaactggagaccagtcggcaacagctgaaactgcaacaacacaagagcccccgactggaaaccagtcgaatgtaggtcccgatgaagaaatccctgaagttgaagcgcagacgacaacttcccaaggaccagaggctggtaaagactcaatgattgggtctctaaataaagaacaaggatcaccctcatgttcagccaggaacatcctcaggtaacacatcttctcaagtgatgccgatttaaataacttcagcttactcgtctaatgtcttggaaatacatcaggaacactaggcgatgacgaagaagcaattcctcgcataaaggcggctgatgactcccgtcctcctatcttgctcaaatggtgggacgagaactcgcaagttgccggcatcgtcataaatcgtcaaaaagaagatgaggaagtgtgccagctgaagaaagcacttggagaagccactcgcattgtgaatgtaaatcttccgggtgactgcctttaataactttgttctctctttagcagaactgaaccatgatccatcatgcagagaatccatcttcgcaatgaggccaagactacaactttggaaaggctggttcctcatttgggaactcttgaagcagttagggaccagctgcatgaggccaaggagtacgccaaaaagacagagaaggagttaagggaccgaattgcccagctccaggattcaaacttcgagctaagtggttcatcaaaaggtaatcttctagatctgtcccattaatttatgctgtcatagctgtatcctcaaacatttggatttcaaacagcgcaagctaccaggatggctcaaatggagaaacagattgaagccctgaaaagagacaaagtagaactagctgcgcaaagggactcggccttgaaagaggttgaaggtactatcagctaacaatctggtctcctctcttttaaatgcagcagattcttatcataaatgtgttttgtagaccgtaaagtcaaatctcaagctcagtttgacgtcctggttggtaagattaagaggcttgaaggagcaagagatgaagtcgccaatgtcgctacaccacttgtccaagctatgttccttaataacaatggtccaagttgtcacgtcctgataaattcatcccaaaataaaaatcatcttctaaaaggaataatagaattaattaaaattcgaaaagaaattggcaaaccttaaaatacgtacaagaaaaattcaaatgtgacccggagaatttttgttaaattctccttggtctaaaaggagccctcaaattttagtggaattttcagagcacaaataataattgagaagaaataaacaaagttgaaaaggttttataaaaagaaaaaccctaaaagaagtcttctttcccccccttcccttcttgggccggctcggcccaactctccctccctctctctcctctcccccgcggcccatcggcctcccccgcgcgcgcgccgctgacaggcgggcccgcccgccgccctcgctgacgggtggggcccacctgtcatcgccttcctcccgccgctcccgccgcccgcccgtgccctagcgccgccgccgccgcggattccgccgcatcccgccgtccccgcgcgcattaaagaggggggaattactccccgcgtttccctctcccgattccccctcttttccctctctctctccctcggattcgtccggattcatcccgcgaagttcgccggcgtcttcaatggcgcccgagatctccgcgcgcggtttcctctctccccggccgcgctctccccctcccgttgctatatattcgatccccgtgcttcgctcttccgtttccgccgctcgccgctcgctctcgccgtcggattcgtgctcgcgccgtgctcctctctctccgccgtcgccgtcgaccttcggttcgccgccgacgtcgctccggacgtccttccgactcggcgtcatttccatcggcttcgccgcgttcccgtcgaccccgtccgcatctccgtttcgcccgccgaccgccggagcaccgtcgtcatcgtcatcccgaaccgcgccgccgccttcttccgcttcggccgccgttcccgtcgtcgccgtcgaccggggtgagccgaagaccgtccccctcgcttcccccttccctcctctctctcgggtgccgctccgccgcgccgttggtcgccggcggcgaccatcggggcgcgggtgcgccgctcccgtcggccgtgccggcgaggccgccttcggcgcgccctcgcggctgccaagtgggcccggccgtcagccgcccgcgcccgcgggtgcggctgacgcgtgggacccacagcgccggccgccgccagccgcgtgctcccggtccaccgtggaccgaggggctgacgcgtgggccccactcccgtggacccggtccgcgcgccctctccctcggctgacgcaataaacccgatttttttaattaaaatttaaatgaagaaattcgcaaatatccatttaaagagcatataaacttcaaatggccatatcttggccatttgaactcggaattggaccgttcaagtctctaatttttccttaagaagtaaagaacccatttttgtgctttgttcctgcttgttgtgtggagtttattagagtaaaagccttttcttttccgttggtcgtgtagacgctgcagcttcggaagatccgctcttcgtggaagttgaagccggcgtttgggaaagcgagcaaggcaagtcacatcacccttgagcatattgaatcccagtttataaaattattttgatttaaattattgcattatcgctttgtttaaattcccgcgttaccactgttttatttagccatgcctatttacctttgttatgacattattattgctattgttattattaccttgttcaccctaggaaaataaaaaccccaactagtgggtactctattcatggttccactagtataaatttaggtagatgcttcgctgaataattaggcaacattaggtggttttataactttagactttgggaattctcatatcatttggacactatggaattgttggattatggtggaattggacatacacctctctttctctttcaaaacccccaaaacctgttttcggtggggtttgggtgcatgccagttatgggaagtagcaccccggccactataaggattaagctcgggcctctgttgcaaagcactaccgtactaaccacatgtctaatgggtaaggcttaactcggtgctcagtctagtcctgaacaaaaggacacggatagagatggatgaagtcgttgcgacgatggatatctctgaggcaaatgaaggctacgcgagctgcggctcggtaatcgagatgtctaggcaaatgaagactacacgggtcggtgcccgttagtcgagatgccatggcactggactagtacgcgggtggcctcacccctatgtgtgtggcgcacccggtctagatcttgttgctaggggctcaaccctggcctgcctgtcccgggataccggccgtaggcagggttgggtcggtacttttgttcacggctaggatgggtgaagggttatgtcacatctttacgacgggttccaaggccatggaatgcggagtaaagatgtgtcttgtgggtaaagatgtacacctctgatcagagtaaatctattcgaatagccgagccctcggatatgggcaagccgagcaatgtacccaagtcagtgttttaattcttaaaatttgctcaacaactaaaatatggaatggttggcctgggttggcttgggacgagctgggacccaggtcgggttgccagttcggtccaaatcatcgtaggccttgggttaaggcaggttcgtgagggttcacggccttgtttaataatactgtgtagctctaggatcgtctttacaaaatggctttgggcaactaagtgacttttaaatgctgtttactgcaaaacctaacccctattattatccccttgtaccccccttgcattaatcatgcatctgccggtgtggcttgctgagtactgtggttgtactcattcttgctcaatccttcccctcttcagtaagagaagctttggagaagatgtcttaggtggagtcctggcttataccccagttgagcgcctgtgaagatggagccgtaggcccgctagtccgctgctgtttatttttgattgtcaggccttaagtgcctttgtaataatgtaaatattatcgatataataaagatgtgtcttttatatcatgtttgtatggtgtaccccggcttttcctgggacggggattaatacactagcgttcgggaaaaggcaattttcccggtcgcgacacaagtgcacttgacgcaaccgaaatttttgacaagctgagagttgcaccggatgtatacttcaagaatatcaagaaagctggaagtatgggagctagcatggcattggcgatgaccaaatccttgtacccgagaattgaaattgacaccattgatggctttgcagacgggacaagcgaagaggctgctcttgatcttatcagtaatgctcaaagtgcggctgacaagattgcaagtgatgttgtagatcaattccgcaacaacgaccttcagccgagcaacaataactctgatgatgaaagaactgattctgactgagtataaatgtagcaaatggaggctcaatttgtacaatactggtgtatttatgctgtgcttgatagttctagccaagtctttgatttcttaaaagcttttatcaagctttgttgagcctaaaacccaaagaagctattaaaaactttcagtcctcgcagactaagtagaaaaaaccaaacaaggcaatgataaaccgagcaagcaaattgaattgataaaaaatcacactccattattatgatgatagcccccgactgacaacggcaagaagaaaacttgatgttgacagtcaagatagggaagtacaatgataaacttaagcgtaaaaacgacgaagatgctcaatgttccaagagttgtcgacgagagtaccgtcttcgcgcttgagtcgataagaacctggtcgggtaacttcagagatgataaatggcccctcccataaaggagataacttgtgccgatcccgtgtagtttgaattttcctcaaaaccaggtcgccgactaaaaaggcacgggatcgaacattgcgattatgataacgccgcaacccttgtaagtatcgagccgaccgaatcaaagctgcttcacggacttcttccaatcggtgtaagtcatccactcggtcctcttcgtagcgttcttcacggaaatttcgaaagcgcaaagactcgaattcaacttcactcggcaacattgcctctgccccatagacaaggaaaaaaggtgactggcctgtggcccgactgggtgtagttcgcaaagaccaaagtactgatggcagctgttgcacccatttgccggcatagggttttagccggtcaaaaacacgtgctttaatcccttggagtatcatgccattggctcgctccacctgtccattgctcatggggtgtgccactgaagcatagcaaatcttaattccgaagtcttcacaaaagtctttaaaaactccaccagtgaattgtgtgccattatcagtgatgattcgattgggcactccaaatctatgcacaatgttgatgaagaaatctcgagcgttatcagctgtgattgtgacaaccggtttagcttcaatccacttggagaatttgtcaatggccacaaagagatgcgtgtaaccgccgactgcctttttaaacgggccaaccatgtcgagcccccaaaccgcaaacggccaagacagcgggatagtctgcaactcttgagctggtagatgaatttgtctggcgaaaaattggcaaccttcgcatgtgcgcacaattttgtcggcgtcggacactgcagtaggccagaaaaaaccctgccggtaagctttgccaacaatggtgcgtgcagcagcatggtttccgcatatcccagaatgtatgtctttcagcaattgtctcccttcctctaaagatacgcagcgttgcagaattcccgaagggcttttcttgtataactcagcttcatgcataacataaagtttgctccgccttgaaatccgctcggcttcatctttgtcttggggaagttcttgagaagtcaaaaatcgtataaggggctctcgccagtcggtttcaaccatagcaacgtcacgagtgcccgcaacttgagtagtatctttctgaggtactgtcggcgtataaaggtgttcgacgaaaacatcagagggtgccgtctcgcgcttggatccaaagttggcaagtctatcggcggcttcattattgtgtcgaagaacatgactgagctcgagtccatcgaacttatcttccaatttgcgtacctcttgtcgatatgccatcatattgtcgtcaaggcaggaccactctttcataacctggttgacaaccagctgtgaatcacctcgaactattagacgctttatccctagggaaattgcaatccgtagtccatgaaggagtgcttcatactcggcgacgttgtgggatgccgaaaaatgtatccaaagcacatagcttaatctttctccagttggggaaatcaaaaccactcctgctccagtgcccgaaagtcgttttgatccgtcaaaatgcatggtccagtgctccatcttctccgcgggggtatcctcctggcactcggtccattcggcgacaaaatcggctaacgcctgggacttgatcgaaattcgggccttgaatgatatgtccaaagacatcaactccaaagcccactttgcaatccgtccgtttgcttcgcggttgtgcaatatatcaccgagtggaaatgatgtgaccaccgttaccgagtgaccttgaaagtagtgagatagcttcctggtagtaattagaataccatataacagcttctgaacctgagggtacctcgttttggagtcggctaggacctcgctgacaaaataaatcggtcgctggactttctggacatggccttcttcctcgcgctcaacaaccaagactgtgctcacaacctgggaggtggctgatacatacagcaacaacggctcttgcgggtgtggtgaggctaagactggtggctcagtgaggagtttcttgaaatcttcgaaggccttctgtgcttcgggtccccactggaagtcgtctgttttcttcagcagcttaaagaagggcatcccccgctcgccaagtcttgaaacaaatcggctgagcgccgccatgcacccagtcagcttctgaacatctttctgggtacttggcggtttctccgggttggcttggatgcccctatgagacaccataaaaccaagcagcttccctgacggtactccgaaggtgcacttttcagggtttaatttcatcctgaaagcgcggatgctcgcgaaggtttcttccagatccgaaatcaaatcatccttttgcttggtcttgacaactacatcatccacataggcttcaacgttgcggccgatctgtgttgagaagcatctctggatcatacgttgataagttgctcctgcattttttagtccgaacggcatggtgacgtagcagtatgccccgaagggcgtgatgaatgaagtcttcaagcagtcggattccttcagtcggatctgatgataccccgagtagcaatccaaaaaaactgagaagctcacagccggcggtcgagtcgactacctggtcaatgcgaggcaacccaaaaggatctttagggcaggatttgttgaggtcagtataatcaacacacatgcgccattgccctgttttcttccgaactagaaccgggtttgccagccagtcgggatgaaggacttctttgatgaagcctgctgctaacagcttggttaattcctccttgatcgcgtccttcctgtcttgtgcgaatcggcggagtcgctgtttgataggcttggcgtcttctttgacatgtaaggagtgctcaatcacctctctaggaataccgggcatatcagatggtttccacgcaaagatatctttattgttctgaagaaaggtgatgagcgcgctttcctatttacaatctaactcggcgcctattacagcagttttagtaggatcagaaggatctaggggaattttcttagtcttggcttcgctttctccactttttgaagtcttggtagcgggcacttctccttcgctcgccgtggctgcagccagtcggatttcctctcgggcagacgtcatctcgcgggtttgggccatgtcgcaactctccttgtcgcatgtgacggcttgcttgatgtcgctccgtagggataggactcctcggggaccaggcatcttcatcatcatgtaagtgtagtgcgggacggccatgaatttggctaacgccgggcgtccgagtatggcatggtatgctgtctcgaaatcggcgacttcaaagctgatattctctgtgcgaaagttttcccgagtgccaaaagtgatcgggagagtgatctggccgagtggagttgcggataatcctggaattactccgtgaaaaggcgcattgcttggttttagctcagagcgaggaatctgcatatcatccaaggtcttggcgaagaggatattgagtgcgctgccaccgtcgatgagggttctgcgaagcttgacattacggaccactgggtctagtaccagggggtaccgccccgggtggaccactcggtcaggatgatccgagcggtcaaacttgattgcaatctctgaccatcgaagaaattggggcgtgtcgggatgaacagcattgatctcccgttcggtcaacttttgcttccgtttagactcataagccagggggccgccgaagatatggttgagctccttgcggtggtcttgaaatccagtcggggcgtcgccgtcgtccttcttcctcgacgtgctttgttcttcgtcggagttctttcgtgcagtcttggtgtattgatccgcgaattgcttgtagacgaaacaatctttggccacgtggttggagttaggatggtgcgggcattgggagttcatgatcttgtcgaacgtgttgacgcgcgaacgctgtcgagaagagtgactagcagttgcaacaagttccgcaggcttacgcttgcggtccttatgattgttacttccacctcctcccggagccggcgtatccttttttggtttccaactcgggcccgactgctttgatgcggtgacagcgtcttcagctttggcgtactcgttggctttttcaaacatgagcttgactgtcctgggaggcttgcgcccgaacttgccgaccaattcttcgtggcgaatccctttggtgaaagcggcgatgatgacgtcgtcggtgatgtcggagatcttgttacgttgttcagaaaatcgccggatgtaatctcgaagggattctccggacttctgaataacgttgtagaggtcgtattgtgtgccgggacgctcgaaggtgccttggaagttggcgatgaagtggtcgcgtaattcggcccaagatccaattgtaccacggggcaatccatggagccaagaccgggcggaatccgctaaagccactggtaaatagttcgccatggccttgctgtctcctcctgctgcgcggattgcgagaccgtagacggtaagccactattctgggttagtggtaccatcgtacttctctattccagtcggcttgaagccggctggccaatccactcgacgcaggtcgtcggtgaaggctgctactccatcaaggtcgtcgtcgtggcggtccggcgagtgaagatagcctcgtgctgctcggcgctgtatgattgtgtcgcgaagatcgacggggcggcgactaggtggtgagcgaggccgttccactcggcgctccctatggtgatcgggaggtgagtgaacagaccgctcgtcgtggcccctgctcctgcgattggatcctgcgccggtgatgctgaggcttggatgacggtagtcatgagatcggaagtgggggactcggctaccagtcggcgtgtggacgctttcggagttaactgggaccgaagccgcaatcatggtcttcgtctggttcaagatgttgacgacgtgatcagattgattgagctcgttttccctgaggagggtgtcgaggagggtgatcgcggcaaccgcattctgttgaggggtgcggaaaaccggtgtcccttcaacatcttgttggccgatgagatcacgcgctcggcgccctgcttccaaagctcgctgccgtcgatcctcagcctccttcgcggtccgctcacggtcctgctgctcacgccgtagccgttcttgttcttgtgcttgatgctcctcctccagtcggcggcgctcagtctcgcgacgcgcttcggtctcccgggcttggcgttgctcctccgtctcgttattggccatgaagacgccaaagtagagaggggtgtagttgtcatctaggcttccgtcgaagtcgtcgagatccgggtcgtggtagcgagaactaaactcgtcgtactccacgatgtcggtggggcgcgagtcgacggtgggagagctgtagtcgccatctagctgatccgtcgaaatcgtgccgagtggttggaggatgacgccaacttccctgaagctaggcgaaatcggtgtcgaagccgacttccgcctaggcctacgggaaggagacgctgtcgtgatggagacggccgtcaaatcgtcggggagcttcatcaggatcggtgggtaagccccatcatcttgatctggtgacattggagaagatgcgatctcagccgagtggtttgaagccgactcggttgagatggtattgaagtaactctcagccgcgtttgggaatccaaacgggactgagatccggctctctcccgactggtccgactccgagtcaaggagagagatcttgccgaagttgttggtgacgaagtcgaggctgccgaaccgaaacgtctgcccgggtggtaagacgaggtcgtcgatgccggtgacgggacccattgcactgatcggcgaaaagcttgacgctacccctacctggcgcgccaactgtcgaaactagatttcggcaataataaaagggggtggctatcaagctggaaaagtgtatgggtttggagacaaaggatttatacaggttcaggccttcttataaaagaagtaataccctactcctgtccggggatgaatccgccgagtgtgttattgattgtatgatttggagaaaatcaacatccgccgctagaggcacccggaccccccttatatatgggaaggagtccgtgttacaaaagataatctatatccctaacggaataggcagatacagataaaatacagtcgtgaccgactagatctcaaggtatttcctttacgtacaagttaagaaacaaacccgagatacacacaagatattctatctatattcggtatcctatattcaacccaaatatcatcgccgtgtagatatgggatatccataatctccacaaaaagcatgacgcctagagaagacgtttgtaggcccagttgagaatagcacaatcaatcggtgtatggaaacagaagatggacgcggtaaaccacatccacagctcacaaatgtcaagtggtcgttgtctactgcactgtagcagtgccgcagcaagattggtctgtcggtttccacagctcaggaagccgacgtacgagaaggatgtatggtagactcgctcacagttaaaagcgcgggagtagttaacaagctcgctagctcaatgccggccggcctgctccaccacaggcgcaaccggagccacaactttaggtcctgagcgtacacaacccaaaagactagtctgatgggtgaggaccgcccccaccttttaagtcatgctcccctaccatcaattaccgatgtgggactaaacccaacaatctcccccgtcatacatcgggcctaacaatctccctcgtcacatcaacccatgtgaccccgaagacttgttacttgggcctcgggcctaacaatctcccccgtcacatcaacccatgtgaccccgaagacttgttatctggcctaccaaccatatgacccatggaaattattccggttccaaaccttgggctctgataccacttgttataaaagttagtcgatatagcggaatgacgactaactgtcacaccccaatccggcaccgccgcacaacggcacctgataggagcgtgtcgtaggaaaaacagcgcgaaccgcttcctacgaaaccgcgatctcagtaccagtcccaggacatagtgctggtacccacggtgacaaatatgaatcattgcaaatccttaaaataaatagaggacttatttaccttaacttaggttgcagctcagacagcccgagaatgcaaccgacgacacggacgaggcgaacaccaacaacagcagcagcagcagcagaaccaacggtctaacacccgacaccacaggcgacggctgggaaccaggacgaaaccctaatcttcacttccctttatcttctcttcaggacggaggaactatatatatttatatagagcaagggtgagtactttcgtactcagcaagtcacgggaacctaggtgtttaatgcaagcttggaagagaggcaaggttgttttgcaaatcttttatttgaagacattttgaaatcactaagtgatttatttctttctatgtttgggcgaaaagagacttgcgtctcgattcgactttatgagatgcttttcaacagctcatttagtaacgtaccgacctcccgggtcagatcattacttctcggctcccagagcttttttcattttctcggactcccagagtccagctgcccagcagcacaacaatccgcttccactcgggaagcctagtctatgatgcccgcagacatcccgaatcacacagattcgtttctgaccactcaggtcatccatctgccacataggctgattctggttacgattcccacaccacaacaacttttcacaaagcacaggcaaacaaatctacgcaacgggaaccacctcacatccgcccatgaccgtgggcacggctgttcgaacagtttgttaacctctgcagaggggtacactttacccacaagacacgaacttactccagacactggccggtgtcagaggttcgcgacaaagcctttctcaagccgacccagggatacctcatgccacatagaaggatcaaatcctcacataaacataggccattttaggcgtgcacaaatcaaactccaaccacctcgatcggtaatctggcaagcttcgcgttcttgccttaccaggagaccggtttggctccaaccgaccccgccccggcgttcccaactattggcatgcgaggtttccctgaaccgactagctacttatccagggtgtcccattccaccttgtggttgcactttgattatgttcgatgagtttcccacaggaatcggtccttatatgcgaatacgggacagtgccacataggcacaacccccgcatcgcgagttttcacaattcattttattttcaaacacaccgacaccacatgtcgggttttgaaggcttcacaaacccatttcccaagttttcgacaagcaacggtgtatgtgggatatttggtatacgcgctcagagagcacgaataccgaggtaccacaagggtggagcgacaaggaatcagggtaatacgacctacggaaattagtgcgactactgggtaggtccgtcggtttggcacgcaaaccgaggccaagcaagttaagtgtgtgattctaataatgcaagttacaaacaaaataataatgattttccaattagaggagcaattggtcaaagggtgacttgccttgctcaaagtcttcacgaagcttcacgaatcttcaagaaaacccgcgatcgacgaaaatccggtaaccgcaactgtacgcaaacaactgaaaacctaagcaaaagaccaaaagagggatcctatttagactaattagtagtgccattaaatagatctcaattttacggaattactggaagtggaacggaggcaatcggacgaacggatcgagggatatgaattttggaagtttaaaggaatttttctggacaaagagacgatttgtcggaattttctggaatacgagaaatagtttatggaatttatagaaataatattctcaagaatattattgacatccactgacatacgggctcgaggggacgaattattggaatctccggattaagaggatgggtttatggaatttggaatataggaaatgatttattgaatttctagaaaagagaaatatgtgtggagtattgaaaaagatattcccaagaatatctttgactcattgacacgtggggccaataagaaggtgagagagagaggagcaattggagggagtaattgtggacttttagctcttgggtgatggacactgggcttggacaaagggagtgtatgtggactttgttttcttacttatcaggccgaggaggagggtggctactgggccaagcccaagagcaagagagagggggcggctgctgactgggcgtcggctgacttggtcaagtggggccgacggctgaggtggcgccaacgtggacgtcacgtcggatggggaagggagaggaggccgggcggctcatcggacggctcacggcgtgcggcgggatccggcgaacggcggcaagccggaggggcggctagcactggcggcaggaggaggagaaggggaactcattccacggctcggatcgggaagacgacgcgcgacgacggccggcggcggcggccaatctcgccgacacgccaacgtggccgcacgcgagaagagcgaagggcacgcgggctcgggcttcgccgaaccggtatggggttgcgacgcgcacgcggtgacgcgggacccgatggtcaccggcgacgcacgcgcggtggcgttatgcggcggcggaaggggcgacacggcgcggaggcaaaggagaaggccggcggcctagggacagtcagggggagctcaaggggatctccgggagcgtggcggcgagaggaatcggctcgagaggtgccgacggcggtcgattgcggcggcggcaatcaccggcgagcaaaaggggaaaacacaacgagacgacgaggattcgattcaaaggggtgggagcatctccggggttcaaggaatccgtttccggtgtcggatggggcggagaagcactgaggagggccggcgacgagcagcggcctccgggagcggacggtaatggcggtgaggccatgccgggcgacggcggtgctagggaatggtttggggaggtcctagggagctcaaggacggtgttggcgagggtggtcgacgagctggggcccgacgacggcgcgcgactgcgcgcggcggcggaaacagagcaacggcgaggcgcgcggcgcatcgtccggcaggctatggcgtgcggcggcgggcacggcatagcgaacggtaggaggaaagggttcggcggggagctcaccgacaagaggaagcggcgtcggcggatcgaagggagtcgtggttaggtggtcgcgacggtgggacggaacggcaccgggtgggcgcggccggggagnaagagaggaaaggtggcgcccggagctcctcgtcacgcgcccacgcacgcaccggttcctccggtgctcggcggcggacggcgacgacgagatcgagtcgagcggcaacagggcggcgatggttgttcggctacaatggcgcggtggggggcgaaaacgagagagatggaggggaggggctcggctgtggttttataggcgcgggatgtggagcttcgaggggaaggaaccgagcacgggcgatcaaggagaggcggtggcggactcgcggtcaagttgtgacagaggcggtcacgggtggcaaaggaggtgacggtgtggatgcgttgggcggcgaaggcggtggatcgagcggcggaaaatcgaaccgcgggagcgggaggattagcgcgggctggcgcggtcaaggtgggggtggcgagctggcgctggcgtctgcgtctctgcctccgagcgctagcggccaaggagtggaggcatggcgtcgttgcttgggagggaaaaagagagggaggacggtggaaagggggggctttaccatgccggtttgggaaaaaggaggtgggagagggagaggagagcgcgtgaggcagagagacgtgctgcctccacgtcttggacgcacgcgcgcacagggtgggggcgagcggcagggcggcatgggcggccgtgcggcgcaggcggccagggctgatgcggcggcgaccgggcggtctgccacgcgcgggcgagcgcgggaaagagcgaaggcggtggcgggttttgggcggcgacggcgggaatcggcgccgggaggggagagagcagagagagagagagcgaagacgggagagagaaagaacgagagagcgagagagctctctctcggctcacatgcgtgcaacgcacgtgcgaggggggttaagatgatgggctgggaggggagatgggccgggggagaaaacggcccacaaaaatccgagggaggcaaaatagactttttcggaggggattgattcgaagagaatttgaacttggaatttgacttagattttggaattgggatctcgatgagaggaaggagtagacggaggattcaagatggggttttgaatattttggatctggggaagtatttggcgatgattcaaagagagggatagaatttcagagtttgattgggacacttgagtcggaagaggaatttcaagggggcaaatttgtgatggttacaagagggatcaaggacggatttgaattgagatcttggcacaacttagactcgcacacaaa

SEQ ID NO: 5097 - DNA, 28687 bp, Oryza sativa
cctccacccctctttatatggcgcagggtgacgggggcccaccagccattgggctgggtgcccccgatcagggcgcgggtcaaggcctccttgagctgttgggctcaaggggagggagatctatctaacattctcccccttgatctcactatttcttttagcctttttctattccatcatagatttgcatatagagcatgtttcatcgtcacggttaatcaccgatggattcgacagccactatacacatctctattcagaaacagatactttaacttttgggccctatagtccaggattcataaggcttcccttaaacccatgcatgctgcatgttccttgaacacgttgggaggtaggcctttcgtgagcggatccgcgagtatcctttctgttctaatgtgctcgagactgattgtttgatcctggactttgtctttcacaacatagtactttatgtcaatgtgtttggcagcaccacttgactgattgttgtgagagtacattactgtgggttcgctatcgcagtataactttagtggtttctcaatactgtcaaccacctttaaaaccgggtatgaatttctttagccagttcacctgccccgttgcctcatagcatgctataaactcggcatacatagtagaccctgcagtgatagtctgttttgagcttttccatgaaatagctcctcctgccagggtgaacacatatcccgatgttgactttgtattatcttttgcaaagtcagaatcagaatacctcactatctggagcgattctgattttctgtaagacagcatgaggccttttgttccttgcaaataacgcaagactttctataccaatttccagtgctctgggcctggattactctgaaatctgccaagtaacccggtaacaaatgccaagtcaggtcgtgtgtacatttgcgcatcctgttggcttcctacaactgacgcatatggctttgtttttcatttcattgagctcatactgatttctaggacattgcgatgccccatacttttcgcctttgactataggagcaggtgtagcactgcatctgtacatgttgaatttcttcaacacattttctatatatgccttttgagaaagtcctaatgcatactttgttctatctcggtgaatctctatgcccaaaacatatgaagcctcaccgagatctttcatgtcaaagtttgaggacaagaatttctttgtttcctgcagtagactgacatcactactagccagtagaatgtcatccacatacagaattaggaaaatgaatctcccattcttaaactttgaataaatacagttgtcctcgatattctcttgaaacccaaatttctttattgtcccatcaaacttcaagtaccactgtctcaaagcttattctaatccataaatggatctctttagacggcatcccatattttcatttcctttcatgacgaaaccttttggttgtgccatgtatactttttcctccaaatctccatttagaaatgtcgtttttacatccatctgatgtaattctaaatcataatgtgccaccagtgccattataatcccgaaggaaactttacaagagactggagaaaatgtctcattgtaatcaatcccttctcttttgcgtgaagccttttgccacaagtcacgctttaaacttttctatattccctctagagtcatatttggttttgtagacccatttacagcctactgttttggctcctttaggaattttttctaaatcccagacaacatttaatttcattgatttaatttcatctttcatggcttccaaccattcagatgagcgggcgcttcttatggcctcttcatatgaggtgggatcattctgcatatgcgactcttctatattataaacttcatagtcatcatggatagccgatcttctgactctttcagaccttctaggggcctcctgttttggcacattatctgtttgaggctattgtagctcctcctctggtgtggcaataatttctgttgaatcctgtagaacaggttcctcactttctttcattgttgccacaggagagataacaataggtgttggtaccgcaacgtcatgcattgcaagcacaacatcagcaggtagagaggagaaggctcttgaatcgactgagcgggctcagacacccgcctctcgtcaagatcaatttctcgaactaccgagctccccctaatcatttcgtcttccaagaagacggcatgtcccgtttctacaaactttgtacaactgtttggacagtagaaacaatgaccctttgatctttcagaatagccaataaaatgacagcttactgttttgggatccaatttcccaagatttgggttaaatactttggcctctgtaggactcccccacacacggaggatccatagctcatacggtgttttgggcgctgatgcattctatgcattgtatgcattgttctaaaactgagaactccaatggaggaagaattacattcttaaccagtctctcaattctccccctcgaaatatggcctaaacgacagtgccataatttcgatgagacatcaggagttcgctttcttttcttgttttcttttgtcaacgaggacacaacattcacattctcaaaaagagataacaaataaagctaatcttgcaacacagcaagaccaatacatgcattattataccatagttcacatttgccatttccaaaatgacaatcatatccatcaaaatacaatttggatacacttatttctttgcaaagaagggacataaaaaacatctcgaagtaaaagtgtgaagccattcgtgagctctaggcgaagatctctaacagcttcaacttttgcttcaactccattggcaactctaatggatctttcgcttctttgcatagtcctcatcgaacggaatccctttaaacaattacacacatgaatagttgctccagaatcaatccaccatgtggatctagaataaccaatcataatgagattcatttacaaatgtaataatgttctcacctttctttgccatgatcactgtcacgaagtcaggacgatctttcttggaatgtcttgtcttcttgcagtggagacactgatcctgtctcaactgtgaactgttgttgctgaggcagatgctgaggctgttttgcttttgaggagggtgacctgtggctcttttccttgttatctttaacaaggttaattgagccaccaatggtctctttgattctttcctcctcttgcacacaattagagatgagctcttcaatattccatttctctggacttattttgtagttgacaacaaggttgacaaagtgctttggcaatgaggtcataaccagatgaaccagaaagtcatctgagatgcccaaatctttttgcttcaacttggaagccatgttgctcatcctaagaatgtggtcttttacaccacctctatggtacctttctgtcacaagctgctttatcagttgtgtcgcataaaactttgaagaaccagcaaactggctctttatactttcgaggtacttagagacggtgtcatactctgggattaagcccaatatggttggctcaatcgtgttctttaccgcagccaaacattccttgttggctaaggtccatttcgtatgcccaatgtcatacgacatgatgagggaagcattttccctctctctcttttgccattcagcatctgactctttttcacctctgaaaagttcagcaggttctataggacatggggtagtcaacacccagtccacctctcccaagataaaagcaaggtcgagttctcttttccattctttgtagttatctcctttcagggtcggaatatctttaatgtaacccatcaaggagtagtcacctgagataatcatgtattgtgagaacaaaattaacattaaaaatattatgtattaagtctacatcaccgttgggcagaaaatagacataacacataaagccataactataacattgcaatcatcaacgtgggtcagaaaattacaacatcatagcacataattaatgttcctaaaattaaattctcccgttggttcgaaatttaattttagaaacactaattttcatcaatatcatctatttgcagcggaagatctatattaaaatccataagaacagtaacaaaactatgttatttactctctgtaaaaattctcctgttggttcaaatttaaacagaggaaaaacatgtaaaaacaattcaaaattctattgtaatttgcatgaaaacatacaaaatacatgttcagaagcatttctcacatttatctattctctaaacaattttcacaatttacaaattgcttagaaataaaaacaatcattaaacatattgaaaatgattctgaatagggacatttattaaacttcttttccttcgccgagggacctaatatggacttttttggcctttgccggtcggcccacggtcgcctttaggcgcttgcggccatgccccctcccccaggccgcaacctaggcctgggccaggaaagccgccccccgcgcgcgccctcttgggctattttcggcccggccgccgccggccgtccgatcgctagggtttcgatcggacgaccgcgcggagagatcgggcaaaacaaaacctgacccccagtcgcctgcgccaaaaaccctagcttcttctcttctctctcatgcgaccgccgaaaccctagcacagcgccggcggcggcacggccccggcggcggcttaccgcgcggcggcggaacggcgacacggcagcgccgtcgcactccccctcgccggtgcgcgcactcactcaagggtgagtgcgctaccgtcgagcggctgtgccgcggcgccccctccttttctcttcgctttctctctcgggcgggctcggccgcgccgagcggtgtcgtcgacgcctcttttctcttctcccccatcgcgccaccagccccaccgagtgagagagagtagcggcgacgaaggagatggcggcgccgccgcgggccccctcgccggcgcgcgcgtgcacccgcgggtgcgcgcgcagccgtcgaggggctccttggcggtgcctctttgcccctcccccctccgttgtcggcgtcaacgacggccggcgacgaggtaagattagggttagggtttctcttttcaatccgttggatcgtttgcttttctttcttttgcttttctctttggatttccatccccgaaaacaagatccaaacgctagggttgctctgataccatttgttagcattgctttgggatcacctaggttagatctagtcgggtagaacactttggatagacgaacaacaatagatggattaacaaagagggagtgagagggtttagggatgtgaccggtcgatgttgaggaggaggaagtgcggccggccatcgtcgttgtcgtcgcgggcttgacgtggacggcggcgatggtgtgcttgacggcgacggtggtcgtagcagtgggagtcgtggtcgacgatgaggcgtggcgcggcggtggggcgttcccatcactggctgcgccccctctcgatctgattagggtttgtggggtggagttggcggcggtgacaaacttcgtgtcttgtgccgctctgcctccacccctctttatatggcgcagggtgatgggggcccaccagccattgggctgggcgcccccgatcagggcgtgggtcaaggcctccttgagccgttgggctcaaggggagggagatctatctaacatgtagcagcccagaactcacctactatggctaagaaattcagaccatgacaatgcgcaacttatgggttcagtgtttctatctctcgttttgtccaccgagcaaaaactttactcctaattaatgggtgctcaactgttatataatataagtcatgcgcccatgtcaatgcattatgcgtgccatggcccatggtgcctgaaattttgttgagcacagggttctcaaattcacgcccctcgtgtcgagaccaaagctgcggtgcattgggtttctgcaactcaccttgcaattaaccagtaataaactagtaatcgattccctaagcagaatagtcgattccagaataaccatgattctctccctttttttagtgcgactacaaccatgactaggactagaactggatcgggagggatgcaagcagggtgggcaagcgggctttttttgcccgcttatcccacttctagttcatttattcttctaaattttgaactaccatgcaagaaatacactagcaagcggatttttatgtgggtagcgggactacccacttgcatccctagatcgagttagcaaagcaacgaaaacaagggtttccttgccaagcaaagaggatccaagaaggattcggagggggataaggggggagagagcacccgtagaggaatggcctggatgggattctccctcgcctcgtcggttgctcttggtccggtcgtagagcctcgcctgccgtcaagccggcaccctagcgcttagctgatcgcctcgccgccatcgccggtcacctcgcgattactcggtcgagttgactagtcgagggcacccctcagttttctcggatcgtgcgaagtgaagttaggagatctcgggaagtagatgggctgatatgtaattggggcggttggtttatttctgaacagaaacagaaatatgtactttctctgtctcaaaatattactactacctagtatcttctgttcttaggtattgctatccaaaatattaaaagcttagcgataaacaaatcatgttgttacctaaaaattctatcttagatagcaatattttgagatagaggtggtagttggtgtggaggagccgaggaggtagttaagagtttccttcgctggctcgagctactctccgccaaacagccggatcagctgtttcgcatagccttcggatgttaccggctcccggccgctccggcacgtgccaagccaaacactccgagtccacgacattcgccctctgaccagtgacgaagctacatgtaatctgtatagtcagctaaccccataggtttttgcaaaatagataaaaaaaattgatatttgtgttgtaacaatagaaaacttaaaaaaatttatagctttgaccccgcaggtttttgctgctggcttcctcatgcatcaggctgtgaccttgccagttggcacccatcggtcgggctagggctgtcaacgagccgagctcgagcgagcttgcttgcctaggctcgagcttgtgtgacacaggctcgagccaagctcgaatcgagcctagtcctccttcgagcttttaagcaggctcagctcgagctcggttaggctcgcgagctcgatcaagtataagacaatgtatattttgatggcaaaattttgcaaaaaaaaataattttaattaacaatattgaaggaaaaaaaatgagaatctaagattaatatatgatgccaaaatacaattttcacacgaatatatactaatttatcctcgagctactaacttatcatataaaaagataaatatttcacacacagttaggctcgtgagaagctcgagctcggctcgacaaagctcgcgagcttgcagctaggctcgggttcggctcgttaagatctcgagctgagctcgaatcgagtctgagacgagccgagctcgagcaactcgcgagcctcgtgctttttttgacagccctacgtcaggcctcccacagggccgacatcacgtcaggtccatgtcgcgctcctcgtgttgctgagtttcccggcccaactgccaaacccgtgtgtcgcgatgaacgcacgttcacctcacgtcctacctccaagcattccatcccgagttcggatgcctccgacagacaagctgtgtttagattcaggggtgaaaagttttggcatgtcacatcggatatacggatatatatttgaagtattaaacgtagattaataataaaacaaattatagattccgtctataaactgcgagacgaatttattaagcctaattaatccgtcattagcaaatgtttactgtaacaccatattatcaaatcatggagcaattaggtttaaaagattcgtctctcaattcacacgcaatctgtataattagttattttttcgtttatatttaatactccatgcatatgtccaaacattcgatatgacagggtaaaaaattttgccgggggatgtaaacagggccaagaattcctgtcttttcggagacattgcctgattgactatgacacatgtgagtcgcgatgcgccggtgacaacctggccaaaaacaacaataaggggaatgagaaagaaggtgaaaccacatctgcacctgataaaaataacaggggagatgaggtcatgtcacccacatctacccaattgatctcactaatgtgccaataagccaattattaattagaaacttcgcactcgtgtcgattgtagctgaattgaccagcttcgtagagtcaatgttgcagctttgaattttttgtcaggccggcaatggagcaccgcccaggtttttctttttctttggacttcccagtgcccaccattgtttaaaattttggaacacagattgagttgcatcaccggcggtgcccaaggtctcttgttgaagcgcgtggtccggaaatgggggacatcgccggcgaagagcatcgagtccagatagcagccagagccagctccgaccggcaagacaaggtcgcggcgccggaaaaatgggtgaattgcttcgttcgcgtggtgacactgatggagaggacgagcaatgcactcggcacgctggctttcacttgggctaccgttgtcctgctaggtggctaccctgtggtgctcgactcgcatggcgatttttggttcgcgacagccatcgtattcctagaagccgcaaggtatatacagctacttatgtactgcccatctacacctgtttttgattttttgttctgcagtctaagttttcacttttctttgattacacaggatgttcggtcgcaacaatagatttgattaccaattgttcttccggacaagaggtgctttcagtttcagatcacttggcgggaacggactgatcgcgatcgtatacttttctgctgctaaggtggccattgttgttcgggaggtgcaggacggggcatttatgttgattataatcatggtattagtagtaatactacttacggttggcccattagtatctcgaggagctcgaagaccacgcacctgtagtctgctgctccgtgtgatatcgctatggagccccgtggttgcaatcctattgatgggttcctccatattccatatgtacggagacagttttgtcatgtggatagtgtacatagtgctccttgcggttgtgctcttggtgacggtcagcaggctgcggttctcaattattgtcaaccaagtgcgtcctgctttgggcagtaaacacgtattttggcgtcgggttattccttttttttttttttttttttttttggcaaccgtcggtttattcttaactcgtgcatgcttgctgcgatagtgatgatgcttttcatggttgatccagtccttcaactgttcaacacgtgatgatcttgctcgatttatgtggttttgccatactgtcatctggcaacttgcagattcctgcagctatcgtgcgcgaagagctcgcgaggatgcgccttacgcgacatgactacatcggtgttggtgagaagacaaatcttggccaatctcttaccatcctctacagcatggtgcttggccaaggcatactttacatcgttgccggcacgctggaggtcttctcgttcatcccactgagatccctcgtttgccgtgctggatttacaggtcagtggggagttgaatctatcaatctgtactacgaatatgccttcgacaaatacatggaaggaggtgtgtttgctccaaagaggatcaacctcagcaactttgcgatagattctataaactctgacttgtccaagaatcaactgtacgggatccagatgatgcacacttttctgcaaagagatccgacaagagcacaactcctggagaaactcaccacttcaatgcagacgaaggccaggttgatcaacatgttggactggactaatggaaaccaacatacaactattagattatatgctgcgaaggtcatggccgagttcgcaaagagcctccgaattgtaactgtccctgaggcaatgcagcttgtatcaacgcttctggataccgagggaagaccaaaaagaggacacccacttctaaatgcagatgatgatcaagatccttttgttgatccaacagaagaaagactagatgcagctggtgatcaagagcaaagacaagaattagttgcggacactgacaactagctggaaacgccaacccaatcagcacacagcaacgaccaagtatccatactcagaagttggcagaggatatcagagtattggtcaattcccaaggagcagccgctgacaaaggacgatcttctcccagcattgggcatgtcaattgtctacagtcttgctagttgtgatcaaaataactgtgtggaaatagacaaagtaactgacctgatccccaaaatcataggattcacaagcttcagaagtgcaatggtgaattccgtagcacaacagaaggttctcgtaaagtcatcactgagggtgctgtagaggctcacaagcattgaaggggaaattggcatagcattgcggtacaagatatcaaaacatcccttcctgttgggaaaccttgcggagatcttgggagacaacactagcatgcaagaattaaggaagctcgtcgcaggaatcctcagaaaccttgccattgaccgagacacaaggcaggagattgggcaaatgcaggtgctcattaccaggctgatgaaggcgtccctcaattctgatggaccatctagtacagatggtgattgcttgcttccgaaggttgctgggcaagcattggcaatgctggcatcagaaaatgtgcataactgcttggttatgttgaaggaaccagaattcattaataaactaaaaaatatgatcctaatccatgatgggaaatgtatatatgtggctgcgagcctgttgcgtaatctgtacctgcatgctcaagctcaacccgacctcacagaatcaaaccaaaatgacctatctgatgcctttcaaaaggtgagccctgctaatccatacttcaagtgtaatattagatatgtatagtatgttgtatcatttgtacatttgttgtctattaatgtttgtcaagacataattattttataatcaaaatggacatttatttaccactaaattgtataagtataattatagtttacaactatgttcatcatgctacatgacattgctggttccactacacaggtcttggaaacaataacggatgttgaaggggcagaattagaaatcctcattggtcttagttcacagatatgcaaagtcaaacctgaagaatttgtgcaagagctagagcacggacagattaagcgaagattcgtgaagaagctagtggatgcactgaatgcgaatatgaaaccaagtgttgattaccctgggatccggaggatgatacttgagcaaaccatatatatgatggagagcagttcttgctatgccaattgtttcaatgaatttcagatgatgaatgcactgctgatggtagaagagacgccctcaagggttgagaactacatgattttcttgggtgatacaggcttcatggaatgcaacacacctctctctgctctcgtggacagagcaaaacaattgattggacattagtggctgcaaggcatcagcagcgacaaataaataaattgtaagagatgaattcccattgacagttgcagtgaattattgaactgttattgcagttgaaatgctatgaatttataatttacgcatgttgtggcgatgacataaggaacagagaaaaaaaatggtggcattagaatcagaataccattcatattgttacttgtttttttttttttgccggaatgaccgaaggaggtcattcaatgcaattaagataggaagaaaatattacaagaaaagttttacatcgacagctggctgtcgaggaaggatgtgcactagagcacacgccccgaaccatgtgccaaccgtccaaacacacgctacagagagggaagccaagcaccgaaccggccatcgctatgcgagaccgatcgccaccgggccaacaacaccattatgacacgaagactctaaaacgacgccctcacaagggtcgcgacgccgaaagacgccgtcgtcatccgtccaaaaactggacaaggttttcacccagagttccttgccgagggaggaggggtatctcaacaatgccctcaggatggttaccatgcctgaaggcgtagtcaccgttggcccaaagaaattaggctaagctttcgctcgaaaccccttaccgccgtggtccatcgcccaatccgaatccaccatctaaacatcggcggcacatggcttccaccacacccgaccgatgcccctccgcgattagcttccagtcctgccaacgacaagactgccaccacaccgcaccgacgccccaccgtcggccgacttcatcgaaccaccatccctgagagctggcctaggacccctccatgccaccacccgccggcctcctcgccagatctggctgaaggagaacctgggactgggtggcattgcttcggcatcctgagcttcccccgctgacaagtgacaacctgccgtctcaatccaacctagaaactccctgcaaagaaggggggagctccagaaagggcgagggtgccgaccagcaacgaagaagacgacccacagccgccagctccctttgcactaccatctgagcctacgccgatgccggaaatgctgccgctccggcttcggagcccccccacggtcgccgcgtcttgggctgccggccactaggcggccaagccgagcggccgtcgccgagccgccgctgccgcacctccgcaccgacctccgtgctgcacttcggccaccgcgccgacgcaggctctactccggccgatgcgtcgacatcgtgccaccgacacagccggcgcgccaccaccactggccgccgcgccaccagccaccacatgggcgcaagcgacactccggctgccgcgtcaccgacgtagccggcgcgctgacagcccgagccgccgccacgccggagccagaccgacgcccagccaccgcgttgccaccacgggccaccgcgccgccgcagtggccctgccacggtcgccacgccgtcgctcgagctcgcgccgtcgccgcaccgaccagattcgggggtgggagggccggatctaccgcctccacacgatgccctgccatcttcgcctccaaccgctgaggttgacgctgtcggctttgccccaacctcctcgcgccaaggaggacgccgccgagctcaactggcctcgccgccgccttcccagctcgccggcggcacgccggcaagctccggcggtggcgaggtggaggagagggccgggatgcggcggcgcgggcggctagggtttcgcctcccgagccgcccacccgtgttacttgttagcacggggtaaaaaactggaatgtgcatatggctttagaaagaaacatgattttcgttcgagatgagcaaacgttatttgtaattttacctcattagtactgtttgtctgcttttctactgatgatttgtccaaatatcatctcttaagagtgaccaattaatgcataataattggttagatataggtgtttaaggtgattgcagttcctatgccaagttctagtgcgtcccgcttttggcatcaaattttttggtaaaatctttgggttattttttatacctggaaattatttgctatcaattaatgtgaactcaactgaacatccatgaaatatacaaatcatgcgcccatgtcaaccgtgcatgccatgacatctgactctagtttagtacagggccactaaagtcatgtacatggccctattgagaccaaaactatgctgtactggagctttctactaactcagcattgcgattgacctagtagtaaactagcaacccaagagcactcccaagattccaaatccctaagcagagcagtcgatttcagtataaccatcactctgttctttctgtaagactaagagtgtaaacatcagttaccttgccaagaggagagggggcacggaggaagagatgaggcaaaagggtgatcggatcgggacctgtttgaggaatggcctggaggggattcgccggctcgccctcgccacgtatgtcggctgctcgtctccaccgaagatcctcgcccgccgcccccgcctggtgccgtcgcgcctagctggtcgccttgtcggctgctttggttgcccgccggagatcgtcgcccagccagcaccgtcgcgcctagcagcctggcaggttgccggccgcctcgcgttagtcgatcgaggcagccaggccattgccggatcgtgcgtctgtcggtgggatggacaatgagggctgctagagaacggtataccgttcaacggtatatccattacctctcccctagacgagatgcgtgtgtatccactcgacaggacgtgccccctagacacactatagggtctagtagcttgcctgccggctggtatggagttgtgctatgtgtcaatcgctagctagctacggagtagaagctatgcatatgcgtcagtatgggacagtgttccctggctgtagtctgcactaaaattaattactcttgtataatgagtttgcttatggtaaaatagttgttccgttatttttattattaaataatttagatttttaagccaaccatgcacaattattagttggctaattgggccaactaatgattgctcatttaatttagttggatcatattagacgaattgtcaatattatatctggtacccataggtaggtaccataggtaccggagcaaagctaatatcacgggtaccaggtacttggtatctggtacccgtgatacctggtagcctggacgaggaggagaagagagaggataaggcagccgcgtggtggagcatggaggcaagacgacggtagcgcggcacctggaccacacgtttgagaaagctcgcgtcagcgcacttcgtaatgtagttgttggtggtgataccttctatgctcgggcgatgatacttgtaggcacttatgatgatatatgtctagttaaaagggatgatagtgatgatacgtatcaatgtatagttatatatacatgtactagtgtacatatccatatgactgatttgactgctgcataggcctcacgatcatgcatgcatgactggttcaccagctatcacctgcacacatggaccccacccatgtaagcctacttctaccatgcagtaggtgtcacgccctaaaaatcctaattatataaattgttgtttaattggaatttttagaaatttaaattaaaagcctacaagctaaaccctaataatctaggaaaattttcaacataaaaatgagctagataaaattttattaaatactacacttgctcctctattttctagatttttctgggaattatttgagcaagggaagtatttttaataaatgaaacaacatttcacaaattttttttaattaaaaagttccaaaactcctcctttaagccgttgggctgagtttggcccaacatgccccctccccgcccgagcggccgagccggcccattcggcccagccgacaccgcccgccctccctcacgtgggacaccgacatgtggggcccacatgtcgggcccttctcctacctccggccggccggccatgccaagcccgagccgccgccttgcgccctcaaatccgccccaatccagccgccccgagtccgattgttaggggggtttttatcctctcatcctcctctatctttacccccaaaaatcgaagcaaatcgttgagtatcttgcccgaatcgaactcgttttcgagtttatctccaaaaccgagttttgtttttctcggatcgatttcttgcgggaggagtccgatctcttcaatccaaggctttatataggaccccctagtccttctctttcgtttgccccctctcccgtgctttcccgtgccttgtagcgccgccgccacaccacccaacccgccgccgccgccggccatcctccggccacgccgcaccgccgcgtccgccgtcgttgccgcctctcgttgccgccgttaggtgcgcacgggagcgaggaagctcggccgccccctctccgccgtcgccggccgtcgtagcgccatcaccgccgttcaaccgagccgccgccgtctcttgcgttgtcgccggccgccgtccctcgttgttggacgcattggtgagtaccatcgggttcgcgccgacgtcctctacgcgtaggtgtcctccaaaatcccggccgaccaccctagctccggcgaggttgccatccgagccggccaccattgatgacgtcatcatgacatcatcatcttatccttttcgttttttctaatagattaaatcttcagaaaatcgtaactaaataaccgtagatccgtttcaggtggttcaagttgctaaatttttctaaaatcaagatctacatgttaaaaatattcacatgtactgtttatgcttgtttttgtactgttttgttgattttttgtttaattgctttagtttccgacgttccggaggagtgcgtttccgttgaggaaggttccgaagagtttgcggaagcccaagacaagtcacacagatcccaaacaaccctttgagcatgttgaacccgtttaaagctattatttaatttcaactatgcattattttcgaatgtcatcgggtggtgaacctttcccaattaattaatggccgaagatgatcttattttcctatgggttataatttgattagcatgaaccttatatgttggattggttcagctaaatgctatatgtaagtttgcttagccatgtttagaaacattagctaactaaagggattaattataaattatgttactttattgttttaattatggttacattaaatggtagctcacgatggttaatcgtgtgatgttaattgattgataattaaaacctggttaaggtgggttgtgagcatatggttttgatggttgtgctcatgacaattaaggaccggttcgcgagctactgttgtgaaacatttatcgtgccaaccacaagccagcgtgggcaacggctttatcttttgtatagcatgattcattatagtgcgccagactgagaagcggcgagaagtccacgggggtcgctggggagtccatgccttgtttataagggggtgattatgatccaggaaaggtgcgctgtaatggattatgttgtgcaaggggtattgtcacaactcctttccgaggtaccgtggtggtattgaggcacatggtgacatgatgtggggttgtgtcttgtgggtacagtggtacacctctgatcagagtaaaactattcgaatagccgtacccgcggttatgggtgagttgagcaatgtttttcgtgattagtttcacactactcatcaatgttaataatgtgataattaatttgactcctggtttggaatggataattcctggtttggaggtttgatctgtacgaccggggttggttgttcaggtttggttgggcctgagtggcatgggtgtgctgttcagtgttgattaatattgatgattaattactctattattttactactcttaaatctttgctaaatgctgtttttgcaaatgagcctatattatgccatcccttggtatccttgtgcacttgcatacttgctgtgtggcttgttgagtatgtcatatgctcattcttgcaatatttaatcatcagaagaggagtatttcagcgaaggtgatgatctgaaggattgagcttgttctggttaagatgcctgtggagtggagtcgccatagctgttccgtagtttgttatagttttatttttttttccgctgcgtagaaggttattctttgagaggaactatctacctctgtaataatttgtttgcgaatattaaatagttatttatttgtactctattatgtaacatacccgaaattttaggacttaaaatttcttgtcaaaatagttagaggttaacttctccaattttgagagccaaaatttccgttttaatttaggtgatgaccaacttaaaccattgcatgattaaaatttgagaacaaaataaaatcttttcattcccaacattagactagaaatgtcaccaagcatacatgtacataatgcatgcctaggctcgagttctttgtgcatttggagttttggtcttgcattccataatagatcccatgagcataatctaaaagaattacttcactaaacaaacctatagttaatcttgagtgataacatgtggacttaatattaaactcaaatatcatcttctcagtctaaaacaagtttaatgtaatccctataataatattagatgcaattatgaagtgggaacacatatacaaacaaaggtcaacttaattctctaaaatattttgtgcaagataaaatcatggaaaaatttatgtggacaatgattagcacaaacttatcctctgtaatttggtaacatgttaacactcaagttgatatctcaaattaatcggttgaagcagacaactaaaagaaatcaaattaaatttaattggctaaaaccatatttcatccaaaagtacattgaactgcacataagtgaacatgggaaatgatttattcaaacactagattagttatcatgaataaatgtaatttttctagaattttcctcctctgtttaagcctcctaaaaattcaatctagctttctaatagcccatctttgtttaatttctgtgagcagtctacccattatttttgagtgcaaccaaagaaaatggaatctaggtgtaatcatttacctccagtaaattcaacactagataatttggtccacacattaagttatgaagctacaaagttagaggagaaaataattccgaaaattaatctaaaaatcaagtttaccagtcttctacccatatctctctccctggcctagtttccatcgagttggccccacttgtcagtgccttaggctaggttcagccctgtccaacacttcctccttctacacctctctcttgcctagtgggaccccattgtcagcctcacatccctctccacacgggcccacgactcagaccccgcgcgccacgcgtgtgagcacgcgttgagcgcggaagagggcgagctcctcctccccatctccgccggcgaccgtacttaacccgaccggccgaccaactctcactctctctcgcccctgtctcgtttcgcggaagaaccgaggtaccccgcctcggattcgccgggaacgggggtgccaactccggcgccggtgagagaagtcctcgacgccgtcgcaatccggtgagctccatttccgttcaataagcattctgtaattccctctcaatgccgtctctaacgccaccaagaacgcctcttttagtgcagccaatctccgggaacgcgaccgcgtcaactcggaacaccgtcgcgctctggccgccgacgccattcctttctttctccttctctggtgagcttcggcgcaatctttttcgcctagagctaccttgtgctgatctaaaccgaagcatgcaccctctatatgcagtagaagcccgggagtacaccgtcgacgacgaccgtagcagttgcgccgtcgccgaaccagtacaccgtcgctaagacttcgccgagccgcgtttgattcttggtgagcctcctagtagtccctagagtccttatcatacgcatgcacgattaaatcgagcctcaaaacccacgtgcatgtgcaagccgagcttagccaccgcctctaacaccctaacagccgctatagagcaccaaatcttgccagaaagccaccaataggttcgcacggttgttctctacactttttgttttgggagcttaagctgaatcgccgttgttcgccactggtgatgctgtgaagctcgcggctgtgctgctgctctgctctgtccagagcaagggcatggcttttgaaatttaaagactcccagggatgtattaacaactggaacagtcacttacaagtaggaccagtaataatctgtaaataaactaaaactcaagcatcgttttgcatacaaacctaaaactaggggactgcgggatctatttcccgagaaaccaggggtttttgcgaaaaatgttagtaactgacatatgggcctaggactgcgggttgattcctagaaacctcaagggcctttgtgcatattggtccctcacagccatgtggacccatcctttaaaatctgaagaaaaattaggaaaatgcccaaacaattatatgtttagcagaaaaatgcacaaagttgtaaaatctatataaaatcaaatatagctcattttgaagtgattccagttgctgtagattcttgaagttatgaaatttattccaggaatataaaacttgacacttactgtacaaataatgtctctaagatttatctaagataagtcatacataaaacatgtacaaacttataaaatgcatagaaaattcatttcaactcattttgaaacaaaatcaaattctacagattcatcatcatacagtctctgattaggtgaaataaaagtaattacttactttgcatcaaatgcctctaaaactataatctctataatgattaattttagataagctaaactttagaaattgatgtagaacccaatttagcttcaatttgagtaaacttaagttctgtaggatcattaaaacatgtatttccaagttatgaaataatattatatacttactgtgtagtaaaagtctctaaatattcatataaggatttactaacatagagcagccattaatttgtaaaaacttgtagaaaattcatttttagtccaaatgaaatgaacaaagtttctatagaaccagcaaatagttatcttcaacatagtaaaataaaatttggcaccttctgtagagaacattgatcaaaaccttaacttagtgaaataagaatttaaacacatagtgttgtttaagtaatacataaacatgtataagtatatatatacactttaggtctaattaaacctaaataaaaacttgattgaccagtgaagccatagttccatcctcatccactaaaattagaagaacttagctcatataacaatttctaggttaatataatatattgctagtttagattagagcatctctagtttataaaatatgaaccatactagtaaagatcataaacatgtgaactaaaaatgttttagttaaccaaattattccttttattcaacttaaacaggaagtagcatgttctgaacctatcactcaaaagtcatgaacatataaaacactatatgcctaaaacatgttgtaacttgtaaaatctataagaaaatcattataactccaaaaattgtgaaaccaaatgtgttagtcttagaaaacacaacttcacactcctatgaagtctaatctagtaaaaatcactttacaaaagtatttcataacactacctaagactatactactataaaccgataaaacttctaaaattcataactcccaaatggaataaaataaaataggaattatttcacctaaattcattttagatcagtaccaacccactgtgcataaatcatgcattttagagcattttggattttcagctctttcggtgtttaattgcatatcgtgtcctttatctagataattgcataatcggtgaagaagtggattaggtgctaacaattctctgatcaaggcaagttttctcctcccatcctttgaacacattgaatcccatgatttgaggaatgaaaatatttgtttgcaaagttgcatgtgaacttagactatatcggtatttgaaattgggttaaggtagttatgacttatttgctgcatattccaccttgaataattgatcctcttgctgtttgaacccctagaaatggttagagtacactctttgtgctcaaatgggtttatatatgctctatgtgcaactacttgctcagccatgcttagaaatatgcaaatgctcattccatctataattaaaatgtgaatttttatacatgaacccttgctggaataaaatgaatatgatgggtatttacgaactaaaatgtgtaaaatgtgattttatacttgggcggcaagtggtgtgcatatggtattagttgcataccgataggggaagtgtttgcccaagtccataaggaccgaacttgtgtcacccatttaaagttatccgtacatccacatgtgctagtatgggatggcctaagctgattaatctatttaggactagccttgcattctggtaggccggtgtgtatgagttagtcgataattctgaggaattagtcgatgattcagaggaacttcctatttgccccgacgtggtagtttaggtgactaagtctgtccaatacaacggtattgtgccacgtggtgggttcccgtcgtgtccgccaccacggcgttaagtttaaggcgtgggcccgccacttaacggttctaggtatattccaagtatgcctaggatggaggaacacgtatcgtgctggtgcaaggctagattctaagtagtgtaaaggcttcgttatgacctctagatcacattcaacatgaagagtgtgatggagtcttgcaaactcaaaacaaactagagagttcatatcatgtgggtaaagctgtacaaactctgcagagttctttaaactaatcgattagccgtgctcacggtcatgagagctttggtgatgtgtcatgagtatagactatgttttaaaaatgtgatcttgtgacattggtttgaaattgataaatgtgttgagttgtgtatgtggtgatacattatgacttattgttaagtatggcaataagagattgtttatgatggaattatgaagaagttaataatgaaacttaaaacttgtctttgttaattgaagcatcaactcttttacaaaagaattgcgaaacaaaacttgctttatgctgaaaatgaactacatattgccttcctttgaatatatgccttacatgtagtatggtaggattgacttgtgcttgccagtacattaacttgtttaatgtactgactcttgctgttgatataaccctttgtttgcaggtttagtcttagtctttgagtgatgcgggttccgattgcttcttctaggatgagaacttaatggggtaaacccctagtcggtgtgcttgtgattgggtagtcaagcttccgctgttctctattaagtctatttggccggtcggcctatgtaattattaagttgttgtaagtcttaagttctttcatcttagttgtgtttgctatgtataatcatgcttaagatgaaagtgtggatctagtgcacatcctgggaactagattcacatgagtatgagttaggaatatttgagaggttgtagatctttagccatttttgtcaagtctcctgaatgtgtaacacatctggtcgccgccttcgagtggtttgacgggcacatctcaggctgaagttgactggcaggctaagggcccagcaatgtctccaatattcctctctcgaggtgtcggatgtttcattatgcttgtttgatgacttgaattattcacttcatctctcaaatataatggaaggtccggagagcctacgacatattatcaatttgttattgtgtgcctcggttgattcctggacgagggtttaacacacatgtaagcgcttggaattttggatagaaattccgggcgtgacagtaggcaagaggagttaactgctccttgggccaaccattatgcacgcatgcacatagtcaccagctatcaacctatcacctggccctactgacgcatatgtaaaagacgcgcatgggtctatatactttcatgagagagctgatgggggtgagatggtaacggttcgggcacattaagtttgtcccgtgaccgtcgcaccaccacatgatgccgttaggtagtttttgtgatggataatagatatagatgggctaaatcggtttttttttccgtagaaaagaaatatactccatatttgggccggttgaaatttgggaatgcaaagtaacggatgaagactccaacatttcaaacggacatacttgatcatttttatataaaactacttacgtattttatattgggatcatgagatttttttaaggactgttttctcaaggaagagtggttttctatgatgtttttttatgagagggagcggtttttgacgaaaaaaggaaaatgattgtcttttaaagtagttaagaaatacactggcttctttaaaaatatatagttcaagataaatataattatttaacccttttttagagaaacatcaataacctgctggaaacaccaacccgatcaatgcacatcaacgaccaaagatacatacctagaatttggtagaggataccggcgtactggtcgattccaaaggagcagccattgacagacaatgatctcctccctgcactaggcatgtcaatcatttatagccttgctggttgtgatcaaaataactgcgtggaaatagacagagtaactgacctgatccccaaaatcattggattcacaagcttcaaaagtgcaatggtaaattccgaagcacaacagaaggttctgttaatgtcatcgttgaaggtgctgcagaggctcacaagcattgaaggggaaattggcataacactgaggtacaagatatcaaaacattccttcttattgagaaaccttgcagagatcttgggagatagcagcagcaatcaaagaactaaggaggatccttttacaatgggtcctcctgttggattacggtcgtctacggtccccagtccgatgcggacaaggtgctattccttcaggagctgtgcgatatcagaagtatgcgtaatgggccatgggtagttgttggcgattttaatctaatctaccaagatagggacaaaaacaacgccaacctcaaccatcggatgatgagtcgtttccgtcggactatcaacgatctagctctccacaagctccacctgaatggacgtgcttttacctggtcgaatgggtgggagaacccaaccctggagtgacttgaagccgactgggaaaaactcttccctcaatgcttcctcaaggctctgccttccttgatctcggatcattgccctctactcctttcaaccttgccggcccatccgtcgaaggggagatttcacttcgaaaatttttggtgcaaattgaatggattctctgatgtggtgcagcaatcttggtcggaatcgtgtaccatcatcgatcccatttccaggcttgactccaagctcaagtcggttggttgtgccctaaaaagctggagtgatcggaaggtggggaatgttaagctacagctagaaatgattagagaactcattgggaaacttgatcgagcggaggaagtgcgcggtctctcggcacaagaaagattcctgcaccgaggactaaagaagaggtatttggcgtactcttccttagaacggacaatggctaggcacagatcgtgcatcacttggttgcaagaaggagatgcgaacacgaagttctttcatcagcaagcagcttggcgtcgtcggtgaaactttgttcagcaattggaattcgactcagaggtcgcaactgccccggaagagaaggcgtaacttgcacagtccttcttctccgaagttcttagctcagtcagtccgcgtgagttctcgctcgaattgagcttccttgagcagccggggcagccgttatccgatttggaggaccctttcactgacgaaaaggtgtggcaagcggtcaaggaaattccttgcgacaaagcgccgggaccagacgggttcaccgggcagttctaccattgctgctgggacatcatcaaagtggatgttctagctgctctccaacagctccatcgtatggatggttcgagtttggagaaggtgaacaaggcattcattatgctactgccaaagcgcccagatgccaggaacttgcgggattttcgcccaattagcttggttcacagcttcgttaagcttttcacgaagatcctctcacgccacctagctcccaagctagattctcaggttgccaataatcaaagtgcgttcatcaagaagagatgtattcaggacaacttcatgctagtgcggcagtcggcgaagcggttgcatgagcggaagcaatcctccttgcttttgaagctcgacattgcgcaggcattcgattccacctcctggcaattcattttagaggttctggagcacaaagggttcggtagccgttggtgtgcttggattgccatgcttttcctaatagcaagtacgcgggtcctgatcaatggcataccggggaaccctatcttgcaccggcgaggggtgtgccaaggggatccaatctctcccatgctgttcatcctcgctatggactcattaagctctcttttctctaaagcagagaatgaagggctgttacagccgctgcacctgccctaccgaacttccctctacgcggacgacacggtcgttttcattcggtcggatcctgaggaaatcagcacagcaaaggaaattctacacatctttggggaagccacagggcttgggatgaatttcgctaagtgtgcagctctcccaattcagtgcaacgacaacaacattgcactgatccaggacgaactaccatgtcaggtcgcaacattcccttgcacttatttagggctgcccgtttccatcttccgtcttcgcaaagaagacctgtagccgtttgtggacaagatagcccgtcggttgccggtatggaaggcagagcagatggcgctcattggtcgggtcactatggtaaatgcggtattgagctctataccgatctatttgctgatggccatcaatgtgccaaagtgggtgataaagggaatcgataaggtccgtcgcggcttcctctaggccgggaaagcaagtgctagcggtggaagttgccgggtcgcttgggcacgtgtttgcgcacccaaatcgtatggtggattgggtgtccctgatcttgagcgcatgggacttgcgctctggtgccgctgggcttggcaactgaggacatcgccagaaaagccatggcatggactcaatgttccgatctcgcaaaaggagaggaacctactccaagtctctttgacatgtcgagtcggcaatggaatgaacgtgctcttctgggaagacaactagatccaggggtcgtcgatccgcacccttgcgccggctgtgcatgccgcggttgcagcaagaacccggaatcgcaggacggttcgcaaagcactccaaggtagaacatggatccgggatatatctggggctttcgaaatccaagcaatcctagagtacctcagcttgtggacatctttgcaatccttggatgccctcacggaagagccagattcaatcatctggagatgggagtcatcaggagaatactcagctcactcagcttatcagtccatgtttgtggggagggtccaattccaggacaagcctatctgggggtcgttagcaccgccccgatgctgctatttcctgtggttagtggcactaaacagatgttggacggccgatcgtttgcggagacagggtttaccacatcctgatcggtgcgtcctatgcgatcaagatgacgagacgattgatcatctcctagtcgcatgcccggagtcacgtcaactgtgctggttcgcactccgagcaattggtttgtcggacatactgccattcaatgaaccctccttcctctcatggctttgtgacaagagaatgaaggttgccaaagctcagcgacgaggattcgacaccgttgcagccttgatagcttggactatctggaaggagtggaacaacagggtcttcaaccaacagcaaaagacctgggtcgaagtggcaaagtgatggcggctgaggccgtgctttggcgcttagcgaacgcggcaatgctggagttacctctactgaccacggagtggcggtcgcaaaattttgtacgagattaggccttacattttgttgtccatccggtaccctatccccttctttattttcattttcaaatctctgtaaataaactttatttctcttaatacaaagatgcgcttcttgcgtattcccaaaaagaactaaggaggctcgtggcagaaatcctcagaaaccttgcaattgacagagacacaaggcaggagattggacaaatgaaaatgctcattaccaggctgatgaaggcattcctcgattctcatggatcattttagttcagatgttgattgcttgctgccaaaggtcgacgggcaagcactggtaatgctgtcatcagaaaacccgcataactgcttcattatgattctaatccat

SEQ ID NO: 5098 - DNA, 25600 bp, Oryza sativa
cctccatcctaggcatacttggaatatacctagaaccgttaagtggcgggcccacgccttaaacttaacgccgtggtggcggacacgacgggaacccaccacgtggcacaataccgttgtattggacagacttagtcacctaaactaccacgtcggggcaaataggaagttcctctgaatcatcgactaattcctcagaattatcgactaactcatacacaccggcctaccagaatgcaaggctagtcctaaatagattaatcagcttaggccatcccatactagcacatgtggatgtacggataactttaaatgggtgacacaagttcggtccttatggacttgggcaaacacttcccctatcggtatgcaactaataccatatgcacaccacttgccgcccaagtataaaatcacattttacacattttagttcgtaaatacccatcatattcattttattccagcaagggttcatgtataaaaattcacattttaattatagatggaatgagcatttgcatatttctaagcatggctgagcaagtagttgcacatagagcatatataaacccatttgagcacaaagagtgtactctaaccatttctaggggttcaaacagcaagaggatcaattattcaaggtggaatatgcagcaaataagtcataactaccttaacccaatttcaaataccgatatagtctaagttcacatgcaactttgcaaacaaatattttcattcctcaaatcatgggattcaatgtgttcaaaggatgggaggagaaaacttgccttgatcagagaattgttagcacctaatccacttcttcaccgattatgcaattatctagataaaggacacgatatgcaattaaacaccgaaagagctgaaaatccaaaatgctctaaaatgcatgatttatgcacagtgggttggtactgatctaaaatgaatttaggtgaaataattcctattttattttattccatttgggagttatgaattttagaagttttatcggtttatagtagtatagtcttaggtagtgttatgaaatacttttgtaaagtgatttttactagattagacttcataggagtgtgaagttgtgttttctaagactaacacatttggtttcacaatttttggagttataatgattttcttatagattttacaagttacaacatgttttaggcatatagtgttttatatgttcatgacttttgagtgataggttcagaacatgctacttcctgtttaagttgaataaaaggaataatttggttaactaaaacatttttagttcacatgtttatgatctttactagtatggttcatattttataaactagagatgctctaatctaaactagcaatatattatattaacctagaaattgttatatgagctaagttcttctaattttagtggatgaggatggaactatggcttcactggtcaatcaagtttttatttacgtttaattagacctaaagtgtatatatatacttatacatgtttatgtattacttaaacaacactatgtgtttaaattcttatttcactaagttaaggttttgatcaatgttctctacagaaggtgccaaattttattttactatgttgaagataactatttgctggttctatagaaactttgttcatttcatttggactaaaaatgaattttctacaagtttttacaaattaatggctgctctatgttagtaaatccttatatgaatatttagagacttttactacacagtaagtatataatattatttcataacttggaaatacatgttttaatgatcctacagaacttaagtttactcaaattgaagctaaattgggttctacatcaatttctaaagtttagcttatctaaaatttaatcattatagagattatagtttagaggccatttgatgcaaagtaagtattacttttatttcaccctaacaagagcctgtatgatgatgaatctgtagaatttgattttgttcaaaaatgagttgaaatgaattttctatgcattttataagtttggacatgttttatgtatgacttatcttagataaatcttagagacattatttgtacagtaagtgtcaagttttatattcctggaataaatttcataacttcaagaatctacagcaactggaatcacttcaaaatgagctatatttgattttatatagattttacaactttgtgcatttttctgctaaacatataattgtttgggcattttcctaatttttcttcagattttaaaggatgggtccacatggctgtgagggaccaatatgcacaaaggcccttgaggtttctaggaatcaacccgcagtcctaggcccatatgtcagttactaacatttttcgcaaaaacccctggtttctcgggaaatagatcccgcagtcccctagttttaggtttgtatgcaaaacgatgcttgagttttagtttatttacagattattactggtcctacttgtaagtgactgttccagttgttaatacatccctgggagtctttaaatttcaaaagccatgcccttgctctggacagagcagagcagcagcacagccgcgagcttcacagcatcaccagtggcgaacaacggcgattcagcttaagctcccaaaacaaaaagtgtagagaacaaccgtgcgaacctattggtggctttctggcaagatttggtgctctatagcggctgttagggtgttagaggcggtggctaagctcggcttgcacatgcacgtgggttttgaggctcgatttaatcgtgcatgcgtatgataaggactctagggactactaggaggctcaccaagaatcaaacgcggctcggcgaagtcttagcgacggtgtactggttcggcgacggcgcaactgctacggtcgtcgtcgacggtgtactcccgggcttctactgcatatagagggtgcatgcttcggtttagatcagcacaaggtagctctaggcgaaaaagattgcgccgaagctcaccagagaaggagaaagaaaggaatggcgtcggcggccagagcgcgacggtgttccgagttgacgcggtcgcgttcccggagattggctgcactaaaagaggcgttcttggtggcgttagagacggcattgagagggaattacagaatgcttattgaacggaaatggagctcaccggattgcgacggcgtcgaggacttctctcaccggcgccggagttggcacccccgttcccggcgaatccgaggcggggtacctcggttcttccgcgaaacgagacaggggcgagagagagtgagagttggtcggccggtcgggttaagtacggtcgccggcggagatggggaggaggagctcgccctcttccgcgctcaacgcgtgctcacacgcgtggcgcgcggggtctgagtcgtgggcccgtgtggagagggatgtgaggctgacaatggggtcccactaggcaagagagaggtgtagaaggaggaagtgttggacagggctgaacctagcctaaggcactgacaagtggggccaactcgatggaaactaggccagggagagagatatgggtagaagactggtaaacttgatttttagattaattttcggaattattttctcctctaactttgtagcttcataacttaatgtgtggaccaaattatctagtgttgaatttactggaggtaaatgattacacctagattccattttctttggttgcactcaaaaataatgggtagactgctcacagaaattaaacaaagatgggctattagaaagctagattgaatttttaggaggcttaaacagaggaggaaaattctagaaaaattacatttattcatgataactaatctagtgtttgaataaatcatttcccatgttcacttatgtgcagttcaatgtacttttggatgaaatatggttttagccaattaaatttaatttgatttcttttagttgtctgcttcaaccgattaatttgagatatcaacttgagtgttaacatgttaccaaattacagaggataagtttgtgctaatcattgtccacataaatttttccatgattttatcttgcacaaaatattttagagaattaagttgacctttgtttgtatatgtgttcccacttcataattgcatctaatattattatagggattacattaaacttgttttagactgagaagatgatatttgagtttaatattaagtccacatgttatcactcaagattaactataggtttgtttagtgaagtaattcttttagattatgctcatgggatctattatggaatgcaagaccaaaactccaaatgcacaaagaactcgagcctaggcatgcattatgtacatgtatgcttggtgacatttctagtctaatgttgggaatgaaaagattttattttgttctcaaattttaatcatgcaatggtttaagttggtcatcacctaaattaaaacggaaattttggctctcaaaattggagaagttaacctctaactattttgacaagaaattttaagtcctaaaatttcgggtatgttacataatagagtacaaataaataactatttaatattcgcaaacaaattattacagaggtagatagttcctctcaaagaataaccttctacgcagcggaaaaaaaaataaaactataacaaactacggaacagctatggcgactccactccacaggcatcttaaccagaacaagctcaatccttcagatcatcaccttcgctgaaatactcctcttctgatgattaaatattgcaagaatgagcatatgacatactcaacaagccacacagcaagtatgcaagtgcacaaggataccaagggatggcataatataggctcatttgcaaaaacagcatttagcaaagatttaagagtagtaaaataatagagtaattaatcatcaatattaatcaacactgaacagcacacccatgccactcaggcccaaccaaacctgaacaaccaaccccggtcgtacagatcaaacctccaaaccaggaattatccattccaaaccaggagtcaaattaattatcacattattaacattgatgagtagtgtgaaactaatcacgaaaaacattgctcaactcacccataaccgcgggtacggctattcgaatagttttactctgatcagaggtgtaccactgtacccacaagacacaaccccacatcatgtcaccatgtgcctcaataccaccacggtacctcggaaaggagttgtgacaataccccttgcacaacataatccattacagcgcacctttcctggatcataatcacccccttataaacaaggcatggactccccagcgacccccgtggacttctcgccgcttctcagtctggcgcactataatgaatcatgctatacaaaagataaagccgttgcccacgctggcttgtggttggcacgataaatgtttcacaacagtagctcgcgaaccggtccttaattgtcatgagcacaaccatcaaaaccatatgctcacaacccaccttaaccaggttttaattatcaatcaattaacatcacacgattaaccatcgtgagctaccatttaatgtaaccataattaaaacaataaagtaacataatttataattaatccctttagttagctaatgtttctaaacatggctaagcaaacttacatatagcatttagctgaaccaatccaacatataaggttcatgctaatcaaattataacccataggaaaataagatcatcttcggccattaattaattgggaaaggttcaccacccgatgacattcgaaaataatgcatagttgaaattaaataatagctttaaacgggttcaacatgctcaaagggttgtttgggatctgtgtgacttgtcttgggcttccgcaaactcttcggaaccttcctcaacggaaacgctctcctccggaacgtcggaaactaaagcaattaaacaaaaaatcaacaaaacagtacaaaaacaagcataaacagtacatgtgaatatttttaacatgtagatcttgattttaaaaaaatttagcaacttgaaccacctgaaacggatctacggttatttagttacgattttctgaagatttaatctattagaaaaaaggaaaagaataagatgatgatgtcatgatgacgtcatcaatggtggccggctcggatggcaacctcgccggagctagggtggtcggccgggattttggaggacacctacgcgtagaggacgtcggcgcgaacccgatggtactcaccaatgcgtccaacaacgagggacggcggccggcgacaacgcaagaggcggcggcggctcggttgaacggcggtgatggcgctacgacggccggcgacggcggagagggggcggccgagcttcctcgctcccgtgcgcacctaacggcggcaacgagaggcggcaacgacggcggacgcggcggtgcggcgtggccggaggatggccggcggcggcggcgggttgggtggtgtggcgacggcgctacaaggcacgggaaagcacgggagagggggcaaacgaaagagaaggactagggggtcctatataaagccttggattgaagagatcggactcctcccgcaagaaatcgatccgagaaaaacaaaactcggttttggagataaactcgaaaacgagttcgattcgggcaagatactcaacgatttgctccgatttttgggggtaaagatagaggaggatgagaggataaaaacccccctaacaatcggactcggggcggctggattggggcggatttgagggcgcaaggcggcggctcgggcttggcatggccggccggccggaggtaggagaagggcccgacatgtgggccccacatgtcggtgtcccacgtgagggagggcgggcggtgtcggctgggccgaatgggccggctcggccgcttgggcggggagggggcatgttgggccaaactcagcccaacggcttaaaggaggagttttggaactttttaattaaaaaaaatttgtgaaatgttgtttaatttattaaaaatacttcccttgctcaaataattcccagaaaaatctagaaaatagaggagcaagtgtagtatttaataaaattttatctagctcatttttatgttgaaaattttcctagattattagggtttagcttgtcggcttttaatttaaatttctaaaaattccaattaaacaacaatttatataattaggatttttagggcgtgacaaacctaccccccttaaacggaatctcgtcctcgagattcagaagaactggcaaagagatgcggatgagctgacttcaattcatcttctcgttcccaagttgattcttcttctgaatgattgctccactgaaccttgcagaaccgtataacgcgattcctggtattcctctcgcttacttccaagattctgactggcttctcaacataagttaaatcttcttgaagctctatacgatcaggatctgcttcctccgtaggtacacgtaaacacttcttcaactgagacacgtggaacacgtcatgtattcccgccattgacggagacaactctaactgataagctacctcacctcttcgactcacaatcttaaaaggtcccacgaaacgcggtgccaatttccctttggtttgaaaacgatgaacacctcgtaacggcgtaacccgaaggtatacataatctccttcttcgaaagccaaatctctgcgacgattgtcggcatagctcttctgacgtgactgagcaacgcgcaacctttcttggataatcttcactttttcttctgcctctcgcagtatgtctgtcccaaaaacttgacgttcaccggtttgatcccaaaggagcggcgtacggcactttcggccatataatgcttcatacggagccatttgcaaactagcttgataactgttgttatatgagaattccgcgtacggcaaattcttatcccaacttccaccaaaatctagaacacaggctctcaacatatcttctaaaatttggtttactctttccgtctgaccatctgtgtcacatcctgattttcgtttcaggatttataaattatttaataaattattaatagaatttatattaaatgttctttaatttacaagtgaagttaaatgtgggaaataaaatttcttaaatctaaagcatggatggatttaattttggttaaattctccatggttaagtcaactctctgaaattttctcggatttttcagagctcaattcttaaataatacaaagaacagttcagtaattatttgatcattaatgatctaagtataattgttaagagcttttcttgtttaaaaatccttaaattataaattgttgtttaaaaggaattattagaaatgattttaaaagtctaaaagagaagatctaattttaatttgcaaaatctcaatataaaaaggggcctgataaaatttcattaaatactttgctcaattctataattcctagatttttctgggatttatttgagctaaggaagtatttttaataaatggaattgcatttaagaaataatttaattgaaaaaggttttaaaaagtcttcttttggctttgggccgaaagccggcccaaaacccctctctctctctttccctcggcccagccggcccagttcgccgagccgccgctctcctctctctctcagccgctgacaggtgggccccacttgtcggtttcgtcttcctccttcggccgccgccgcccgcaaaccctagtgcgccgccgccgccttctccttccaaatccgctcgattctttccttctccggtgaaatctttagaggggaaatgatcttctcgatctcctcttccttttctcttttggaatctccggtcaattcggtttggaaactcgatggaatcgagatcgaatcggattcctctctctcccaaaccctaaagtttccttctcgccgccggtcgccgtgggcctccgtcgccgctcgctagcccctttataaggacccccaagctctcctctacccgtcgcctccctcgccttcgcccgccgtcgtgtgtagcgccctagcctcgggagcttttgcgccgccgtcgctgccgttcgtccagccgtgcgccgccgtcgctacggtcgtcgtcgtcactcgggaaggccaccgtcgggatcgccaagtcgccgccgtccccgtccgccgcttcgccgccgccgaagaccgccggagcgccgtcgccgtcgtcgacccgaagagcttcgccgcttcctcctcgtcgctgccgccgtccgttggtcttccgccgttcctttggtcaccggtgagttcgccgcgtcgccctctacccattggtgccctccgttcgcgtcgtcgcgccgccgttcgccggcgagcatgtgagcccgagtcgccgagccgccgccgccggggtgacgtcatcgctgacgtcatcggggtcgtccgccgtgagccggtcgtggaccgatcaatctcggccgtccgttttggatagggttgatctcggtcgtccgttcgcgtgaaccgccgcccgtgcgcccggtccaccgaaaccctagccgctgacgcaataatccttcttttccttttcaaaaataattcattattgcgtcataattcgattaaaatccatataaaggttttaatctgatttaatctttaaaaattcataactaattcatcttaactcagtttaatgtggttcaagttgcaaaagttgtataaaataaagatctacatattaaaattgtccataaattgaattaaatttatttaattctttttaaatgggctttaaatagatttaatcttgtaaaattcataataaattcatatgaaatcagaatgaggccgttcaagtctctaaattcatctaaaatcatgatctacatgtttgtttactttttatgtattgtttatttggtttttattagtctttttccttgttttgcgtgatagtttgtcgtttccgtcgttgcgaaggttcgcgagtgcgccggaagtattcaagaagattaattgaagaccgattattgcaaggcaagtcacacagatcctaaacacaatcctttgagcatgttgatcctatatttaaattctctatttatttcaactgtgcatttattttcgaatgtcattgggtggaattaacctattctttgttatggcccttttgttcttgattactttattccttgataccttgggttattataattggactagttgagctttatatatatattggttcaactagatattagatatgattgcttagccatgcttagaaacattagcacacatttgggataactaatgtttcactatcacttatggttatatttaatggtagctcacgatggtcaatcgtgattggttaattaattacttgccaactaaaacttgataatggtgggttgtgagcacatggttttgagagtcgtgctcatgacaattaaggaccggttcgcgagctactgttgtgaaacattaaccgtgccaaccacaagccagcgtgggcaacggctttatcttttgtatagcatggttcattgcggggcaccagactgagaagtggcggagataagcccacgggggtcgctggggagtccatgccttgttttataagggggtgattatgatccaggaatggtgcgctgcggtggattgtgttatgcaaggggtactgtcacagcccctttccgaggtaccgtggtggtactgaggcacatggtgacatgatgtggggctgtgtcttgtgggtacagtggtacacctctggccagagtaaaactattcgaatagccgtgcccgcggttatgggcgagttgagcaatgtttttcgtgattagtcccacacctctcaccataattttagatgttataactggtaataatttgcttagctcctggtttggagttagatctgttcagccgggtatggttgttcagaatggttgggcctgtgcagcatgggtgtgctgttcagtgttggttaaaatttctgattaattactccactgttttacttcccttaaatgttttgctaaatgctgcttttgcaaatgagccgatattatgccatcctttggtatccttgtgcacttgcatatttgctgtgtggcttgctgagtatgtcatatgctcaccttgcaataatcaatcaacctcagttgaagaaaaaggatctcgaaggagaagacgtttggcttataccccagttgagctgcctgtgggagtggagccggagcttcgctagattttattttccgctgcagttttcttcatgatgaggactaagtgcctcataagtaagtatttatcgttttagttaatttgatgaatctgtatattaaattgtcagtttgtgtacctcggctgattcctagacgaggattttatgcacaaataagttcggaaattactagtgaatttccgggcgtgacaatctgtttgagggtgataagcggtactgaaattcaaacgggtacccatctctacttgtaatttctgccaaaacttcgaagtaaactggctacctctatctgacactatcttcttaggaacgccatgcaaacataccactctggccatgtataactctgcaagcttattccccgtgtaggttgttttgaccggtatgaagtgagcgacttttgtcaacctatcaactactacccaaatagaatcatgtcctgccgacgttctgggtagaccggttataaaatccattcctatttcttcccacttccactctggaatcttcaacggttgtaacagaccggctggcttctgatgttctgccttgacccgctgacatacatcacatagagccacatattctgctatctcacgtcgcatactggcccaccagaattgttgctttaggtcttggtacatcttagtgcttccagggtgaatggaatacaaagtttcatgagcttctttcatgatagtatccttcaactccttattatctgggacgcaaattctttctcctaaccacacagttccttgctcatctactacataaccgatggcttttcctcttctcatgttcttttttatttcttggatatcaggatcattcacttgagcttctctaacttgatcaaacagagtaggttgagcttctaaagtagccacaaaacctttgctgactatatccaagtttaacttctcaaattcttggcataactcccaaggtaaatgtcgaccttctgacatattacagtagcttttcctgctaagagcatcggctacaacatttgctttccctgggtgatagtggatttccatatcataatctttaatcaactctaaccatcttcgctgacgcatgttcaaatcaggttgagtgaaaatgtacttcaaacttttatgatccgtatacatctctgtacggttaccgaaaagataatgacgccaaatcttcaatgcatgcaccacagctgccaactctaggtcatgcgttgggtagttattctcatgaggacgtaattgcctagatgcataggcaaccacctttccttcttgcatcaacacacaacccaaaccgagtcgggatgcatcacaatacacttggaaacctttcctcgaatcaggcaaaattaacaccggcgcagtcactagccttttcttcagttcttggaaactttgttcacaatcctctgtccacttgtacttcacttccttctgaagcagacgagtcattggtctggcgatctttgaaaagttctcaataaacctgcggtaataccccgcaagtccaaggaaactacgaatttctgaaaccgtcttgggttgcttccaacttaacactgactccacattgcttggatctactgccactcctccagatgagatgacatgaccaagaaacttcacttcggacaaccaaaattcacatttactgaacttggcataaagctgatgctcacgtagtttctctaaagctagacgaagatgctcttcatgttcttctttcgtcttggagtaaataagaatgtcatcaataaacaccacgacaaacttatctagatattccataaacaccttgttcatcagattcatgaaaaaggctggggcattagtgagtccaaatgacataacggtacattcgaacaaaccataccgagttgtgaaggcggtctttggtatatcttcctcacggattcgaagttgatgatatccagaacggagatctatcttggagaaaactgtagcaccttccagttgatcaaacaggtcatcaattctgggtagagggtacttattcttgatagtaacctcattcaacgctcgataatccacgcacattctctgagtatgatctttcttctccacaaagatgactggtgctccccatggcgaggtactgggtctgatgtatcctttctgaagcaaatcatccacctgtctcttcacctcagctaactcattagctgccattctgtatggtctcttatggatagggttggttccaggtaccaagtctatccgaaactctatgtctctcttaggtggcatacctagcaaatcctcgggaaacacgtctgggtagtcttgtactatggggatctcttgtagagcaacttggtttaaaaacacaccatgatatttaggagaggacacaaagaaagaaacggtttccccattgctactggttaaagtcaccttacggttagcacaatctataactcctctgtgacgagataaccagtccatccctaagataacatctagatctttggattctagcaagataagcgaggatgggaaaggaacttcttctatttctatagtagcggaaggacaatactgtgtcgaagatacttgattgcctggggtattaactagtaaaggtctcccaagactaataacttccatcccatgattgctcgcaaaacttttagacaaaaaggaatgtgtagcaccggaatcaaaaagcacagatgcgggtatagagttaacaggaaacgtacccaaaaccacatctggtgcattctgagcttctgctgctgcaacatgattaacacgtgccttcggtgctggagcattggagttgttcggggctggagcgttcttcacgcgccgaggcttaggacacttatcagcataatgtcctggatcaccataattgaagcacacccctggcttgcttccctgttccttcctgacgggctggttctgagctggagttgctgcaggacgagcaaccatgttgcggttgtcattgccacgattaccagtattgttgtcgtagaactggcgttgggggcggacaactgatgaagatcctccttgagggtacgatggagcttgaggtcccgtaacgagacgcggcctctggttactgccctgttgtgccttgaattgggcagccctgcgcttcttctgctccatccggttatacttgtcttcctgacgaatcgccttgtccaccagctgctggaaatcccggaaatccgtagacatcaaggcataagacaactcatcatttagtccctctaagaacttctcctgacgctcttcatcggtgcgaatatcttccggagcataacgagctaaacggttgaaatcgtggaggtactcggtgaccgaacgagatccctggttgagtgctctaaattctctcttctttagagctacaacacccgttggtatgtgtgtcttcttgaaagcggccgtgaattcctgccaagtaataggctctccttcagccctgccttggcgaaaatgatcccaccattcagcagcaggaccatgcaattgatgcgaagcaaaagaaactttctcctgctcagtacactggatcaaatccaacttcttctccaccgcatgcagccaatctcctgcttctactggattggtggtgcttgaaaaggtagggggtctcacacgtaagaaatctgccagcttgttttggggaggtgggggtggattctggttctgattgtttgcctgctgattctgtgcctgctgcactaacagattgatcagttgtgtttgttgggccagaatctgagctagcgtgggatctcctccattgttagcagctccacttccacttccggtgcgcgtgttcaccatctgacgataagcagagacaacaggaaagaacgacagagagacaccctcagaacggagttatttaattaatttaaattttatattgctcttaactgtgtatgcttacatttaagttgcattaacactatctcaccaactatcttacactctgacaagcaaaagaactagactcatgctgttacatcccaccaatgatgtaagcaacaactaaaacccacacactcacaagcaaacttaaacaagcaatctaacacagcgaactacggcaacgacctaactaagcgactaatcccgccttgcgtcggaacgaagcgatggatcttcttcctctggagtagctggctctctttcttcagggtcttcctcttcttcctcatcacttacgatgtcgatgacaggttcagcacgatcgggcacaacttcacccatcacgcgaatcttcgaagctaactagagacgaggtggcggacaggttctctttcttgcggtgaggcgaagcttgggggttggcggcggcgtttctcctttaagttcagctaattccttctggagacggtacaccttgctctccaacttgcaaatcttgcctcgattccagttttccctgtcatgagctgctttgtctcgctccacacttactgcatccatagcactaagcatatgcaccgcatgcatcagagtggcactctcttcaccatcaggacaggtataggttccatagtcttgaccatgaggcttgtgaggatgatactagaaagctgatgaatccaactcttcttcaaaacgttgacgcaactctccaatggccaccaaagctgcttcttgacaagcatggctgtacgatcttcctccagcttcgaacttaatggacggaaggtcttcacgatcactagccaacgtcacacgaacacgacacttctcctcgttggggtcatgggaaatccggcgatactcaggagcaacttcatagcctacctcaaaagccatcaacctcagctccctgacgaatcctaacaccttgatcaaatttctcggtgaatggggcggcatctaaagaaacatagaagagaggaattaatgcatatttttttttaagttagctgcaccatctagacttaactgatttgaccaaagaggaagaaaaataaaagaaaagacacgtactaagccattatataaatatatttttagcatttaactttttggacagagacaaataattttttttttgacaaataactaaagtaaaactaaaatacttatgatctattataagcacggtacagtgtcaccataaaaaggatgagtagtactagtgctatcatgattgtatcaataccataatagatgtacagtgccgactaatcaacgaaatttaataaagtgaaataagaaacattttgaaaagaacaactttttgcttttaaaagaaaagaaaatgaattaaattaattttgtgcataaccttgcatgtgctgccaacttaattaatttataagagaatagagaagaacagttctatttttttcaaaatattttgaaggctacttaaggtttaccatttggcttatcctaaggtcaaggtggctctgataccaacttgtcacgcccggaatttctatccaaaattccaagcgcttacatgtgtgttaaaccctcgtccaggaatcaaccgaggcacacaataacaaattgataatagagtacaaataaataactatttaatatttgcaaacaaattattacagaggtagatagttcctctcaaagaataaccttctacgcagcggaaaaaaaaataaaactataacaaactacggaacagctatggcgactccactccacaggcatcttaaccagaacaagctcaatccttcagattgtcacgtcctgataaattcatcccgaaataaaattcattcgctaaaaggaataatagaattaattaaaattcgaaaagaaattggcaaacactaaaatacgtgcaagaaaaattccaatgtggcccggagaatttttgttaaattctccttggtctaaaaagagccctcaaattttacttgaattttcagagcaccggaaataattattaagcaacaacaaccttgatcaaagtttattaaaaagaaaaactaaaaatccctcctcttcctcctttgggccaagcccagcccgaagtccttccctcctccctctctttctctccctctccttctctccctcctcttgggcctcctcccctctcggcccagctcccttccccccctccttcctcccggcctgcctcggcccagccgcccagcccaagccgcctacccctcccccccccctcctgggccggccgcccggcccaactcgagcggcgccctcccgcccgagcgcgcacgtgcgcgcgctgaccgcgcgccccgcgtggggcccacgcgtcaggccgccgtcgccttcttcctccagccgccgcccggcttccctctccccgtgcgaaccctagcgccaatcctccctcaaatccgcttgattcactcggttaattccaaaattaattagggggaattaatcccctttccctcctcttcaattcccccttaatttccccttgaatggtgcccccaatcgccgggaacggccgcgccaagtccggccgccttcctttgccgccggccgccattcccgtcgccgttcccgctcctcccgtggccggctctctcccccatcctataaaatgggatcctcatccttcgttctatcgttttagccccttcccgagcctccccgtggtcgtatcacctctccccgccttctccttctccctctccgacgccggccggcctccagccacctctccctcctcaccggagcatcgtccggccgtgccgtcgcctccctcggctctgcaacaccgtccccttcaccggccttaccgtctcctcgccggaaactcgccggaacggtgcccccgccggcaaccagtggcattggtgccactgtactccctccagccggctgctgttcatcgccggtgcgccgatcgacgccgccgtctcctccttcgacaccgcggcatcgccttcttccccggcatcacctcctcctcgcccgaatttcgccggaacgccgtcgcccgcgccggcctcaccttcctcctcgtcgacatctcctccggctgccccggtcgccgcgccagagcgtcggccgacgtcgccgtctcctccctcggcgacgccgcatcgccctccaccccggcctgccctcggtttcgccggaacgtcgccgcgaacctctccgtccgcctcgccggagttgttcggccgcccgtccctcctcgccgtgtaccggtcggccacctccaccaccatcttcggcatcgcagtcgcgacgtcgtcctcggcctcgcctccccttcgaccgaaccccgccggtgttcgtcgtcatcatcccgttccctctcgcccggctcgtcgtctcgcggcgccgcctccgtcgtcggcatcgtagcggcgtggtcctcgtcgtcctcgtccccgtgcagccgctgccggctgtcctcgtcgcctcctcgccggtcccggtcgtcgtcgtcgtcgtcgtcctctcgtcgttcccggtcgtcgtggcgttcgtccctccgtcgagccgttctcgtccgtcgtccgcgttcgtcaagcgagccgctgcagccccgtcctcgtgttcgtcctcggctccgcgtcgtcaagcctcgtgccggccgcagctcgccttcgcccaaggatcgccgccgaagccgtcccctcgccgttcgtctccgttgtgcccgtctgtctccgccgcgcccgttcgtcgttgtcgttcccacgcctcgtcgcgtggtggtaaggttccctctccctcgctgccccgtcctcgtcctttcggtgtcgcccgtgcccgttgtgcggttgtcggccccggtacccgtgtaccggtgtcggtagtcgttcacgtgtgcgggtggtgaccgtgtagtgtccgtgttagtgtgcccgctcggtagccgcgtggtttccacgtgtgcaggccgtgtggtgtctagtggagtccgtttgttggccactcgcctcggttgacacacgggatccgcttccgtcgacccgtggaccgtctctgtgcactcggtctaccgcggtcctttaggttgacatgtggggtccgcatgtcaacggcgcagccttcctgtcttttccaggctagcgcttacacatgttttatagttgcaaaacctaattacaataatccgcaaatctccatataacagcattaaacttcggatgatcatatcttggtcatacgaactctgaatcgacccgttcaagtctcctaatgtttgttataacctaaagaaccctgtgctttctttttatgtgttgttattgcttctttataggcttgtagctttgcttgtgtgcttcgcgtagctttcgtcgttccggaggttcccgaagcgtggttcgtggtcgtcgccgaaggttcggaaagccgttctctctgagcaaggcaagtcacatcatccttgaacatattgaatcccagtttgtaaaattatgttgatttaaattattgcattaccgctttatttaaattcccgcgttatcactgttttatctagccatgcccaattacctttgttatgaccttattattgttattgttattattattaccttgttcaccctagaataaataaaaccctaactagtgggtactctattcatggttccactagtataaatttaggtagatgcttcgctgtttaattaggcaacattaggtggttttataattttagactttgggaattctcatatcatttggacactatggaattgttggattatggtggaattggacatacacctctctttctctttcaaaacccctaaaacctgttttcggtggggtttgggtgcatgccagttaggggaagtagcaccccggccactataaggactaaagctcgggcctctgttgcaaagcactaccgtacttccacatgtctaatgggtaaggcttagtttgtggctcagtctagtcataaacaaaagtacacggattggagatggatgaagtcgggcgtcgatggacattctccagggcaaatgaaggctacacgagctgcggcccggtagtcgagatgtcatacggcggagggttggtgcccaatgctaggggctcagttctgcctgcctgtcccgggtatcccggccgtaggtaggattgggtcggtactcttgtctaaggctaggatgggttggaaactatgtcacatctttacgacgggttccaaggccatggaatgcggagtaaagatgtgtcttgtgggtaaagatgtacacctctgatcagagtaaatctattcgaatagccgagccctcggatatgggcaagccgagcaatgtacccaagtcagtgttttaattcttaaaatttgctcaacaactaaaatatggaatggttggcctgggttggcttgggacgagctgggacccagggtcgggttgccagttcggtccaaatcatcgtaggccttgggttaaggcaggttcgtgagggttcacggccttgtttaataacactgtgtagctctaggatcgtctttacaaaatggctttgggcaactaagtgatttttaaatgcggtttactgcaaaacttaatccctatattattattcccttgtacttcccttgcattaatcatgcacctccggtgtggcttgctgagtactgtggttgtactcattcttgctctatctttctccccccttcagtaagagaagctttggagaagaagtcttaggtggagtcttggcttataccccagttgagcgcctgtgaagatggagccgtaggccgctagtccgctgctgtttatttttgcttgtcaggcctgaagtgcctttgtaataatgtaaatattatcgatataataaagatgtgtcttttatatcatgtttgtgtggtgtaccccggcttttcctgggacggggattaatacactagcgttcgggaaaaggcaattttcccggtcgcgacaagctggtatcagagccatctcgactgtaggataagccaagtggataaaacccaaggacatattttataaataaaaattatttgcgaaagttcctttttctccttcccctaatgctatttgcaaaaggtttactcccttcttccttcttcggatttcaactagtactagatggtcaggtcagtgaagaagaggacatcgccagttgtttgccgaagctccggaagactgcaggatccgctagcgaagtggaggaagcagtgaagccagatgtgaagcaggagtgaagatcttcgagaacccgtcgcagaacctaagccaccctctagtgtttcgtttgtcgtgtgtttccttgcttgtgtgtgtagcgcgtggtttgcatcagtgggttgtgatgtaaccatgctaggttgtttgcttaatcaacttgcagaataagtgaaacaaacaacacatcattgaaaagagttagttcctttaaggtcttgtccctagttctggtctattctttccttgtatgcttcccctctcaacctctaccttgtgacagatggataatcctggtaaccaaggctatgggaatgatggatccgatgactcaagaacccaagccaatgggaatgagagaagcaccaacgcaacctcaccagagctaatccaagttgtggttaaccaaaccaacatgttggcaacagcctttcaactattacagaattggaacaacccagcaggggcaaccaacgttcaagtgcctacagtccagcaacagtgcaagttatcagaatttctcaaaactgagcctccaacctttgccattgccgtcgatcctatggaagccagtgagtggttgcgcaccatcgagaagaagctagggttgattcagtgcaccgaccaggagcgggttggcttcgcaactcatcagctggttggaccggcttcagagtggtgggataactacgaagcatcacagccagaaggacataccaccacctggaacgagttttcatctgtattcaggagatcacatgttccctcgggaatgatcacactaagaaaacgagagtttcgctacctgaagcaaggagatttgaccgtcgcagagtacctgcacgggttctatcgtttggctcactatgcaccagaagatgtggaaacgggcgaagacaaacaagagaagtttctccaggggttaaaagatgagctcgcagtgcaactacttctagaggattatgaagattttgagaaacttgtggacaaagccatgcaactcgaaagtgagcataatcggatgacgaattgcaagagaaggatggttaacaacccagtatttccaggtggtaaccaaagacagcgcactgagccacttcagatcaccggatcttctgttgtgtatccagagttcctgccccaagaagatgaacgcaatgcagacaacaacaatagcaatactaatgctgatgataccaccaacaaccatggttcttgccccattcatgaccacttagatcaagcgtacaatgtcaacatcattcaccaagatatcgacgatagtatcaatgaaggcacccagaatgacaaccttagcaatttcgacactgagaaagactccaatggtgatagcaataatggcaccactgatgccgatgttagcaaggatttccaaccaccaattccaactcctaatcagaacgatcgttcccagacggacaactcagcaaagaagacgttgatttgttacaactgcaaagaaccaggtcatttctctagagattgtccacagccgaagcgtaacctgcgccatcactccggccattatgcaagaagaagacaggtcactcgtcttgtggtcactggagcaaacgccgtacctgtgaggcctcatattaattctaacccatagaggaaacaatgtaccgatgttaagcaccttccctttttgtttaagacagtgccttgtattcatgtaatatgggagaaattggtaataaaaacaagttctaagaggattcttttggaagatgcggatatgtgatcatgtgtataattgtttactgacaaaggagacctagggtatcgcgccagaggaactatattctaacctcgagctaataaccaacctgaggatggaaaagaaaaatcaagtgattaaccaaagagacatttgtttggactaagggttacagatgagtccttttcggatcaaaggcaacgacagttagtatagctttcggcaaaacacttcaaggtttcactgaaaggcagcaagccaaaggacctcatcgtcaccagaagcatccacaactctcggagtgaagagtacctggtggacaaagtttaagaggtgattgatagaagataccagcaaaggtgtttattatcgaaccaagaagtaggtcgaaaggtgattgataagagaaatctaaaaagaatacgtcagggctgaatgtgtaaaggaatactttgaatgctaaatgatgacaagcatggtatcttagtaatgacgagctgatctcgacgcatgacatgaagtgggtaacttgtatgaggttgacgccaaagatatgaattatgagaagttctggaacgaaagtcccatcttcaagtgccataatccagtcgaagtcaactagaggtacaaccagggaaaagtcaggtgaagagaagattccatctgcaacaggagattgagccaagcagtccagagtggagaagttttgctaggcaagtttgttatagaagacggagcggaagaagtcagacaagaagagaagaccgcccaacctatcttcttgctagcctcctcgaatctcggggacgagattcttgtaaggggggtggatttgtcacgtcctgataaattcatcccgaaataaaattcattcgctaaaaggaataatagaattaattaaaattcgaaaagaaattggcaaacactaaaatacgtgcaagaaaaattccaatgtggcccggagaatttttgttaaattctccttggtctaaaaagagccctcaaattttacttgaattttcagagcaccggaaataattattaagcaacaacaaccttgatcaaagtttattaaaaagaaaaactaaaaatccctcctcttcctcctttgggccaagcccagcccgaagtccttccctcctccctctctttctctccctctccttctctccctcctcttgggcctcctcccctctcggcccagctcccttccccccctccttcctcccggcctgcctcggcccagccgcccagcccaagccgcctacccctcccccccccctcctgggccggccgcccggcccaactcgagcggcgccctcccgcccgagcgcgcacgtgcgcgcgctgaccgcgcgccccgcgtggggcccacgcgtcaggccgccgtcgccttcttcctccagccgccgcccggcttccctctccccgtgcgaaccctagcgccaatcctccctcaaatccgcttgattcactcggttaattccaaaattaattagggggaattaatcccctttccctcctcttcaattcccccttaatttccccttgaatggtgcccccaatcgccgggaacggccgcgccaagtccggccgccttcctttgccgccggccgccattcccgtcgccgttcccgctcctcccgtggccggctctctcccccatcctataaaatgggatcctcatccttcgttctatcgttttagccccttcccgagcctccccgtggtcgtatcacctctccccgccttctccttctccctctccgacgccggccggcctccagccacctctccctcctcaccggagcatcgtccggccgtgccgtcgcctccctcggctctgcaacaccgtccccttcaccggccttaccgtctcctcgccggaaactcgccggaacggtgcccccgccggcaaccagtggcattggtgccactgtactccctccagccggctgctgttcatcgccggtgcgccgatcgacgccgccgtctcctccttcgacaccgcggcatcgccttcttccccggcatcacctcctcctcgcccgaatttcgccggaacgccgtcggccgcgccggccttaccttccttctcgtcgacatcttctccggctggcccggtcgccgcgccagagcgtcggccgacgtcgccgtcttctccctcggcgacgccgcattggcctccaccccggactgccctcggtttcgccggaacgtcggccgcgaacctcttcgtccgcctcgccggagttgttcggccggccgtccctcctcgccgtgtaccggtcgggcaccttcaccaccatcttcggcatcgcagtcgcgacgtcgtcctcggcctccccttccctttgaacgaaccccgccggtgttcg

SEQ ID NO: 5099 - DNA, 43437 bp, Oryza sativa
  unsure (1)..(43437): unsure at all n locations
tgtcttaaacaaaaagggaaggtgcttaacatcggtacattgtttcctctatgggttagaattaatatgaggcctcacaggtacggcgtttgctccagtgaccacaagacgagtgacctgtcttcttcttgcataatggccggagtgatggcgcaggttacgcttcggctgtggacaatctctagagaaatgacctggttctttgcagttgtaacaaatcaacgtcttctttgctaagttgtccgtctgggaacgatcgttctgattaggagttggaattggtggttggaaatccttgctaacatcggcatcagcggtgccattattgctatcaccattggagtctttctcagtgtcgaaattgctaaggttgtcattctgggtgccttcattgatactatcgtcgatatcttggtgaatgatgttgacattgcacgcttgatctaagtggtcatgaatggggcaagaaccatggttgttggtggtatcatcagcattagtattgctattgttgttgtctgcattgcgttcatcttcttggggcaggaactctggatacacaacagaagatccggtgatctgaagtggctcagtgcgctgtctttggttaccacctggaaatactgggttgttaaccatccttctcttgcaattcgtcatccgattatgctcactttcgagttgcatggctttgtccacaagtttctcaaaatcttcataatcctctagaagtagttgcactgcgagctcatcttttaacccctggagaaacttctcttgtttgtcttcgcccgtttccacatcttctggtgcatagtgagccaaacgatagaacccgtgcaggtactctgcgacggtcaaatctccttgcttcaggtagcgaaactctcgttttcttagtgtgatcattcccgagggaacatgtgatctcctgaatacagatgaaaactcgttccaggtggtggtatgtccttctggctgtgatgcttcgtagttatcccaccactctgaagccggtccaaccagctgatgagttgcgaagccaacccgctcctggtcggtgcactgaatcaaccctagcttcttctcgatggtgcgcaaccactcactggcttccataggatcgacggcaatggcaaaggttggaggctcagttttgagaaattctgataacttgcactgttgctggactgtaggcacttgaacgttggttgcccctgctgggttgttccaattctgtaatagttgaaaggctgttgccaacatgttggtttggttaaccacaacttggattagctctggtgaggttgcgttggtgcttctctcattcccattggcttgggttcttgagtcatcggatccatcattcccatagccttggttaccaggattatccatctgtcacaaggtagaggttgagaggggaagcatacaaggaaagaatagaccagaactagggacaagaccttaaaggaactaactcttttcaatgatgtgttgtttgtttcacttattctgcaagttgattaagcaaacaacctagcatggttacatcacaacccactgatgcaaaccacgcgctacacacacaagcaaggaaacacacgacaaacgaaacactagagggtggcttaggttctgcgacgggttctcgaagatcttcactcctgcttcacatctggcttcactgcttcctccacttcgctagcggatcctgcagtcttccggagcttcggcaaacaactggcgatgtcctcttcttcactgacctgaccatctagtactagttgaaatccgaagaaggaagaagggagtaaaccttttgcaaatagcattaggggaaggagaaaaaggaactttcgcaaataatttttatttataaaatatgtccttgggttttatccacttggcttatcctacagtcgagatggctctgataccagcttgtcgcgaccgggaaaattgccttttcccgaacgctagtgtattaatccccgtcccaggaaaagccggggtacaccatacaaacatgatataaaagacacatctttattatatcgataatatttacattattacaaaggcacttcaggcctgacaagcaaaaataaacagcagcggactagcggcctacggctccatcttcacaggcgctcaactggggtataagccaagactccacctaagacttcttctccaaagcttctcttactgaaggggggagaaagatagagcaagaatgagtacaaccacagtactcagcaagccacaccggaggtgcatgattaatgcaagggaagtacaagggaataataatatagggattaagttttgcagtaaaccgcatttaaaaatcacttagttgcccaaagccattttgtaaagacgatcctagagctacacagtgttattaaacaaggccgtgaaccctcacgaacctgccttaacccaaggcctacgatgatttggaccgaactggcaacccgaccctgggtcccagctcgtcccaagccaacccaggccaaccattccatattttagttgttgagcaaattttaagaattaaaacactgacttgggtacattgctcggcttgcccatatccgagggctcggctattcgaatagatttactctgatcagaggtgtacatctttacccacaagacacatctttactccgcattccatggccttggaacccgtcgtaaagatgtgacatagtttccaacccatcctagccttagacaagagtaccgacccaatcctacctacggccgggatacccgggacaggcaggcagaactgagcccctagcattgggcaccaaccctccgccgtatgacatctcgactaccgggccgcagctcgtgtagccttcatttgccctggagaatgtccatcgacgcccgacttcatccatctccaatccgtgtacttttgtttatgactagactgagccacaaactaagccttacccattagacatgtggaagtacggtagtgctttgcaacagaggcccgagctttagtccttatagtggccggggtgctacttcccctaactggcatgcacccaaaccccaccgaaaacaggttttaggggttttgaaagagaaagagaggtgtatgtccaattccaccataatccaacaattccatagtgtccaaatgatatgagaattcccaaagtctaaaattataaaaccacctaatgttgcctaattaaacagcgaagcatctacctaaatttatactagtggaaccatgaatagagtacccactagttagggttttatttattctagggtgaacaaggtaataataataacaataacaataataaggtcataacaaaggtaattgggcatggctagataaaacagtgataacgcgggaatttaaataaagcggtaatgcaataatttaaatcaacataattttacaaactgggattcaatatgttcaaggatgatgtgacttgccttgctcagagagaacggctttccgaaccttcggcgacgaccacgaaccacgcttcgggaacctccggaacgacgaaagctacgcgaagcacacaagcaaagctacaagcctataaagaagcaataacaacacataaaaagaaagcacagggttctttaggttataacaaacattaggagacttgaacgggtcgattcagagttcgtatgaccaagatatgatcatccgaagtttaatgctgttatatggagatttgcggattattgtaattaggttttgcaactataaaacatgtgtaagcgctagcctggaaaagacaggaaggctgcgccgttgacatgcggaccccacatgtcaacctaaaggaccgcggtagaccgagtgcacagagacggtccacgggtcgacggaagcggatcccgtgtgtcaaccgaggcgagtggccaacaaacggactccactagacaccacacggcctgcacacgtggaaaccacgcggctaccgagcgggcacactaacacggacactacacggtcaccacccgcacacgtgaacgactaccgacaccggtacacgggtaccggggccgacaaccgcacaacgggcacgggcgacaccgaaaggacgaggacggggcagcgagggagagggaaccttaccaccacgcgacgaggcgtgggaacgacaacgacgaacgggcgcggcggagacagacgggcacaacggagacgaacggcgaggggacggcttcggcggcgatccttgggcgaaggcgagctgcggccggcacgaggcttgacgacgcggagccgaggacgaacacgaggacggggctgcagcggctcgcttgacgaacgcggacgacggacgagaacggctcgacggagggacgaacgccacgacgaccgggaacgacgagaggacgacgacgacgacgacgaccgggaccggcgaggaggcgacgaggacagccggcagcggctgcacggggacgaggacgacgaggaccacgccgctacgatgccgacgacggaggcggcgccgcgagacgacgagccgggcgagagggaacgggatgatgacgacgaacaccggcggggttcggtcgaaggggaggcgaggccgaggacgacgtcgcgactgcgatgccgaagatggtggtggaggtggccgaccggtacacggcgaggagggacgggcggccgaacaactccggcgaggcggacggagaggttcgcggcgacgttccggcgaaaccgagggcaggccggggtggagggcgatgcggcgtcgccgagggaggagacggcgacgtcggccgacgctctggcgcggcgaccggggcagccggaggagatgtcgacgaggaggaaggtgaggccggcgcgggcgacggcgttccggcgaaattcgggcgaggaggaggtgatgccggggaagaaggcgatgccgcggtgtcgaaggagaagacggcggcgtcgatcggcgcaccggcgatgaacagcagccggctggagggagtacagtggcaccaatgccactggttgccggcgggggcaccgttccggcgagtttccggcgaggagacggtaaggccggtgaaggggacggtgttgcagagccgagggaggcgacggcacggccggacgatgctccggtgaggagggagaggtggctggaggccggccggcgtcggagagggagaaggagaaggcggggagaggtgatacgaccacggggaggctcgggaaggggctaaaacgatagaacgaaggatgaggatcccattttataggatgggggagagagccggccacgggaggagcgggaacggcgacgggaatggcggccggcggcaaaggaaggcggccggacttggcgcggccgttcccggcgattgggggcaccattcaaggggaaattaagggggaattgaagaggagggaaaggggattaattccccctaattaattttggaattaaccgagtgaatcaagcggatttgagggaggattggcgctagggttcgcacggggagagggaagccgggcggcggctggaggaagaaggcgacggctgactgacgcgtgggccccacgcggggcgcgcggtcagcgcgcgcacgtgcgcgctcgggcggactggtgtttccgtctgcacggctggcctattatgccgccgctgttgggcgtctacgacttcaccgccggcctgcctccgtcgccgccgagtggtgcctccgcctacacggctggcctattatgccgccgctgttgggcgtctacgacttcaccgccggcctgcctccgtcgccgccgagtggtgcctccgcctacacggctggcctattatgccgccgctgttgggcgtctacgacttcaccgccggcctgcctccgtcgccgccgagtggtgcctccgcctacacggctggcctattatgccgccgctgttgggcgtctacgacttcaccgccggcctgcctccgtcgccgccgagtggtgcctccgcctacacggctggcctattatgccgccgctgttgggcgtctacgacttcaccgccggcctgcctccgtcgccgccgagtggtgcctccgcctatacggctggcctattatgccgccgctgttgggcgtctacgacttcaccgccggcctgcctccgtcgccgccgagtggtgcctccgcctacacggctggcctattatgccgccgttgttggatgtctacatcctcaccgttggctcaccttcgttgccgtcgactggtgtttccgcttacgcggctgacctattatgccgccattagtgggcatcttcgctttcaccgtcgaccgccttcgtcgccgccgactggtgtcttcattgttattgatggacgactttgttcccacattggccacttctgccatcaccaaggggaatattacaaagctaagtcatcatttattttattctttatatgatattttgccttttcctctgcctcactacaccaattggtcttccattgagtagtgagtcgggggctacagatgttatatcatattttttaaacaattttcataatatttatcttgattgcttgcgacatattctgagtacaaaagtgcctatcgagttatggagttccatcttcctatgctttccgtttggtttgccaatggatagttgcctttaggccgattcctagcacccgggggctcgttggatggaccgagtaacgcaaggtgctaagtattattcggaataaatcaaaagcatagagataagataatttattttctgctcttaataattgcaaaagtacccgagtagtaaactccgatccgtgaaactttgttccattaatgacgaactcatgtcactcatatgcatgtttgggaagtgcttaggccgactcccagtgcttggtggctatgactagtcgggcagagtgtttaaacgtaatgagtcatctgcttggggaaatcaaaattaacaagagaagaaatacgtatttataaactgcttgattttttctcgagtattatatttatatcagatactactcatcctatatgtttgttctgcaggatccagatccagatatgcataaaagggattcatggctttaagcttatctcttacgctccaggaatggatcagtcagaacatcaccaccggctcgcctcgaccgccgccgactggtgtttccgcctgcacggctggcctattatgccaccgttgttgggcgtctacgtcttcaccgaccggcttgccttcgccgccgccgactggtgtttccgcctgcacggctggcctttatgccgccgttgttgggcgtctacgtcttcaccgaccggccgcctcgtccgccgccgactggtgcttccgcctgcacggctgacttattatgccgccgttgttggtcgtctacgtcttcaccgaccggctgcctcgaccgccgccgactggtgtttccgcctgcacggctgacttattatgccgccgttgttgggcgtctacgtcttcaccgaccggctgcctcgaccgccgccgactggtgtttccgcctgcacggctgacttattatgccgccgttgttgggcgtctacgtcttcaccgaccggctgcctcgaccgccgccgactggtgtttccgcctgcacggctgacttattatgccgccgttgttgggcgtctacgtcttcaccgaccggctgcctcgaccgccgccgactggtgtttccgcctgcacggctggcctattatgctgccgttgttaggcgtctacgtcttcaccgaccggccgccgcatccgccgctgactggtgtcaccgcctgcacggctggcctgttataacgccaactgatgctatcttcttcacggctggctacatcgctgtcactactaataggcatcagtatcttcaatacaagctgcctacgtttgccatggctgccgactggtttcttcacttccatggctgcatgattctgccagtgttgattggccttaccatcttcatcgccggtcgtctcgtctgctgctgactagtgccctcgcctctacatttggtttatacagctaccactactgatggacatcatcgtcttccgccgccaactcgtgttatgccgccgccgactagtgcttttatcttcacaactgcgcgtcttcactaccggtttgcttctgttgccgacgactcgtgttcacttcatcacggcaatgcaactttgtcatcatggtagagcgacttcatctttattatcttcggcactggcaaactctattgctgctacttcgcaagttttgctacttcaccaaccacgacgtctttgtgagcctcgacatctcggcatgcgatgccatgttattttactacaacaagaggctctccaatattcaggatttctacttggacatcttcaacacatatcttcaatcaagcaatgactactcgacgacaagaagctataattctcgactctatgttcagttgtttcccaactaaccaaagagtcgggggctacacaaatataaggctcaaaatttgacaaattttatataagccaatgagtcaactccaggagtcattatcttcatctttgcttcggaacagacattctacttcaacaacttcaaatatttcggtttggacgagttggacaacaacatcaactctcctccaagtgaagcatctacaacagctataacattaatttgatggattattgtcactgacatcatcaccagcacctctgcttcatcgaccctgacatctctgctgttgctaatggatgattatgttttcgccgacttattatttcaccttcacggttgacctactatgcaaatgctgatgagcgtctttgtcattatcattggttgctacactgctattggctggatcaccgacatcgtcatcttcatcatgtcggttgcgtttgtcgttgtcaactacacaactttatcgctgagcgccttcatattcattgctggctgacctgactgccgccgactggtttcttcgccttcatggctatgcgacttcagtacttttgattggtatcactatcttcactaccaccaatatttttgccacctctggtgggcaatattctctctatattggttatcttgtctctatgccaactgcgtcagctaccatcaatagacaattgtgactacgacataaggacaagctatatgctcaggggcttactagttcaaacacaagtattatgtctccaatttggacttgttccggatacatgcaacatgaatttatgatcatgggtctattttctatgctcaaagactggactatttattattccccgtaagggttatcaaccgaatacttgcgccagtcgggattcaatttttatatctattttggagtatcccataagggataatcactcagatcacatggtctatatcacccgggagcatgttacatgcgtcatcctttaaagggtatcgaaggcatattttttggccaaggcctaatatgtctgcagcccatattttcaggtgtggcctgtcatgttcttttagggacttaggcactttttgcttaggccaaagtgcgcgtgatcaagtgcccaataccttaaaatccttttataccgcagttactcaactttttaggagttggtacaatgcatcttaaaaggtgtcaaacagtaaagctttatatagctgccccgctgactttttaatatagtcatggtgctgtttgggtttttaagcaattgattggatacaatatcgttgctttttgccacgtaagtgtgcatttttattgaccaatattatggcttaggctgattatatattgtggtcatttttcaggcggttggtaaatcctttatgagtttatttactcggattttataccacatatgccatatatttccaggtgtggtggaaccatgtgtcttcaaggtccttaagcacatctgttcaaccagtgtgcgcatggggtatgcccaacactttggaaatttctttattcacaacatacaagctttttatagctgttttgctatgtgaattttcaataatgtagccaactttaggttacactcatcatattttacaaagcagtcggtatatcactcggatcatgttattcagggatttacaccgcatatgctacatattaatatcaagtcgcttagttaactataattatcgaagccactcggttggttggattatttattccttgactatatgcttggtttgttcacttaaccgcatagtcgagggctacacctattaggtgcatctagtcgatgcacctgactttatttttcagccctccacagtcttcagatttggtaaaagtactcgggagaccatggcaaagatgattgaagtactcggctttggagtaatctggttcgagagaagattatcttttcgactgtgaaggtctcaggggctactgtggagattatgggtaccctatacccacacggcatggttatccgactagttataggggataacttatatgtatggaatatgtaacagatcatgacttgggtattacgtttccttatatattacggaacagcctaaagtcctggtttgataatattgtaaagtagatttaggaaaccgataccgtattggttaaggtttctatcttgtaatcctgccccccaccctatataaggtgggcaggaggccctctagggggcatgagcacatatgatcgtcagatcaatacacactcggcggattcaaatccccaaacaggagtagggtattacctctcattgagagggcctgaacctgtctaaatcctttgtctccacatccatccacttttaggtctcgtgcgctaccccgttttattattgccgaattcatgtttcgacaatttctatggtgtctacggttgtttgggaagtacgccggccacgtatagtgattgaaattatggtagtattgtttgctgctggccagtttctatgtgctgaagttctaggaatgcgcctacgcatcaacagtcggctacgccgtcagatatcgctgtggagcctagtggttgcactctttattacttgctttctgtgtttacagagagcacaggagctcatagctggccatgtggatattgtacggtttgctccttgtggttgtgctcctagtgactattagcaggctgcagttcccaattataatcagccgagtacagggtgatttgggtcgcaaatacatattttggcgcccatttatcctactagcagctcggaaagttccaagaaaaaggtatgagcaaaccagtggcaaatccaaaaaagacaaaggaactggtacaattttcaatgatgccagcagtgatggctctgatgatgaattgggcatcggaagtgaaaaggctgccattgaaacttcttcagatgatgcatcctcatcagctgactcaggtgggaacctcattgaaatagtatcactgaacatgctacttaccagtattctctccgattgcatttgcactttgttttgcatatgtttaaccgtggaataaaaaactatgccctctttgtttatctcttatacttcttctggaaaataccctgttctatgcaaaatgcaaaagcgatgaattaaaagaaagttaacgaagacttgattattgagagaactgatcatacaacagctagtgttgcaatttattttcgtacgttcacttggaattcctgtgttgatatttctttggctagtattatgttctatgtatcttcagaatatcatttaatatttgtaatgctggtttagtgctatggtgattacgatatggaatgtcaggagcaatgtactctttgtttagagcagacttttcatgatatatgccttgggattctgattcagtgtgattaattatgaaatattttctaacagtgcatctgatatgctacctagcttgcttatgaaagtgatctaattgatgtgacaggtatttcatctgcagcccatgatagtggcgagcctgatgacgatggcaatgcatcactgtaagttctctaatttacaaagagaatggtctggtgtaggaattacgtttccttcgattttgtttatgtactccctccgtcccaaaaaaagtgaatctaggactagatgtgatatattatagtacaacgaatctggacaaatgtatggattcatagtactaggatgtgtcacatccagtactatgttggttttttatgtgacagagggagtaatgtagatgagcaggtacagatattgtatggtactgaatgttgatgatcgtcaacaaattgaaactttaggatttgctgctccaatgaggtgcacactggtttaggatctttcgctattgtctcagtgacatgtgggcctacattgagtggcaaatcgttctttggtgatgcaaatttcaaaacgtttttcacattatcaatagcgatttccaaaatttattagaatcacctaatatatctgtcatgagaatcacttagaagaacaaggctacccttctggtcttttggtctagttgaagaccgctgacacgttttctttttatttcttaccatttgttcagatcacagaaatctcgcaaaggggggcttggctccatcctcagaggctcttgtagttacaagaaggcaaagcagaaacaagccgtgcaattggatgacaccgaggttcctgatagccagccaatggacattttctgagactgaacttgatacttgaaagaagaaacacggacagctttggttttccattattttcatccacctgatagcatgccctggagtttgagcattgcatattagtatcccaaccagccttgataccatgtagtgggaagaaaaatgcacttggctgattctcatgttaccacatggcttttctgctccttgaactaaacaagcgctgcgatctcagctggaatgtaatcactatctggtggattgtcctcaatcagagattccactgatttttttatgaggcggtgtgcaactcttccaaaaaggataaatgtagcattggagctggcatcaccgccgatgagcactactttatatctacatgggtaatatacatgtgtatattaatgtgtgcagcacaattagaagcatggaaaaatctggaatgaggtgtggtatgaaccttggatctggtattcctatgttagaacagcttgagcatttgtagctagaaccgtatggcttataagttctatagcataatcggcatgaattgtaccaccaggaattttcgctgcatatcctcctaacagtgacattgacaatgaaacgtgtactctgaaaaagcaaagaacagaaatgatatcactattattgaaagtgagaaaatgtgcagcgatgtattgaacaaaaaactggcaaggaggtaccctgttcttgtgaggattgagggcaagtatttcttgaatagttttttcctctgcagtgtcctggttgtaacctgttgctgggttatcaacccagctcactggacgaaagtttgcactgaagctacatagttatatcacgttgaaagttaactaactgtttcacaaggagtgagaacacatcatggcaatggattataaacatgagttcaagtaggcagcctcacctctctttgagttctagcacttcaggaatatcaaggtttagataccatttgcacggcgaactaccagtcactgtaagacctgtatagcatgaaccaaataaaagcatagcgttagatggctagaataaacaacatagaagtgaaaatgcgtagtgaaaacgaacctaatcctgtgtaatctttgacaagtgtcccaacaaagacaataacttgggcctgagtttggccagcattgtatacactattagcgtcaaaagcatcagccctttctccccagagtgtaacaggcattgttgaattgctattgtttttccatgaatagaaaaaaggaaacagtgtgagtgtaatttaagaaagcagcggcgcactaagaatctatgcatgcataaaaggaaaaggtaaaaattgcaattaaacatagggatattcagtctgagcaaagacaccttgcatcacatatctgtattgttctttttaagctatcagcattccttgacttcggccgcacaacggttggcgaaccaacctcagtgatgacacccatgacatctggttgcatgccatataagcctaattaatgatgagatagtatggattattgatacaacaaatatagctgtgtagaagaatctcattaccaacatagaagatggtcttgtccactaaattggggatatcactgaatggtgtcaatgaaaaagttatgccagggaaatcagcagcgggctcaatgtattcttcaaatgttgtccatttactgaacacaatcattaggctattgtcgactggcctgtatgtcctattcgcatacctcacagtaaaggagtcaatatagtaaaccttttgttccttaagcaaaggcctcaggctgtcaattgcaggtggataaatctgagcgtgaatgctgtttccctgcatttttaaagtaaataatgttatcaagagagttggcactatagcctaataggcatcgatgaataaatgtcatagtcacatcattaccatctgatcgagcagcacaagatcagtgtggaaaatattgccactgccgttgagatcgcagaaatcccataacctagaaactcttgcaaggatccttgtgtttaagtctccacaggacagctgtgaaatgagcacatgtgccatcttggacctgcaatgagcatagaactattttagaatgggtaaaatggttggataagatataacagtcaaaagattgcttggcaggatactatacatgacaaaaggcaatatactatgtaccatacacatagtctatagtacttgaggctgaaagacatttattccaaaatatatgtacaaatttgggtattactgtggtcaaaaatttcaagcatcaagcggcggagccaatagtgcaatagtaacacatgcacattactctgctgaaaatacaacgaagtgatgaaaagcaaaaaaaaaagatataacgtgcgggaaatcaccgcttggactgtagcgctgagcacttcagagtaaactatattttttgtctgtgtaccacatgatccatcatcattttcaattaatatttttagccctgatcggcttgttactcttgaaatagcaacgtataattgcccatgtgtgaagacaggcttcctaagatatacgccaacccgctggagtgtttgaccttggcttttattgatggtcattgaatagcaaactcgaacagggaactgccttctctgcagtgtaaaaggccatttcatctttgtggtgccaagtgtgattcgaggtatgtaaacagtttcaccaatgtttgatccagtcagtattatacactgtaaaattctgtctcctaaaactgtgactaatagccttgttccattgcataacccaattgattgattaagatttcgtagcaacattacgacaacaccttctttaagaacaagtttatgcgttggaaagttagtagcatttattgaattcagaaactctggggggtataacagatcgaaatctggaatttgctcagagctttttgatatggtatcacagcttaggtatactctagaatctcctggcactaaaccaataatataatcgtttatttcatcaaccgttgtattagtaggacaaacaattgcacgagaagccagatattcaatgtctctgtagcacgtaaggaaatctgagtaaacctcatgaacaatagcagctattttgtcaccgctagtcataacaagtaagtcatcgggaattgtgatccatgcaggataattctcaccttcctttgctgtcataggtaaagtgccattgcctatagctaaaacccattgactaaaatcatgcaattcttttttttgattgtctggtaacattggattgagtaatctcatgtttatattcaggctgagtagcgctacatgtttccatagttctgagtttgtgatagatgcattgattatagcctgacgggatcctttaggaataactgggagtatttgtttgaaatcaccacctaggacaataggctttcctccaaaaggtacaatagaatttgaagggcatgtctctgataaaatatctcgtaacgttcgatctaatgcttcaaagcatcgcctatgtgtcattggagcctcatcccatatgatcaatgcagtttcagctaaaagctcagcaagcattgtgcctcgttttatattacagatgcttgtttcatcaatgtcaattggtattttaaaccgagaatgagctgtcctacctctaggcaataggagagatgctacccctgatgaagcgacagcaagaacaatcttgttttgtgatctaagtttcgcaattattgtattccagagaaatgtcttgccagttccaccatgaccagacacaaaaaagaaaccaggttcattagcgatagcacgagaacaaatagtgctaaaaacagttatctggtcattattcaactgctgtacgaaagagtctgcatgcatagcaagcataagtgggtcaattgtgatttcttcatcgattaatctattagtaccaagaacatgtggaacagatgatggatgtggcaggttaaaatctttgatattaccaccgctatttgcaaatacagcaataagctcatgtagtagcatgttaagcaagtggtcatgtggaatcacacagtgtggattgtcaagggccttttttagcctgttatgtatgtcatcagtcatgtatagccagtatttatcaaacaatgaacgaacatcaccaacagaacagtaaagaaggactgtcacaaaaagttgtctaagctgcgctgaagacgcagtcactatggcctcatcaaaaaggagatgccattcattatctccttcaagaagccctcgtgcctcacatgcctctctatacgtgccataaacaacaccatcgtatgtgcgaacatcagcatagctttgagcacctttgacaatcattaacaacatcctaagatagtaaagctcgcccgcagttggatgcacataatatattctgccaattttaggagcaggtgttcgctcgtgccaagttttagatgatggctcccatgtccattccttaggaaactcacagtatgtcaatgaatgggccttagaattttttttgttagtttcaaaccattcagtaagcatagaccgttttgcaccaggactctcaaggactgcccgtaggtcagctcccttctcgtatctcacaaagtttttcccaggcagatggacaaccaatcgctcaacaggtggcactctataatgtatatcaaattcaaataatcgatgaagtgcctcataggttgagagaaatcttgcatccatgtattctaatatttcattgcgtggagcaaggtcatgatttggtgatgcattttgtgtttttcctgttgtttcaaaatagatcctagctcggtcatggccttttgtaatatatttaaataaatactttatcaaatttgatttgttacaccactcaacatttatgtgtgcctcatattttttcagtaaagccatgttgtagggtacaactgatctattgtctaaaaggatcccattcttcatgatagatcgtccatcatttcttcgtctatagattgtaaacccagattcatcaacaatggtttcatcttggaaatctttaggataatgttttgaacatttatcgtttttcatacaaggacacttcttgttcgcatcactgcaaggaccatgcatcataaactcgctaaccaattcatatcctagccggtcggtgtcatagtcaggtatctcagcacagataaacccatctattatagaggctgagacatcggcagtggcagcagcaagccaaactaagcaatgtatgtgtggaaggccacgcttctggaattcaacagtgtacaacactgtaatcattaagaacaaaggttgatgagtgccacaccaatggccttaatacgctataaactaacaaaattgtgaccatacctgcaagaactttaccaaaagttctgccttccctaatatcagttataaattcattaactttcatgttaaacacacgcacaataatatcagctctatcagatggttgttggccaggctcaaatcgaatcgcatctgcaatttcttgccatttggaatgacatgtgtatgtgacaaaaaggtcaggaggcccatagacacgacatattgccattgcatcttgataattcatgaccatatatcttcttcctccagtgaagctagcaggaagtatgacacgcttgccaactgaatctccatcagtgacacctttatcaatcgcatcaacaattccatctacagactcagagcgcaactctttttgatgatcgatgaagtattgtagcctatttgtttcaatagtagaaaatatatcaacatcgatttgatcgctcaagcgaccatagcatgtgaaaggatttggttcatttagtctgtaatgcatttcatatctataatattccggcatcgtgacatactttttgccaattccatcatagttactgtatttaatgcctaaatggaatccgcgttcaccatatggaaacaacaaaggatattgcaatgccatataagatggatgcaagggagaaatctggcacaggccacgacctttatcgtagacaagcacatcaaatttgtattctttcgcagaaaaatcacctactataatagcagctatttcactgttcgttggtaaattgtattgcacatcgtcttttgcattgcaacctaaaaggcgaagtgtcacttgctgattgccatgctgaataacacgttctctagcatacctaaagctctggacaagagtattttcagcatcaagcatcgatgatagggcacgaattatctcaggatctgctttatctgaattatcaccgtcgttttcaaatatatttaatcggttttgtaattcattttctggatcatacacatataattgcgcaaatttgggaggtgagccacaggatggcacaagagtaccaatcctatggtgcacaactccattgatcttgaatacataaggtgcatttccagtgttaatcgatttatcaatagctgcacccattgagctgaaagcaaacatcgaattatacgatcgtatttgcctcaaaaaatttttcgaacgtgcatcaccattatagttcaataatgatgctagtggctcaggaggggcacgcagttttggcaattgtatgcgtcctcctttgcaacatagattgtaaattatttttctttttgaaatagcagatgcactcttgaccctctcctggtaccagaacatggcaccacaatacgggcattcatacgtcggagggccatagtatgatctgtctgggtatgatgctgccacaaaagcgctggacaatgtcaaaaatagtctcgtgtaaaaaaacaatgcattacgtgcacgtattcagaacagcggccgaaccctttagcaatcggatatactccttgtctgtccgggaggaactaccgttggctcgtgcagtgtgatttgctgcgaacaaagacagtaaaacagcctatgaacctaaactgcacgaaaaaaaacaagcctaccatcacagacaacaaaaagagcataccatccacattggccaaaggaacggacggatccatctttgaacgcaggagggaacgcctttgcctatttaactttgccagctgaggtgcaaaatccatcaacgaacatttcctcttgcaccgactttcctgatggggctgccctagcggaacgatagcatgttctatatgcattgcactctgttgggacagaacatttgtggcccttctctgccggctggcacgtaccctacgcactctatccatagcatgcgtttctaactgccatcataattttacagaggcaagaaaagaatgaagcaaagaacacgggcaaaaaaagtggctcaaaccacacagatacagtgaacgaacaatataaaacgaccgaaagctctggagcaaccacatgcagatttagacagcgatgaatgcaggcaatagaaacaaaatactaaaccaatgaaccataaataaaggacagaaagattaatagcgcgggaatacctttagcaaggaatatgctcgtcgacaggcagaatccactaaaacgcaccacgaagcgaacacacaagctgtgaacagaggcaaggaagaagacggaacagagctgcagagaacggagcatgatcagtgaataagaatgtaggaagcaaagcataacacaaggccaatgaaaccagcaacaaccaaaagtacctgctaggtcttagaagcagcccgcacacgtgcaatggaagatgatcaggaacctttaaaggtccattgcagcccatgcagattgcctcccctaaatggaacaaaaggtgcagggtcaatgctaccaagaacagccgcgcagtcataagcaaacaaacaagagagaacaaacataaaacccaaatgacagaacggacaggagaaccacacgcattgatccaggccttaccacgccataacgaaaagttgaacaggagcaaaacgagtgggagtttctcgagcaaggaacagaacaatggagcgaagaaaccgacgagaggaggagaaaccgaagggaagaaagaaagagaaacgcaagtagtaatatatacagacaaagatagaaggggttctccgccgagctgcagcaaggaagcaaacaatcatgtacacctgcacaccaaacacccacaaataggaaccaaacaaatggctagctgagatgacactgccccacctatcagcgatataagtgcagcgcacctagctacaacccaagaaaacctgaccagagagactaacagcataggctgcagaagaagaagactgcatggaccaagacgaatgaaccaagcatccaagcggattggacatggcccaggacgcagaggaacggggcgcatacaccaggaccacagcgatgcctgatatcgacaacccacgcaaacgcaccaatagcggagaagccatcacagagtaatcccactacaggcgcggtctccaacagcatatggtcctagaccgtaacacacaggttcagaataaagcagacccaccggccagagagaaactgtgccatggacacagcgcacacgcgcaccaagcgaccaaagcaatctgacacagcagctaaggcaaacagcatagacctgttccacgttaggtacgaacaggcagaggccatgcggcccacacggcagccacaggcaatctgtggaccatggctacctcaaaaaacaaagaaatgcaccacgcaacgcataacaccggagaaaacaatggcaaggacgcccaccctaccctgcgcgcggtgcaatgcaccgcacacaaaccaaccaaatgaggccaccacacagggaacaacacgtggcggacgcaacgcagagaaccagcggacgagaaaaaggaaaatgtggcatgccaaacgcaccgacgcacgatggtcatccaacggcggagaacgcgcgcaacgaccgcgctccaaatccacccctgggctccggctggatgacgtgccaagcaacggcaagggccacgacagcgtaaatcgccgcccagagcagccatttccggcgggtttgtatatagaagatgctcgtgcatgctcgctgcaattgtgatgccgatgttcatgattgagaaaatatatcgatatgcgataatgtttgtcgacatagaagccttggccattgtgtcattcggcaacttacagattccagcagcaatcgcgcatgtcgagctcgcagggttgcgccttaatccaaagggctacgacggccaaggtggcaccccacatcttgtcccatctctaaaaatcttctatggaatggtgattagccagggaataccttacattgtagccggcatactggaggtcttctcgttcatccctcagagagccctcatccgaaatggtggatttacaggtcagtggggagtagaatctgtcaatctgtactacgcatacgcctacgacaaatacatggaaggaggtttgtttgcatcaaagaggatcagcctcagcaactttgccattgattctctaaattcggacctgtccaagaatcagctgtatgggatacggatgatgcatatatttctgcagagagatctgaccagggcaaggctgctggagaaactcaccagttcaacacagacgatggccaggttaatcagcatgttggactggagtagtagaaaccattgtacagctatcaggttatatgctgccaaggtcactgccaagcttgcaaagaacctccgagttgtaaccgtccctggaacattgcagcttgtatctacgctcctggatgctgatggaaagccgaaaagaggacacccactcctagttgaagatgatgatcaagatcattttgttgatatattagatagacaagataaaaaaacatgatatagctggtgaccaagagccgactgaggacatcgataacctgttggaagcaccaacccgatcaatgcacatcaacgaccaaagatacatacctagaatttggcagaggatactggagtactggtcgattcccaaggagcagccattgacagacgatgatctcctccctgcactaggcatgtcaatcatatatagccttgctgaatgtgatcaaaataactgcgtggaaatcgacaaagtaactgacctgatccccaaaatcattggattcacaagctttagaagtgcaatggtaaattctgaagcacaacagaaggttctcttaaagtcatcactaaaggtgcttcagagactcacaagcattgaaggggaaattggcataacactgcggtacaagatatcaaaacatcccttcttattgagaaaccttgcagagatcttgggagacagcagcagcaacaaccaagaactgaggaggctcatggcaggaatcctcagaaaccttgcaattgacaaagacacaaggcaggagattggacaaatgaaaatgctcattaccaggctgatgaaggcattcctcgattctaacggatcatttagttcaaatgttgattgcttgctgccaaaggtcgctgggcaagcactggtaatgctgtcatcagaaaattcgcataactgcttcgttatgttgaaggaactagatttcgttaataaactaaaaaatatgatcctaatccatgatgataaatacatatatgttgcagcaagtctgttgcgtaatatgtgcttgcacgctcaacatgagctcacagaatcagacctaaaggaactatctcacaccttacgagaggtgagccctgctaatacaaactacgagtgcaacatagatgtgtatagcatgccatatcatttttgcattctctgtctattaatttttgtcatttttggtaaaaagaaggggggatttatttaccaatgaactatataagtataactatagtttgtacagctatatttatcatgctacatgacattgctggttccactacaggtgttggaaagaataatagacgctgaaggggcagaactagaaatcctcattggccttagttcacagatatgcaaactcattcctgaagaatttgcccaagagctagaacacgggcagattaagcggagattcattaagaggctagtggacgcactgaatgcaaacatgaaacaaaatgctcattgccctgggatcaggagggtgatacttgagcaatccatatacatgatggagtgcaattctcgcaatgccaagtgtttcaatgaattccggatgatggattcagtgtcgatggtcgaagagacaccctcaagggctgagaagtacatgtttttcttgggtgacatgggcttcatggaatgcaagacagctctctctgctctcgtggacagagcaaaagaactgatcagtcgccagtggctgcatgacatcaacagtgccaactgaagaaagttgtaagatgattttgcatttcagtcaaacgatcatgtcatcatgtatattgttagtacagggtaaaaaagttattgtgcatatgacctttctagaaagaacatagattttccttcgagatgagaaaggctatttgtatctgtgcctcattagtcattagtcctgcactgtaatctaggagtatttgctactgccaattatcatttgttggagtggacaatgcttaattgattaaagatgcttaaggtgattgcaattcctacacaatgtattagtgtgttctagtcttggcatcgattattttcaaaaaaaatgttgtttattcgactcctgaaaattgggtttcctgccctggtaattagtcccattcaacacaagatagtactctgtagtgttagcattgctttgggatcacctaggttagatctagtcgggtagaacactttggatagacgaacagcaatagatggattaacaaagagggagtgagagggtttagggatgtgaccggtcgatgttgaggaggaagtgcggccagccatcatcgttgtcgtcgcgggcttgatgcgaacggcagcgacggtgtgcttgacggcaacggtggtcgtagcagtgggagtcgtggtcgacgatgaggcgtggcgtggcggtggggcgttcccgtcactggctgcgccccctctcgatcggattagggtttgtgggggtggagttgccgccggcnacgaacttcgtgtcttgtgccgatccgcctccacccctctttatatggcgcagggtgacgggggcccaccagccattgggctgggtgcccccgatcagggcgcgggtcaaggcctccttgagctgttgggctcaaggggagggagatctatctaacattctcccccttgatctcactatttcttttagcctttttctattccatcatagatttgcatatagagcatgtttcatcgtcacggttaatcaccgatggattcgacagccactatacacatctctattcagaaacagatactttaacttttgggccctatagtccaggattcataaggcttcccttaaacccatgcatgctgcatgttccttgaacacgttgggaggtaggcctttcgtgagcggatccgcgagtatcctttctgttctaatgtgctcgagactgattgtttgatcctggactttgtctttcacaacatagtactttatgtcaatgtgtttggcagcaccacttgactgattgttgtgagagtacattactgtgggttcgctatcgcagtataactttagtggtttctcaatactgtcaaccacctttaaaaccgggtatgaatttctttagccagttcacctgccccgttgcctcatagcatgctataaactcggcatacatagtagaccctgcagtgatagtctgttttgagcttttccatgaaatagctcctcctgccagggtgaacacatatcccgatgttgactttgtattatcttttgcaaagtcagaatcagaatacctcactatctggagcgattctgattttctgtaagacagcatgaggccttttgttccttgcaaataacgcaagactttctataccaatttccagtgctctgggcctggattactctgaaatctgccaagtaacccggtaacaaatgccaagtcaggtcgtgtgtacatttgcgcatcctgttggcttcctacaactgacgcatatggctttgtttttcatttcattgagctcatactgatttctaggacattgcgatgccccatacttttcgcctttgactataggagcaggtgtagcactgcatctgtacatgttgaatttcttcaacacattttctatatatgccttttgagaaagtcctaatgcatactttgttctatctcggtgaatctctatgcccaaaacatatgaagcctcaccgagatctttcatgtcaaagtttgaggacaagaatttctttgtttcctgcagtagactgacatcactactagccagtagaatgtcatccacatacagaattaggaaaatgaatctcccattcttaaactttgaataaatacagttgtcctcgatattctcttgaaacccaaatttctttattgtcccatcaaacttcaagtaccactgtctcaaagcttattctaatccataaatggatctctttagacggcatcccatattttcatttcctttcatgacgaaaccttttggttgtgccatgtatactttttcctccaaatctccatttagaaatgtcgtttttacatccatctgatgtaattctaaatcataatgtgccaccagtgccattataatcccgaaggaaactttacaagagactggagaaaatgtctcattgtaatcaatcccttctcttttgcgtgaagccttttgccacaagtcacgctttaaacttttctatattccctctagagtcatatttggttttgtagacccatttacagcctactgttttggctcctttaggaattttttctaaatcccagacaacatttaatttcattgatttaatttcatctttcatggcttccaaccattcagatgagcgggcgcttcttatggcctcttcatatgaggtgggatcattctgcatatgcgactcttctatattataaacttcatagtcatcatggatagccgatcttctgactctttcagaccttctaggggcctcctgttttggcacattatctgtttgaggctattgtagctcctcctctggtgtggcaataatttctgttgaatcctgtagaacaggttcctcactttctttcattgttgccacaggagagataacaataggtgttggtaccgcaacgtcatgcattgcaagcacaacatcagcaggtagagaggagaaggctcttgaatcgactgagcgggctcagacacccgcctctcgtcaagatcaatttctcgaactaccgagctccccctaatcatttcgtcttccaagaagacggcatgtcccgtttctacaaactttgtacaactgtttggacagtagaaacaatgaccctttgatctttcagaatagccaataaaatgacagcttactgttttgggatccaatttcccaagatttgggttaaatactttggcctctgtaggactcccccacacacggaggatccatagctcatacggtgttttgggcgctgatgcattctatgcattgtatgcattgttctaaaactgagaactccaatggaggaagaattacattcttaaccagtctctcaattctccccctcgaaatatggcctaaacgacagtgccataatttcgatgagacatcaggagttcgctttcttttcttgttttcttttgtcaacgaggacacaacattcacattctcaaaaagagataacaaataaagctaatcttgcaacacagcaagaccaatacatgcattattataccatagttcacatttgccatttccaaaatgacaatcatatccatcaaaatacaatttggatacacttatttctttgcaaagaagggacataaaaaacatctcgaagtaaaagtgtgaagccattcgtgagctctaggcgaagatctctaacagcttcaacttttgcttcaactccattggcaactctaatggatctttcgcttctttgcatagtcctcatcgaacggaatccctttaaacaattacacacatgaatagttgctccagaatcaatccaccatgtggatctagaataaccaatcataatgagattcatttacaaatgtaataatgttctcacctttctttgccatgatcactgtcacgaagtcaggacgatctttcttggaatgtcttgtcttcttgcagtggagacactgatcctgtctcaactgtgaactgttgttgctgaggcagatgctgaggctgttttgcttttgaggagggtgacctgtggctcttttccttgttatctttaacaaggttaattgagccaccaatggtctctttgattctttcctcctcttgcacacaattagagatgagctcttcaatattccatttctctggacttattttgtagttgacaacaaggttgacaaagtgctttggcaatgaggtcataaccagatgaaccagaaagtcatctgagatgcccaaatctttttgcttcaacttggaagccatgttgctcatcctaagaatgtggtcttttacaccacctctatggtacctttctgtcacaagctgctttatcagttgtgtcgcataaaactttgaagaaccagcaaactggctctttatactttcgaggtacttagagacggtgtcatactctgggattaagcccaatatggttggctcaatcgtgttctttaccgcagccaaacattccttgttggctaaggtccatttcgtatgcccaatgtcatacgacatgatgagggaagcattttccctctctctcttttgccattcagcatctgactctttttcacctctgaaaagttcagcaggttctataggacatggggtagtcaacacccagtccacctctcccaagataaaagcaaggtcgagttctcttttccattctttgtagttatctcctttcagggtcggaatatctttaatgtaacccatcaaggagtagtcacctgagataatcatgtattgtgagaacaaaattaacattaaaaatattatgtattaagtctacatcaccgttgggcagaaaatagacataacacataaagccataactataacattgcaatcatcaacgtgggtcagaaaattacaacatcatagcacataattaatgttcctaaaattaaattctcccgttggttcgaaatttaattttagaaacactaattttcatcaatatcatctatttgcagcggaagatctatattaaaatccataagaacagtaacaaaactatgttatttactctctgtaaaaattctcctgttggttcaaatttaaacagaggaaaaacatgtaaaaacaattcaaaattctattgtaatttgcatgaaaacatacaaaatacatgttcagaagcatttctcacatttatctattctctaaacaattttcacaatttacaaattgcttagaaataaaaacaatcattaaacatattgaaaatgattctgaatagggacatttattaaacttcttttccttcgccgagggacctaatatggacttttttggcctttgccggtcggcccacggtcgcctttaggcgcttgcggccatgccccctcccccaggccgcaacctaggcctgggccaggaaagccgccccccgcgcgcgccctcttgggctattttcggcccggccgccgccggccgtccgatcgctagggtttcgatcggacgaccgcgcggagagatcgggcaaaacaaaacctgacccccagtcgcctgcgccaaaaaccctagcttcttctcttctctctcatgcgaccgccgaaaccctagcacagcgccggcggcggcacggccccggcggcggcttaccgcgcggcggcggaacggcgacacggcagcgccgtcgcactccccctcgccggtgcgcgcactcactcaagggtgagtgcgctaccgtcgagcggctgtgccgcggcgccccctccttttctcttcgctttctctctcgggcgggctcggccgcgccgagcggtgtcgtcgacgcctcttttctcttctcccccatcgcgccaccagccccaccgagtgagagagagtagcggcgacgaaggagatggcggcgccgccgcgggccccctcgccggcgcgcgcgtgcacccgcgggtgcgcgcgcagccgtcgaggggctccttggcggtgcctctttgcccctcccccctccgttgtcggcgtcaacgacggccggcgacgaggtaagattagggttagggtttctcttttcaatccgttggatcgtttgcttttctttcttttgcttttctctttggatttccatccccgaaaacaagatccaaacgctagggttgctctgataccatttgttagcattgctttgggatcacctaggttagatctagtcgggtagaacactttggatagacgaacaacaatagatggattaacaaagagggagtgagagggtttagggatgtgaccggtcgatgttgaggaggaggaagtgcggccggccatcgtcgttgtcgtcgcgggcttgacgtggacggcggcgatggtgtgcttgacggcgacggtggtcgtagcagtgggagtcgtggtcgacgatgaggcgtggcgcggcggtggggcgttcccatcactggctgcgccccctctcgatctgattagggtttgtggggtggagttggcggcggtgacaaacttcgtgtcttgtgccgctctgcctccacccctctttatatggcgcagggtgatgggggcccaccagccattgggctgggcgcccccgatcagggcgtgggtcaaggcctccttgagccgttgggctcaaggggagggagatctatctaacatgtagcagcccagaactcacctactatggctaagaaattcagaccatgacaatgcgcaacttatgggttcagtgtttctatctctcgttttgtccaccgagcaaaaactttactcctaattaatgggtgctcaactgttatataatataagtcatgcgcccatgtcaatgcattatgcgtgccatggcccatggtgcctgaaattttgttgagcacagggttctcaaattcacgcccctcgtgtcgagaccaaagctgcggtgcattgggtttctgcaactcaccttgcaattaaccagtaataaactagtaatcgattccctaagcagaatagtcgattccagaataaccatgattctctccctttttttagtgcgactacaaccatgactaggactagaactggatcgggagggatgcaagcagggtgggcaagcgggctttttttgcccgcttatcccacttctagttcatttattcttctaaattttgaactaccatgcaagaaatacactagcaagcggatttttatgtgggtagcgggactacccacttgcatccctagatcgagttagcaaagcaacgaaaacaagggtttccttgccaagcaaagaggatccaagaaggattcggagggggataaggggggagagagcacccgtagaggaatggcctggatgggattctccctcgcctcgtcggttgctcttggtccggtcgtagagcctcgcctgccgtcaagccggcaccctagcgcttagctgatcgcctcgccgccatcgccggtcacctcgcgattactcggtcgagttgactagtcgagggcacccctcagttttctcggatcgtgcgaagtgaagttaggagatctcgggaagtagatgggctgatatgtaattggggcggttggtttatttctgaacagaaacagaaatatgtactttctctgtctcaaaatattactactacctagtatcttctgttcttaggtattgctatccaaaatattaaaagcttagcgataaacaaatcatgttgttacctaaaaattctatcttagatagcaatattttgagatagaggtggtagttggtgtggaggagccgaggaggtagttaagagtttccttcgctggctcgagctactctccgccaaacagccggatcagctgtttcgcatagccttcggatgttaccggctcccggccgctccggcacgtgccaagccaaacactccgagtccacgacattcgccctctgaccagtgacgaagctacatgtaatctgtatagtcagctaaccccataggtttttgcaaaatagataaaaaaaattgatatttgtgttgtaacaatagaaaacttaaaaaaatttatagctttgaccccgcaggtttttgctgctggcttcctcatgcatcaggctgtgaccttgccagttggcacccatcggtcgggctagggctgtcaacgagccgagctcgagcgagcttgcttgcctaggctcgagcttgtgtgacacaggctcgagccaagctcgaatcgagcctagtcctccttcgagcttttaagcaggctcagctcgagctcggttaggctcgcgagctcgatcaagtataagacaatgtatattttgatggcaaaattttgcaaaaaaaaataattttaattaacaatattgaaggaaaaaaaatgagaatctaagattaatatatgatgccaaaatacaattttcacacgaatatatactaatttatcctcgagctactaacttatcatataaaaagataaatatttcacacacagttaggctcgtgagaagctcgagctcggctcgacaaagctcgcgagcttgcagctaggctcgggttcggctcgttaagatctcgagctgagctcgaatcgagtctgagacgagccgagctcgagcaactcgcgagcctcgtgctttttttgacagccctacgtcaggcctcccacagggccgacatcacgtcaggtccatgtcgcgctcctcgtgttgctgagtttcccggcccaactgccaaacccgtgtgtcgcgatgaacgcacgttcacctcacgtcctacctccaagcattccatcccgagttcggatgcctccgacagacaagctgtgtttagattcaggggtgaaaagttttggcatgtcacatcggatatacggatatatatttgaagtattaaacgtagattaataataaaacaaattatagattccgtctataaactgcgagacgaatttattaagcctaattaatccgtcattagcaaatgtttactgtaacaccatattatcaaatcatggagcaattaggtttaaaagattcgtctctcaattcacacgcaatctgtataattagttattttttcgtttatatttaatactccatgcatatgtccaaacattcgatatgacagggtaaaaaattttgccgggggatgtaaacagggccaagaattcctgtcttttcggagacattgcctgattgactatgacacatgtgagtcgcgatgcgccggtgacaacctggccaaaaacaacaataaggggaatgagaaagaaggtgaaaccacatctgcacctgataaaaataacaggggagatgaggtcatgtcacccacatctacccaattgatctcactaatgtgccaataagccaattattaattagaaacttcgcactcgtgtcgattgtagctgaattgaccagcttcgtagagtcaatgttgcagctttgaattttttgtcaggccggcaatggagcaccgcccaggtttttctttttctttggacttcccagtgcccaccattgtttaaaattttggaacacagattgagttgcatcaccggcggtgcccaaggtctcttgttgaagcgcgtggtccggaaatgggggacatcgccggcgaagagcatcgagtccagatagcagccagagccagctccgaccggcaagacaaggtcgcggcgccggaaaaatgggtgaattgcttcgttcgcgtggtgacactgatggagaggacgagcaatgcactcggcacgctggctttcacttgggctaccgttgtcctgctaggtggctaccctgtggtgctcgactcgcatggcgatttttggttcgcgacagccatcgtattcctagaagccgcaaggtatatacagctacttatgtactgcccatctacacctgtttttgattttttgttctgcagtctaagttttcacttttctttgattacacaggatgttcggtcgcaacaatagatttgattaccaattgttcttccggacaagaggtgctttcagtttcagatcacttggcgggaacggactgatcgcgatcgtatacttttctgctgctaaggtggccattgttgttcgggaggtgcaggacggggcatttatgttgattataatcatggtattagtagtaatactacttacggttggcccattagtatctcgaggagctcgaagaccacgcacctgtagtctgctgctccgtgtgatatcgctatggagccccgtggttgcaatcctattgatgggttcctccatattccatatgtacggagacagttttgtcatgtggatagtgtacatagtgctccttgcggttgtgctcttggtgacggtcagcaggctgcggttctcaattattgtcaaccaagtgcgtcctgctttgggcagtaaacacgtattttggcgtcggtttattccttttttttttttttttttttttttggcaaccgtcggtttattcttaactcgtgcatgcttgctgcgatagtgatgatgcttttcatggttgatccagtccttcaactgttcaacacgtgatgatcttgctcgatttatgtggttttgccatactgtcatctggcaacttgcagattcctgcagctatcgtgcgcgaagagctcgcgaggatgcgccttacgcgacatgactacatcggtgttggtgagaagacaaatcttggccaatctcttaccatcctctacagcatggtgcttggccaaggcatactttacatcgttgccggcacgctggaggtcttctcgttcatcccactgagatccctcgtttgccgtgctggatttacaggtcagtggggagttgaatctatcaatctgtactacgaatatgccttcgacaaatacatggaaggaggtgtgtttgctccaaagaggatcaacctcagcaactttgcgatagattctataaactctgacttgtccaagaatcaactgtacgggatccagatgatgcacacttttctgcaaagagatccgacaagagcacaactcctggagaaactcaccacttcaatgcagacgaaggccaggttgatcaacatgttggactggactaatggaaaccaacatacaactattagattatatgctgcgaaggtcatggccgagttcgcaaagagcctccgaattgtaactgtccctgaggcaatgcagcttgtatcaacgcttctggataccgagggaagaccaaaaagaggacacccacttctaaatgcagatgatgatcaagatccttttgttgatccaacagaagaaagactagatgcagctggtgatcaagagcaaagacaagaattagttgcggacactgacaactagctggaaacgccaacccaatcagcacacagcaacgaccaagtatccatactcagaagttggcagaggatatcagagtattggtcaattcccaaggagcagccgctgacaaaggacgatcttctcccagcattgggcatgtcaattgtctacagtcttgctagttgtgatcaaaataactgtgtggaaatagacaaagtaactgacctgatccccaaaatcataggattcacaagcttcagaagtgcaatggtgaattccgtagcacaacagaaggttctcgtaaagtcatcactgagggtgctgtagaggctcacaagcattgaaggggaaattggcatagcattgcggtacaagatatcaaaacatcccttcctgttgggaaaccttgcggagatcttgggagacaacactagcatgcaagaattaaggaagctcgtcgcaggaatcctcagaaaccttgccattgaccgagacacaaggcaggagattgggcaaatgcaggtgctcattaccaggctgatgaaggcgtccctcaattctgatggaccatctagtacagatggtgattgcttgcttccgaaggttgctgggcaagcattggcaatgctggcatcagaaaatgtgcataactgcttggttatgttgaaggaaccagaattcattaataaactaaaaaatatgatcctaatccatgatgggaaatgtatatatgtggctgcgagcctgttgcgtaatctgtacctgcatgctcaagctcaacccgacctcacagaatcaaaccaaaatgacctatctgatgcctttcaaaaggtgagccctgctaatccatacttcaagtgtaatattagatatgtatagtatgttgtatcatttgtacatttgttgtctattaatgtttgtcaagacataattattttataatcaaaatggacatttatttaccactaaattgtataagtataattatagtttacaactatgttcatcatgctacatgacattgctggttccactacacaggtcttggaaacaataacggatgttgaaggggcagaattagaaatcctcattggtcttagttcacagatatgcaaagtcaaacctgaagaatttgtgcaagagctagagcacggacagattaagcgaagattcgtgaagaagctagtggatgcactgaatgcgaatatgaaaccaagtgttgattaccctgggatccggaggatgatacttgagcaaaccatatatatgatggagagcagttcttgctatgccaattgtttcaatgaatttcagatgatgaatgcactgctgatggtagaagagacgccctcaagggttgagaactacatgattttcttgggtgatacaggcttcatggaatgcaacacacctctctctgctctcgtggacagagcaaaacaattgattggacattagtggctgcaaggcatcagcagcgacaaataaataaattgtaagagatgaattcccattgacagttgcagtgaattattgaactgttattgcagttgaaatgctatgaatttataatttacgcatgttgtggcgatgacataaggaacagagaaaaaaaatggtggcattagaatcagaataccattcatattgttacttgtttttttttttttgccggaatgaccgaaggaggtcattcaatgcaattaagataggaagaaaatattacaagaaaagttttacatcgacagctggctgtcgaggaaggatgtgcactagagcacacgccccgaaccatgtgccaaccgtccaaacacacgctacagagagggaagccaagcaccgaaccggccatcgctatgcgagaccgatcgccaccgggccaacaacaccattatgacacgaagactctaaaacgacgccctcacaagggtcgcgacgccgaaagacgccgtcgtcatccgtccaaaaactggacaaggttttcacccagagttccttgccgagggaggaggggtatctcaacaatgccctcaggatggttaccatgcctgaaggcgtagtcaccgttggcccaaagaaattaggctaagctttcgctcgaaaccccttaccgccgtggtccatcgcccaatccgaatccaccatctaaacatcggcggcacatggcttccaccacacccgaccgatgcccctccgcgattagcttccagtcctgccaacgacaagactgccaccacaccgcaccgacgccccaccgtcggccgacttcatcgaaccaccatccctgagagctggcctaggacccctccatgccaccacccgccggcctcctcgccagatctggctgaaggagaacctgggactgggtggcattgcttcggcatcctgagcttcccccgctgacaagtgacaacctgccgtctcaatccaacctagaaactccctgcaaagaaggggggagctccagaaagggcgagggtgccgaccagcaacgaagaagacgacccacagccgccagctccctttgcactaccatctgagcctacgccgatgccggaaatgctgccgctccggcttcggagcccccccacggtcgccgcgtcttgggctgccggccactaggcggccaagccgagcggccgtcgccgagccgccgctgccgcacctccgcaccgacctccgtgctgcacttcggccaccgcgccgacgcaggctctactccggccgatgcgtcgacatcgtgccaccgacacagccggcgcgccaccaccactggccgccgcgccaccagccaccacatgggcgcaagcgacactccggctgccgcgtcaccgacgtagccggcgcgctgacagcccgagccgccgccacgccggagccagaccgacgcccagccaccgcgttgccaccacgggccaccgcgccgccgcagtggccctgccacggtcgccacgccgtcgctcgagctcgcgccgtcgccgcaccgaccagattcgggggtgggagggccggatctaccgcctccacacgatgccctgccatcttcgcctccaaccgctgaggttgacgctgtcggctttgccccaacctcctcgcgccaaggaggacgccgccgagctcaactggcctcgccgccgccttcccagctcgccggcggcacgccggcaagctccggcggtggcgaggtggaggagagggccgggatgcggcggcgcgggcggctagggtttcgcctcccgagccgcccacccgtgttacttgttagcacggggtaaaaaactggaatgtgcatatggctttagaaagaaacatgattttcgttcgagatgagcaaacgttatttgtaattttacctcattagtactgtttgtctgcttttctactgatgatttgtccaaatatcatctcttaagagtgaccaattaatgcataataattggttagatataggtgtttaaggtgattgcagttcctatgccaagttctagtgcgtcccgcttttggcatcaaattttttggtaaaatctttgggttattttttatacctggaaattatttgctatcaattaatgtgaactcaactgaacatccatgaaatatacaaatcatgcgcccatgtcaaccgtgcatgccatgacatctgactctagtttagtacagggccactaaagtcatgtacatggccctattgagaccaaaactatgctgtactggagctttctactaactcagcattgcgattgacctagtagtaaactagcaacccaagagcactcccaagattccaaatccctaagcagagcagtcgatttcagtataaccatcactctgttctttctgtaagactaagagtgtaaacatcagttaccttgccaagaggagagggggcacggaggaagagatgaggcaaaagggtgatcggatcgggacctgtttgaggaatggcctggaggggattcgccggctcgccctcgccacgtatgtcggctgctcgtctccaccgaagatcctcgcccgccgcccccgcctggtgccgtcgcgcctagctggtcgccttgtcggctgctttggttgcccgccggagatcgtcgcccagccagcaccgtcgcgcctagcagcctggcaggttgccggccgcctcgcgttagtcgatcgaggcagccaggccattgccggatcgtgcgtctgtcggtgggatggacaatgagggctgctagagaacggtataccgttcaacggtatatccattacctctcccctagacgagatgcgtgtgtatccactcgacaggacgtgccccctagacacactatagggtctagtagcttgcctgccggctggtatggagttgtgctatgtgtcaatcgctagctagctacggagtagaagctatgcatatgcgtcagtatgggacagtgttccctggctgtagtctgcactaaaattaattactcttgtataatgagtttgcttatggtaaaatagttgttccgttatttttattattaaataatttagatttttaagccaaccatgcacaattattagttggctaattgggccaactaatgattgctcatttaatttagttggatcatattagacgaattgtcaatattatatctggtacccataggtaggtaccataggtaccggagcaaagctaatatcacgggtaccaggtacttggtatctggtacccgtgatacctggtagcctggacgaggaggagaagagagaggataaggcagccgcgtggtggagcatggaggcaagacgacggtagcgcggcacctggaccacacgtttgagaaagctcgcgtcagcgcacttcgtaatgtagttgttggtggtgataccttctatgctcgggcgatgatacttgtaggcacttatgatgatatatgtctagttaaaagggatgatagtgatgatacgtatcaatgtatagttatatatacatgtactagtgtacatatccatatgactgatttgactgctgcataggcctcacgatcatgcatgcatgactggttcaccagctatcacctgcacacatggaccccacccatgtaagcctacttctaccatgcagtaggtgtcacgccctaaaaatcctaattatataaattgttgtttaattggaatttttagaaatttaaattaaaagcctacaagctaaaccctaataatctaggaaaattttcaacataaaaatgagctagataaaattttattaaatactacacttgctcctctattttctagatttttctgggaattatttgagcaagggaagtatttttaataaatgaaacaacatttcacaaattttttttaattaaaaagttccaaaactcctcctttaagccgttgggctgagtttggcccaacatgccccctccccgcccgagcggccgagccggcccattcggcccagccgacaccgcccgccctccctcacgtgggacaccgacatgtggggcccacatgtcgggcccttctcctacctccggccggccggccatgccaagcccgagccgccgccttgcgccctcaaatccgccccaatccagccgccccgagtccgattgttaggggggtttttatcctctcatcctcctctatctttacccccaaaaatcgaagcaaatcgttgagtatcttgcccgaatcgaactcgttttcgagtttatctccaaaaccgagttttgtttttctcggatcgatttcttgcgggaggagtccgatctcttcaatccaaggctttatataggaccccctagtccttctctttcgtttgccccatctcccgtgctttcccgtgccttgtagcgccgccgccacaccacccaacccgccgccgccgccggccatcctccggccacgccgcgccgccgcgtccgccgtcgttgccgcctctcgttgccgccgttaggtgcgcacgggagcgaggaagctcggccgccccctctccgccgtcgccggccgtcgtagcgccatcaccgccgttcaaccgagccgccgccgtctcttgcgttgtcgccggccgccgtccctcgttgttggacgcattggtgagtaccatcgggttcgccccgacgtcctctacgcgtaggtgtcctccaaaatcccggccgaccaccctagctccggcgaggttgccatccgagccggccaccattgatgacgtcatcatgacatcatcatcttatccttttcgttttttctaatagattaaatcttcagaaaatcgtaactaaataaccgtagatccgtttcaggtggttcaagttgctaaatttttctaaaatcaagatctacatgttaaaaatattcacatgtactgtttatgcttgtttttgtactgttttgttgattttttgtttaattgctttagtttccgacgttccggaggagtgcgtttccgttgaggaaggttccgaagagtttgcggaagcccaagacaagtcacacagatcccaaacaaccctttgagcatgttgaacccgtttaaagctattatttaatttcaactatgcattattttcgaatgtcatcgggtggtgaacctttcccaattaattaatggccgaagatgatcttattttcctatgggttataatttgattagcatgaaccttatatgttggattggttcagctaaatgctatatgtaagtttgcttagccatgtttagaaacattagctaactaaagggattaattataaattatgttactttattgttttaattatggttacattaaatggtagctcacgatggttaatcgtgtgatgttaattgattgataattaaaacctggttaaggtgggttgtgagcatatggttttgatggttgtgctcatgacaattaaggaccggttcgcgagctactgttgtgaaacatttatcgtgccaaccacaagccagcgtgggcaacggctttatcttttgtatagcatgattcattatagtgcgccagactgagaagcggcgagaagtccacgggggtcgctggggagtccatgccttgtttataagggggtgattatgatccaggaaaggtgcgctgtaatggattatgttgtgcaaggggtattgtcacaactcctttccgaggtaccgtggtggtattgaggcacatggtgacatgatgtggggttgtgtcttgtgggtacagtggtacacctctgatcagagtaaaactattcgaatagccgtacccgcggttatgggtgagttgagcaatgtttttcgtgattagtttcacactactcatcaatgttaataatgtgataattaatttgactcctggtttggaatggataattcctggtttggaggtttgatctgtacgaccggggttggttgttcaggtttggttgggcctgagtggcatgggtgtgctgttcagtgttgattaatattgatgattaattactctattgttttactactcttaaatctttgctaaatgctgtttttgcaaatgagcctatattatgccatcctttggtatccttgtgcacttgcatacttgctgtgtagcttgttgagtatgtcatatgctcattcttgcaatattcaatcatcagaagaggagtatttcagcgaaggtgatgatctgtgtcgcgaccgggaaaattgccttttcccgaacgctagtgtattaatccccgtcccaggaaaagccggggtacaccacacaaacatgatataaaagacacatctttattatatcgataatatttacattattacaaaggcacttcaggcctgacaagcaaaaataaacagcagcggactagcggcctacggctccatcttcacaggcgctcaactggggtataagccaagactccacctaagacttcttctccaaagcttctcttactgaaggggggagaaagatagagcaagaatgagtacaaccacagtactcagcaagccacaccggaggtgcatgattaatgcaagggaagtacaagggaataataatatagggattaagttttgcagtaaaccgcatttaaaaatcacttagttgcccaaagccattttgtaaagacgatcctagagctacacagtgttattaaacaaggccgtgaaccctcacgaacctgccttaacccaaggcctacgatgatttggaccgaactggcaacccgaccttgggtcccagctcgtcccaagccaacccaggccaaccattccatat

SEQ ID NO: 5100 - DNA, 94475 bp, Oryza sativa
gggagggagtgcacaaggacgacgcgacgtgggtcagtgggtgggagtagataaggacaacataccgcgctcggctcatcggctcggctcgttttgtataggtgtaggtgtctgttttttaataaaccggcatctatagtattggtaccggtttttattaatgaaccgacacctatagtgacttaaagatgttggttcttatttttttccgcgtgcggaggcggaaaaggcctgtaggtgtcggttttaaaggaaccggcacgtataaggcccatccctttgagggttcttgtagtagtgaatgcaaactgcaatgtctaccgctattctatttcttgaacccaaactcaaacatatctatgggctttgacaccacatttttggatggatcctgcagctttcgagcttctgattagtcctaaactcaagaataagtgctttgaattcatttcctgatggatcaaaggttcagcataggctgattactcttataaaattccggtggtgaatgttttatttcattgcttcacattcagcaaaaaagtttgttggtgctccttttttttactcagtccctagcaaaaaaataagaacaaaaatttcaacaaagaagacaggctctcaatatgctgcatttggatgcaactaagacagagccactgcatcgcccattccaatccaaaactacttgtgactgtgagtaatgaagactctgccccctaggtagggatgtaagagggccaacccatgaatctacttatatactacctccatattttaatttatgacgccgttgatttttgtccaacgtttgaccattcgtcttaataaaaatttttatgtaattatcatttattttattgtgacttgattcattatcaaatgttctttaagcatgacataaatatttttatatttgcacaaaatttttgaatgaaacgaatggttaaacgttggtcaaaaagtcaacagcgtcatacattaaaatatggagggagtatcaaataaatggtaacccactggtttttatgtcatgactcaacttgccgcgccttaagatgcaagtgggttgatctataaacccatttacagatcccatttaggaacccgtggattaccaactaatcttgtctataaatgggttcgtgggttgacccgcttacacccctaccccctaaggagcctggcccttgcctctcgtatccgacggggacactaccgcggatcaactgcttcctctgatggatgcgcagggcagctatgcagcacgcagcagatgtcatgcgaaaatgagcaatagtcaccgacgcactaacattatgtgtacctttgcgtcgcaggtaactgcagcttcacaccacactctttggcctttgctagttgcctttgtgagtatgtgactactcgagcttaaacatcagggtagcagatcattgaagagatctagcaagatgcctatccatttccagcattcctgatgcttcacatgcatatgtttttctttttttccaacatggacaaatgggatcacgacatgcattattttctttctggtcacatacaagtttgatagggagggatatatatatcttgtaggcaattttctcaactaaatgactgaaaataatgagcttggtagtttttacagatgcatggaactgattctatgcatttattgctccagattgttccaacaaccacttaataaaattttgacaggagaatacataagtgattaattagtcgttaactttatccttgtttttggacaaaggggcatgatcactagctagcataaccacgtgctaatctttgtgaaatggccaattttgcttactgacacagccacatgtacaaaggccttcagctttcctttacagatttggttgataaaagagtagtacaatgactaattatgtttcaatttcaaaggtctcctgattcgaccacccttgccctctactatactacaatagagttcactggctgattaatgagcagcctcaacatccaaaaatgcatcttaagctggagtcgtcggtcgctgcaagatttctgatgctggcaagatgaatgaggatcaaaggtgaggatagtaaaactactcaacagatagtatccgaccaagttgatgatggaagagcacgcttacaattctatggttagagtcaagtctcacatctctagtttcagcttcatccctttcgtttgctacaccgaacgatcttgcgaaaacggcaccagtgtgtccatccatgtacaatactcccaatgcttcatatgcctatgttttatgtcagcttggaaagatggaatggtttgcacctttcttttctctggtcttgtttttttggataggtagatatatgtccgatccttttcggagtggaaatagccagaaagggattcaactaaaatccaaactaaatccaaggtgatccttgaattataaatacagcttggttacccttgaagatgaagggcacgattatgtccgatatccagtcaacgacattatgaattgcttcatgctacctctcaggacattgtaattgttcaaacatgagttaattaatgatttattaatttacagaaaataaactcagtcacaacgtgaaaccttgagaactgaaaaaaaaaacacaaatttaatagcatgtgtgtaacaggacactcgaagtcagttggaaattaaatgacttttctctactcaatgatattggcaatcctactgaagacatgttgatcaattcagatggctgagagaccaccaataatattgctgtcgatgtagctggttaactgatttcgtcggtcttgttcacaaaagggcatgatcagttgcaaaggcacacgctccatcgttgtcatacggtccattttgctgacaacaatagtagacatgattttcactgattcgatcgaacagaaagtagtacaattaattattgccattaagaagaacttctctcacttttctaagtctgatatgggcgtcctctagaacagactacccgagaacagagcaggagccgacgtgagaattgccgtaatccagaaagaccaatagaaaaaaaaaattcagcaaaacaaaccacacaaactttccagtcatattgccaatttattcattttttttaactgaacatgttgccaattattcaccaagcattttctttttcaccgatccttaagaggcatcgcgagatggtcaattatagctattcgtattttcgtagtgttaaattacacacaaaagtagaacatggttggttctcccatggtccaatggacgagctataggataagctgcacagatcgagctgctgaactcatatggacaaataaacgcactgaactccggattttttcaggggaaaaaggaatcatatatattaggctgcaggcagacggtcctctttgctgagctgggacagctcgtgcgcagcaacacgccatcatgccgatctcccctgcaccccgaaaagtatcggagtactgtcagtcgaccacatcgtttctccatacagcaagttgtttcatcgaagtttgttcctcagcattgatattcaagtcgttaaaacgcatatataaaaattatacctataaattattattattattttgcttatacgttgaataacgtattatccgtatttggtcaaatgatgggggcaagtgtgccggcaaacaaccgcagctgcatgggcttgtcgatgccgacgacaagcattattccgaagacaaaaaaaatcttgatgatcttccccacatagcaccaccgcatgtccttcttccgacgactgcttcggtcctcctcccgcgtgtgttgtgttgttctggattctggagtgcgcgagtatgtgaggatgtgagtgcttgagctcaaacatctgggcaacaaaattggttctctagtgggaaattcagattggtacagttaatatttggaggaaattgggtttatatatcaaagattacagattggtatagttaattctgatgcattgtgttgacaacataggcgtgcttcgtcatgatttaactaatattgcagtttggctcacaccaatttaattacaaattcatcatgatttatttcaaatcaaagagagataatctttactactataaactgaaagatgagtaccaaaactatcttacaagcttcagcaggcgaacttcagtagtatccatccatttcctcagtgattgatcagtgcatgatatttttctttgatggaaatgatctgataataaacatcattaattgtcggtcgatcttttggtgatgtctctgtgcacattaacccaagcttagccagctgtatggcacatgttagaatttcaggcacaacatgatttgagtcttcgccatcgtgatgttcggtgatagtaggttctaaaatatcattgatcttatgtggaaatgctgattccactaagctacgaaggttcatgccatccttaaacatctcatcggttgggcactttcctgtgatcatctctagaacaataattccataactgtatacatcaccctcagttgagaccttgcaccccaagccatactctgcaataaagattgagcaagttagtaaagcatttgttggtcgaaaaatggtactcgattccatggaatggtatacttgccatcacctccgtgatagataatgtggaggtagtagaaacgaacaaataagaatgaagtaagtccgtacctggagcaatatatccaattgatcctctcagtccagcagtgcttgatgaattgtttaggcttataatgttgttatgaagaaactttgtaagtccaaagtcactaagacatgcaaccatttcatcatctaaaaggacattgcttggtttcagatcgcaatgaaccataggaggagagcatcgattgtgaagatagtctaaagccacggcaatgtctacggcgattcttattcttaaacccaaactcaaatgttttgtaggatttcgaccgagcacttttggatggatccagctttcaaggtttccattaatcctatattccaaaataagtgctttgtattcatttcctgatggatcaaatgtcgagcataggttgatcactcttataagattccggtggcgaatgtttttcaaggcctcacattccgcaaaaaagtttttcggtgctccattttggtcaagtctaaatactttgattgcaacattgcaagctccaaacttcaattgaccttttatgagaatttttacagtccaacaattggtacctccaggtactggtactgctaggtaccaaactaaatccaaccattaaatcagcaggggcatgatgggaaaaaaagaaaggaagcttcgactctgatgcgttagtgttcgtgaacttcttgtcaccaccgtcctagaatcttcgccactgcattagtgctcttccacggcaccggctccggtggcacctcctggccgccagcgccgccgcagcattgggcgttcttccaccctattccttgatccgtcgtcgccgtcgattaactgctaattactctgagcggtgccgaccaacatggagggatgaagccgtaaatctatgtatcgtcagataaactttatttgacttgatttgctaaccagtttaaatctagccttcaaatgtaattaatccctacgccaaagactgaaagtgatctgaatacaatgaatccattgtggagctgtgccgtgcaagttggagattagtgctctgaatccatgtacagagcgcttcatccatctatgagaggacaccatgattgaaaaaggacgagaggggaaaatcaagggagatggtaccgccatggacggccagggaaaaataaagaggaaaaaataatcaaggaagatggttccgaatcaagcagatggatctgtatcgctggcaagagagaagcgctgtgcggcgaggatgctggcagctgctcctcgagctcctgcatgccgtcgagtcgaggaggggtggggatggtgacgctgtgtcgtcgcgaggctggaaccagcgtcctcgggggcggcacgactggatctggaacctcccaggcttggggcagccggatctagtccccagttcctgctctgattccttctcgccttcggtggtgagtggttatgcccttgcctccggcaaaaaataccagagagatcccgactatgctaaacacgaaattccacttttaccctttggactagtagtaccaggcggggtgagcggtggtaccgcgaggtactcgtctctcgacagtcgtccgatcgtgttagatcgacggtctaaatttggtaccgccttagtcttgttggacggtaaaaaatctcttatacaccactccaaatgttcccgaaccaacaagattccttgaagagaaaccatttgttgcgttgtacaaatcgttgtatgagagtttattaaaatgcctgatcgaatcattgatgatgattttcttccgcccagttctgttcttctgaaggatgatggcaacacaagccaatgtgactataacgatggaagtgattggaattcctacactaagattataggatgtcttgttccttttagatgaaagttccttgcaaagtggtaattgtagcattggagaaattgcacacaactttttgtttccttggacgaacacattgcttgaattagcaaacacgcctcctctagggacaggtccctcaagattattgaaagatagattgagagtgtgtaaagatccaaaatactcaaaaaagtctgggatttcaccagacaagttgtttcgggaaagatccatctcattgatcccttttaagttggcaaaagatcctgggatgctcccttgtaggaaatttccctccaagtggactgattctaattcaaggcactcaccaagactagttggaatctcaccagataattgattattggagatattaagtgaattaagattagttaatccaccaatctctagtggtatgtgtccagtgatttgattctaggacatgtctaagccttccgaaagtgtagaaatggaaaagagttctggtggaattctcccatacaatttatttcttgatatatttagtttagttaaagttgtgcatcttgccaaactagaaggtatttgccccgtcaaatcattttcttgaagataaagtttagtaagttgccttagttttccaattgattgagggattactccggaaaacttgttgtaagataagcttaggatcgacaagttttggagatttacaattgtatcaggaatttggccagaaagcaagttattatccattagaaagatcgtgagactagttagtttttctatctccgaaggtatgctaccagtcaattggttttgatttagaatcaatacctttaggccttctgaaaggttggtgatggaacttggtattattccttgcagcttgttcctatccaaccacaaatttgttagttgagtgcagtttgtcagcgaagacatgaaagaccaatctccagcctcaagcttattgccacctaaatctaggtaagtcaagtcagacaaggatcctagagaagggataacaccggtgaaagagtttctgcgaaaatatattacttggagattcaaagcattggctaacgaagaaggaattggtccttcaaaccttcaaatattatacttgtgagtcctggaagggtgtagccaatgttcgtcggaagtatcccaacaagacgattggcgccaaagtttagataggtaagactcgagattgtgtaaagtcctggtggaacgatgcccgataagttgttatgacttagatctagtatttgcaacttagaaagattacttaggctctttggaatggtcccatctaatttgtttccggaaagcatcagtgtagacagtgaaggaatgttaccaagtgtgataggaattttaccggagaggaggttttcagttaaactaaggtatcggagtgacgaaagagcttgggagaatggaggaatggatccagaaagaccatttgatgacagatctatgtaagacgtggtagtgctattgaacaaagaaggtggtatctccccacttaggctattattttggagattcacccatataagtggtttgttactccctaaaagttgtgggatggtgccagtgagctgattgtgtggaatgaacagtgcagaaaggttggaaagcaaaccgatatctggggggatgtttccacgaatattgttggtgccaagaataatttgctgaagaaatgaacattgaccaatacttggagggatctcactttcaatggagttgctaaacaggtcgacaatctcaaggagggaacatgatgatatagtctccggtagctcaccagtgagggaattcatgcttagattgaggtatctaagatgtgttaattaaccggccaatctcaggggagatgtggccattgagttggttgccaggcatgtgaattctggagatgaaactgaggttagcaagacaaggaaatattgggccggtgatgttctgtgactcaagatccaacgcaacgactcgagatggattcttgacactacatgtaaccccattccaaatgcatattgcagaagattcatttctccaagaggctaatgctcctgaggggtcatggagctgggacttgaggcagaggagggcctcccggtcagcattggaatcgttgtggagttgagctgacacagaagaaggaaggcagcataggctctggaaatggaagcagactactagaataagaagtagcggtggcatcactaatggcttgtgaagtagtgatggaagagacaccatcttttcttgctctagcttgattaatttgtaagccacaacgtgcgatggggcaactatatatagcacacacagtttgagtcagtcagagatcgttcagccgtctgtgtctgacgtccaaactgggaaactagtagtaatccaactatgtaagcagacgatgtttctagcagtcttcaggtctatcatatacccattacttaggtggtgtttgaatttcctgaagacaaaaataaagatgaagattaagtatttcacacaaaacgaggtggtaataatgtgtaattaattgagttttaattattacaaacataaaaatagattaatctgatattttagaacaactttcatatagaaagttttcgcacaaaacacattattagtagtttgaaaagattgccataaatatccaaaactttatcctctctttacaggggattcgatcgcggccgggcagcgttcggaactatgagtttccatcctctcctctctcatttttgcaaaaaaacaataaaaagaatatagattaaagttgttttgaaaaaccatgttaatctatttttttgttttttaaattaatacagtattaatcatgtactactaagttacctcattttatgtgaagggcaaattaataagttacaatccatgaggtgattcgaatgtagcctaaatgtatatatatgcaaggcaaatttggttacagtaaatcgtgacttcgcggttttagctgtagaacaccgcgtgaagtgatttttggaagaagacactctcaaaagttggatatttgctggtggacatcccactcattaaaataataatttccggttgaagagtaaaaagaaataatgtgaaatatcaaacttgcccttgacccagatgctctcttatactctcttctgtttctatcatttgctctgtccctagctggaaggaggggatagagagagaagagagagagggagagatgacatgtgggtccattggtacttttgatgtttcacgtgatttctctttcctctttaaccggaaattgttattttaaagggtgcggtgtctaccagcaaatattcaacttttaagagtgtctttctccaaaagttactttgtgcggtgtcctataactaaaaccacgaagtcacgatgttctatagtaaaatttaccatatatgtagtatctcgctatgcggatgatgtagtatttttttctccgaaacgattaagttaaactcttttgttaaaaaaatccaatctaactagggctcaattcacagctgttatgttatgatgtgcttatttcaaaaaatgttgagaaaattataacatatagcaatctagaaccagatttaatcaatacagtgttacgaatttaaacaggagtgtgtccgaaggtctgcaccaccatatccatcacctcgtgttggtgtggtggaaggtatgcagtactgctaattgacatgtaggccccacatatcctcgggcccacataacaatgagcattctatatatgtagtactgcagaggatttggattggtgaaaggtttctttctctaaccaaactctagaggaagtgaacgacaactttttactccctatgttttaaaattcattgatatatagataatgaaatgtgatttatttggaacagaaatggtagcatagattttataaattgatgatttgttgatatgtagatagtgaacacggtgcatctgggccccaggaccagaaagttagttgcaaattcactgtcatttcattaaattatcttggccattccaccgaagacttggtatactgaagagcggccacttgagggagcaccaacgctattgcgcttcagggtcaggtgagtcgctggctaactaattttctcagtcttgttggagcacctgcagggatcacctagtggacgcacatgctcgatcttgttactccctccgtttcaaattgtttgacaccattgactttttaagtacgtgtttgaccattcgtcatattcaaaaaatttaaataattatttattcttttcatatcatttgattcattgttaaatatactttcatgtacacatatagttttacatatttcacaattttttttaataagacgaacggttaaacatgtgctaaaaagtcaatggtgtcaaatattttgaaatggagggagtaataattagtagccaaaattttctcagcccaagaatatatacctaatgagctgtttgatagaacggaataatattactcggttttgatggtacgaaaggagagtttaagttgactattcactactggagaactgatctttgttgggtcggcttaaaaccacattagtctcatttccaataaaaaccgggattaaaaatcatatttttccggttaaaaagcccaacgcacttttataatctttagtccagattggtgttattaaccgggaataaaaatcatttttacttccggttcaaaaaagcgtccagctccttactatctttagaactaaaattcaacacgtagtatataatccctcgtacttatcctttagatcgcaaactcttcctcctcattttttaactacatcctcctccctttcctcctctcttctctctctccctctctcctctcctctccttttctttttctcgctgctctctcttatcatctccttctctttttttcttgcagcgaacgacggcggtggcctgcgcggcgggcggcggcgcgaggcgactgcgacggcgcgacggtggattttgttgatttattatttgtgaacgtgaatttgttgatttgtgatgtctttggatttgtatatttgtcatgtgaattgtgaatgtggatgtggatgattttgtgatgtttatgtggatgttgatgattttattgttgagtttggttaaaaatcaatatggaaaaaaaacaatgaaaaaaaagaaaaaaaattagtcatggttagtgttatcaaccgggactgaagatgattgtgcctcgtgggagtagctaccatctttagcctcgggtatttcaaccgggactaaagataggcatctttagtcccggattcgcggtctcggttgcataccaaggaataaaggaggttgcgaaccgagagtgtagatgcattctctagtagtgaatctaacgcaaactcgacatttataagggtcgtaggacttttctcatcctatacagtaacttttctaactttaatctccaaacacgtgtttttcttccactgccaagaaacccttggtgctcctatcttgattgggctcctctcagagcaagtgttatggtagatgtgactaatatatccaaatttattcatatcatttactcataaattaagaggcaacacatacaatacgtcacctctaatacacacaaataccaatgtatctagtactctcacatcatttttgaaatttgtgtgaaggttagctcttgattaaggggtggttcatcatctctcctccacctcatcacctaatataatgtaacatttttaggggtagcatatgaagtattatagtgcgtgccctcaagcgggcatttgtagggttttcatgatgagtctatgttagttgggtgtgttggtttctaaactaggtgttcggtttttttctaaggagcgttatgagttaatttcatactgatccacatgtcctagtgcgctttggagtttggttaatttctgcgacaacaaatcttaactagaggggtagcgcgccgttggcgcgccgccgtcaagtaagcagtttaggaaaataacgaacatttgtatagtagttggagcaagtttgtacattaaagatttaaaatagagcggacatgtgtatggtagcatgtgaaggtttgtattttaaagatgtaggaagcgaaggaaaacacactgaaagaaggccatcagaaaagaagggagcgtaaagcggcaggtgtcggttaggacatcacacataagcatattagtaagcagtgataatttgcactgcatatatacaatagattttagtgctgataataagtggccagggtgcataggtaattagggtagcatagtggtgggaagggatgcatgcagttttgctgcatgaaaacatatgggataattcagtgctgacaaaagggcaactctactatagcacagctgataaaggtggcatttaaaggacatctattgttatcttgacgttgggtgccttgtagaagtgaaagatgcaaactgaatggagatgaatggcattggttgctgcaaaagttgcccatcctctctttaggttgcaacgatcgtccgatgatttatgcaggagcatggtgactgaatcactgcctgctgcttcaacctgaacgaagatagtttttttgcgtcccatgagtggctgaatgtaggtcactgaatattccttggtaaagtactgcaattggaactgcatgttatttttttagggaatgcatgaatagaccaatgtttgtctagtgtaagtatacttaccagtctatcttgcttcatgaatgtattgttcatagtcacaatatagaacttgctggaacgctggaggaactgcccgatgatgctgatgtagtttttaatgtcaggtgtgactgctgtattccttgcacaaaaaaacagagatcgtcgaagctatgtgtggtttcgcctgtgagcacacattgtttataagattgctatgtttaattggaaagaagtcatgaaataggtaaatatggctataaattctgttagtagacaattaattatatcatgattgttgatatgctaatagtgactcggatttgttctctgtactggtaggcttgtgtgataaaatctctgtggccagaatgcggatactgatgtggtgattttagaaggaaaagaactgagttatatgtgaacagatgaaaggcttacctgaattgtcggagctggaaggaatgtcagtcatcgactctgtccttgaatctgacgaagtctctgaaagatggtgttgaaatatgtcattagtgtgattggctatagatttgtacatataggtatatatcatggagcacaggattgtagacaaatatttgtgcacctttgtttgatgtgtgtgaaatgagcatggaagcatgcttgctggtaggcatgtcattgatagtgattcctgtcgatctctttggtgctgtcttgatttgtttcttggatgaagggatcatgggcagcttgctatcttttttcttgtcaaagagaaggacatttatctttgatggagtaagaacttgaaagcgaatgtattgaccagacagtaagccagtacggtgaacaaaggttttccacccttttgagatgaagaatgatcctgcaattttttctagttcgacggtcattggtggtgcgtgcggtgaaagcaatgttacagtctgtccatggtgtgcatggcagcctcgagcaatattgttcggcagccgctgttgtgaggcacaatgttagttaagaacatgaaagaaggtcaataggaaaagaaagcgttgctgttcttacaaaacgagtgcgttgtagcgaagtgaacttcaatataggtgatgtatgggtaggcatgattgaaaaacctgaaatgtatggtaggtggatgtcagaagataaaacagagcaatagaaggattaataggataacatctacattgtaaggtcaagaactgtagatctaatgaaaagggctctgtaattttggaaaggaaggaaacatattagtatcgattacacacagtataaatagagagaaaattaaacatgttagcttatgacagggcagcattaatgttaatgtggcgagttctacacaaggctgccattgttgctagtttttgttgagcaaaggacattggtagggtggaagagcagcatggctatattagggctgaaggagtttggatctggcatgggagatctattttgtagtaagaaaaaaaaaccagtggtgttgtctagatgttgtttgttggtggggaagcagaaatgctgtgtatttggaaggtgcagagagagtgaaagagggatgatagtggtaggaggaagaactaacctccaaagtggcgctcagctggcggtgggagtagaatcgaccttggttgatggcgattttttttgctctttggccggtcgctttgtcttctctgtgctagggctagggtggttgaagaaggcaagaagaagggataaggtttgtctgacaaaaaggaagcgtcgagagcatcgcatgggctttgtgggccttcgtacggagaggaagtaaatacatgggctttttggacctctgttttgtctgcacatacttatattagtggctttggagcattggctgagctgctctttgttgtagtgccgtagggaaagttcggttgagagcggcggcggcggctttttcctctgatgcatttgcgcagatctgaagggattgtgctgaccgcgcttgctttgtgcgcggtgagtatcgacgaagttgtgcgaggtgggacggcttggtagaaagaaaggaaagcgcacaggtgagtacgatctttcagattcggtttgtctgccattgctgttgaccatgaggtttgttttgttggtaagattgtttgcaatgtttggttagtccgtgctggagttagacgcgagaggatgtgcctggcttggccgagtgagagcgtagaaatgtgtagcagaacatttactattgtttgtgataattcgttaaggtctgggctgatgatagtaggaagcaaatgctaaggtacatagcaatctatatggaagaggtgcatttgttagttcctacgaaaaaagtcactgtctttctgccagtagaacaaattaggtgtgtagggagtaatacttggtgtattgtttgcaatgatagcatgtttattttaggaagaggcaagatgtagtttgctataatcaatactttatgctttgtctagctcataagaaatgaagaaaaacttaaaggacaatgtcttccattctgtaagattggaatgcaatatttttggttgtttgggcttgttatgagactgatcatctgtagatgtgtttgtgtgtgttttctgcaataactcttctagttggatatgtcatgtagggaggcatcagttatctgcctggcaatggacaatattagcaggatggagagtgctcctgctgttagcgctgacatggagtggtgtgatgaatttggtctaggcagtgaagaatggacaacaaaggttgaaattaagatcagaaatgtcgctgagcatgtgtgtcacccggaaaaaatggaaagattagtatcgtctttctgtgatgtacaaacatatagttttgatgcaatgaaaaaggagtattatatttgtggatttgctcgtagcattgaatcaatcccaaagtataaatacttgaagataaagtatgggacagagaatggagtctggattaagtttttcatgcttaatctagaggctataccgtacgttgatccagaaaaagatgttgtggctaatggtaaattcattgtatgattgtaaatttattatattggacaattgactttttttctatctatgatgttagtactaatctgtcatacatacagagaaggatcctgaactgtatgaagatccagatgttgtgagagaagcctttgaaagtcaagttaggctgcaacgcattgcaggtatgaatttggtctgcggcgtttaaatgcatgtcggaactacatatggaaactaaaagtaacacctgttttgttgtatgctgtataagatggtgaggaaagcagtatttcggccgatggctctttgtgcatgagcattgactctgactggagcctgaagtatggtgggcgttgaatagaacaacaaggacatcagaaagatcagttgtctatgaaagatgccaagaagccaactatttagtttattgtatatgatgtgctatataatatacaatgtagcctcgtagcttttgtgttgagtattagtatgctgtgccgtaacatgttagcatgtattacagcgtgctgtatgtaacatatgggttgtttgattggttagactgccgtgtgggactgttgtgttggatatatgcatacgtcattgtaagatactaaagtttgtagcttttgtgcacgatattagtatgggttgtttgtagctggagttatttcatggcctacgctctcttgtgtggctggaatctatctgtgtatcataatgttgcaaggctaaccgttgtgctatgttaatatcacttaggtatgtctgtgtgaactgcattgtcactctgcattagcacacgaatatgaaatctgttcgtatcttgcatgagaaactatatactggtcagggaagagaatgatgattgttctagattatatttcctggtctgtctgattttattcattagctagttgctaaccaatagagggtgctggcagcaaggccaagagggttcgatgtgccgtgtaggatccagaagacatggtcgttaatcagaatggaaaccatgccattctgctggtaggcaggagaaaaggagtgttttttgatggtagctatatagacaaggtaaataagagagaacgcttaggtagattatagggataaccatgtctttgtagcagcagtctagaacacacaacagtagcagaagcaaacataggcagcatttccctacgataacgaccatggacgaaagccatgaacaaaagaacttgattcttagcctaaataaaggaaggaggctccttctgcgctgtatccaggttgatggcctatgtacacataagcaaaagccttgctacgcaactgcatgtggagctgttatttgctgcatacaagatggaaaagtttgggggtcaggactgtgtttccatattgtatttgcaggtaaataatgtgtgttgtgagtggtaacctacacctgtgtgtctactaaggagcatccttgaagagcttcttagcacttggatgtaggagcgcaggtttttccctgttgaggtataaggacatgttagtaataatggaaaaagggagtgaaatatagatgcaagcaacttttatgtaagaaccttttcttggctgtggctgtagtagctgatgttgcggctgtttgcggaatgtcctctgcatgtttagctgtttgttttgccttgtagaacaaagaatgtttaggtggttaggtctaagcttaaaggaaagaaaagcaggaataccttggactcaggagaattagtgacaacagttgtttcaggagcatgctctggatgtttgacctcatcctgcgcacaacgattggccttgcaagattatgtatggggtgaaaacctaaatagggtggcaggaagaacaatatgggcaggaaaggtaatgacaagtgttgtaccttaatagcagtgtcaacattggtgctaagaggctgcatgtggcacattgaaacaacgatgttttttttctctggtgttgaagaacttggtttgctggttggtgtgctctgtgtgggagtaccaataggtgactttgttggggttgaagtgctgtgcccttgctggacgagctgttgtgattcagagcttgtttggctttgctggggccctgtttggacagaactgctggagcttgcggatgcaatagctgatggttcctgggaagaacccggtggcataagcagcagtggctcatttgaagggccagaggaaacaatgctgttaacctggagagattcttggcttcttttgacagtatcacgtgtaaagctgacattccatgtaaatgtgctatcaacaagcgctgcgatctcagctggaatgtaatcactatctggtggattgtcctcaatgagagattccactgatttttttatgaggcggtgtgcaactcttccaaaaaggataaatgtagcattggagctggcatcaccggcgatgagcactactttatatctacatgggtaatatacatgtgtatattaatgtgtgcagcacaattagtaagcatggaaaaatctggaatgaggtgtggtatgaaccttggatctggtattcctatgttagaacagcttgagcatttgtagctagaaccgtatggcttagaagttctatagcataatcggcatgaattgtaccaccaggaattttcgctgcatatcctcctaacagtgacattgacaatgaaacgtgtactctgaaaaagcaaagaacagaaatgatatcactattattgaaagtgagaaaatgtgcagcgatgtattgaacaaaaaactggcaaggaggtaccctgtttttgtgaggattgagggcaagtatttcttgaatagttttttcctctgcagtgtcctggttgtaacctgttgctgggttatcaacccagctgattggacgaaagtttgcactgaagctacatagttatatcacgttgaaagttaactaactgtttcacaaggagtgagaacacatcatggcaatggattataaacatgagttcaagtaggcagcctcacctctctttgagttctagcacttcaggaatatcaaggtttagataccatttgcacggcgaactaccagtcactgtaagacctgtatagcatgaaccaaataaaagcatagcgttagatggctagaataaacaacatagaagtgaaaatgcgtagtgaaaacgaacctaatcctgtgtaatctttgacaagtgtcccaacaaagacaataacttgggcctgagtttggccagcattgtatacactattagcgtcaaaagcatcagccctttctccccagagtgtaacaggcattgttgaattgctattgtttttccatgaatagaaaaaaggaaacagtgtgagtgtaatttaagaaagcagcagcgtactaagaatctatgcatgcatcaaaggaaaaggtaaaaattgcaattaaacatagggatattcagtctgagcaaagacaccttgcatcacatatctgtattgttctttttaagctatcagcattccttgacttcggccgcacaacggttggcgaaccaacctcagtgatgacacccatgacatctggttgcatgccatataagcctaattaatgatgagatagtatggattattgatacaacaaatatagctgtgtagaagaatctcattaccaacatagaagatggtcttgtccactaaattggggatatcactgaatggtgtcaatgaaaaagttatgccagggaaatcagcagcgggctcaatgtattcttcaaatgttgtccatttactgaacacaatcattaggctattgtcgactggcctgtatgtcctattcgcatacctcacagtaaaggagtcaatatagtaaaccttttgttccttaagcaaaggcctcaggctgtcaattgcaggtggataaatctgagcgtgaatgctgtttccctgcatttttaaagtaaataatgttatcaagagagttggcactatagcctaataggcatcgatgaataaatgtcatagtcacatcattaccatctgatcgagcagcacaagatcagtgtggaaaatattgccactgccgttgagatcgcagaaatcccataacctagaaactcttgcaaggatccttgtgtttaagtctccacaggacagctgtgaaatgagcacatgtgccatcttggacctgcaatgagcatagaactattttagaatgggtaaaatggttggataagatataacagtcaaaagattgcttggcaggatactatacatgacaaaaggcaatatactatgtaccatacacatagtctatagtacttgaggctgaaagacatttattccaaaatatatgtacaaatttgggtattactgtggtaaaaaatttcaagcatcaagcggcggagcctgcaatagtaacacatgcacattactctgctgaaaatacaacgaagtgatgaaaagcaaaaaaaaaagatataacgtgcgggaaatcaccgcttggactgtagcgctgagcacttcagagtaaactatattttttgtctgtgtaccacatgatccatcatcattttcaattaatatttttagccctgatcggcttgttactcttgaaatagcaacgtataattgcccatgtgtgaagacaggcttcctaagatatacgccaacccgctggagtgtttgaccttggcttttattgatggtcattgaatagcaaactcgaacagggaactgccttctctgcagtgtaaaaggccatttcatctttgtggtgccaagtgtgattcgaggtatgtaaacagtttcaccaatgtttgatccagtcagtactatacactgtaaaattctgtctcctaaaactgtgactaatagccttgttccattgcataacccaattgattgattaagatttcgtagcagcattacaacaacaccttctttaagaacaagtttatgcgttggaaagttagtagcatttattgaattcagaaactctagggggtataacagatcgaaatctggaatttgctcagagctttttgatatggtatcacaacttaggtatactctagaatctcctggcactaaaccaataatataatcgtttatttcatcaaccgttgtattagtaggacaaacaattgcacgagaagccagatattcaatgtctctgtagcacgtaaggaaatctgagtaaacctcatgaacaatagcagctattttgtcaccgctagtcataacaagtaaatcatcgggaattgtgatccatgcaggataattctcaccttcctttgctgtcataggtaaagtgccattgcctatagctaaaacccattgactaaaatcatgcaattcttttttttgattgtctggtaacattggattgagtaatctcatgtttatattcaggctgagtagcgctacatgtttccatagttctgagttcgtgatagatgcattgattatagcctgacgggatcctttaggaataactgggagtatttgtttgaaatcaccacctaggacaataggctttcctccaaaaggtataatagaatttgaagggcatgtctctgataaaatatctcgtagcgttcgatctaatgcttcaaagcatcgcctatgtgtcattggagcctcatcccatatgatcaatgcagtttcagctaaaagctcagcaagcattgtgcctcgttttatattacagatgcttgtttcatcaatgtcgattggtattttaaaccgagaatgagctgtcctacctctaggcaataggagagatgctacccctgatgaagcgacagcaagaacaatcttgttttgtgatctaagttttgcaattattgtattccagagaaatgtcttgccagttccaccatgaccagacacaaaaaagaaaccaggttcattagcgatagcacgagaacaaatagtgttaaaaacagttatctggtcattattcaactgctgtacgaaagagtctgcatgcatagcaagcataagtgggtcaattgtgatttcttcatcgattaatctattagtaccaagaacatgtggaacagatgatggatgtggcaggttaaaatctttgatattaccaccgctatttgcaaatacagcaataagctcatgtagtagcatgttaagcaagtggtcatgtggaatcacacagtgtggattgtcaagggccttttttagcctgttatgtatgtcatcagtcatgtatagccagtatttatcaaacaatgaacgaacatcaccaacagaacagtaaagaaggactgtcacaaaaagttgtctaagctgcgctgaagacgcagtcactatggcctcatcaaaaaggagatgccattcattatctccttcaagaagccctcgtgcctcacatgcctctctatacgtgccataaacaacaccatcgtatgtgcgaacatcagcatagctttgagcacctttgacaatcattaacaacatcctaagatagtaaagctcgcctgcagttggatgcacataataaattctgccaattttaggagcaggtgttcgctcgtgccaagttttagatgatggctcccatgtccattccttaggaaactcacagtatgtcaatgaatgggccttagaattttttttgttagtttcaaaccattcagtaagcatagaccgttttgcaccaggactctcaaggactgcccgtaggtcagctcccttctcgtatctcacaaagtttttcccaggcagatggacaaccaatcgctcaacaggtggcactctataatgtatatcaaattcaaataatcgatgaagtgcctcacaggttgagagaaatcttgcatccatgtattctaatatttcattgcgtggagcaaggtcatgatttggtgatgcattttgtgtttttcctgttgtttcaaaatagatcctagctcggtcatggccttttgtaatatatttaaataaatactttatcaaatttgatttgttacaccactcaacatttatgtgtgcctcatattttttcagtaaagccatgttgtagggtacaactgatctattgtctaaaaggatcccattcttcatgatagatcgtccatcatttcttcgtctatagattgtaaacccagattcatcaacaatggtttcatcttggaaatctttaggataatgttttgaacatttatcgtttttcatacaaggacacttcttgttcgcatcaccgcaaggaccatgcatcataaactcgctaaccaattcatatcctagccggtcggtgtcatagtcaggtatttcagcacagataaacccatctattatagaggctgagacatcggcagtggcagcagcaagccaaactaagcaatgtatgtgtggaaggccacgcttctggaattcaacagtgtacaacactgtaatcattaagaacaaaggttgatgagtgccacaccaatggccttaatacgctatgaactaacaaaattgtgaccatacctgcaagaactttaccaaaagttctgccttccctaatatcagttataaattcattaactttcatgttaaacacacgcacaataatatcagctctatcagatggttgttggccaggctcaaatcgaatcgcatctgcaatttcttgccatttggaattacatgtgtatgtgacaaaaaggtcaggaggcccatagacacgacatattgccatcgcatcttgataattcatgaccatatatcttcttcctccagtgaagctagcaggaagtatgacacgcttgccaactgaatctccatcagtgacacctttatcaattgcatcaacaattccatctacagactcagagcgcagctctttttgatgatcgatgaagtactgtagcctatttgtttcaatagtagaaaatatatcaacatcgatttgatcgctcaagcgaccatagcatgtgaaaggatttgattcatttagtctgtaatgcatttcatatctataatattccggcatcgtgacatactttttgccaattccatcatagttactgtatttaatgcctaaatggaatccgcgttcaccatatggaaataacaaaggatattgcaatgccatataagatggatgcaagggagaaatctggcgcaggccacgacctttatcgtagacaagcacatcaaatttgtattctttcgcagaaaaatcacctactataatagcagctatttcactgttcgttggtaaattgtattgcacatcgtcttttgcattgcaacctaaaaggcgaagtgtcacttgctgattgccatgccgaataacacgttctctagcatacctaaagctctggacaagagtattttcagcatcaagcatcgatgatagggcacgaattatctcaggatctgctttatctgaattatcaccgtcgttttcaaatatatttaatcggttttgtaattcattttctggatcatacacatataattgcgcaaatttgggaggtgagccacaggatggcacaagagtaccaatcctatggtgcacaactccattgatcttgaatacataaggtgcatttccagtgttaatcgatttatcaatagctgcacccattgagctgaaagcaaacatcgaattatacgatcgtatttgcctcaaaaaatttttcgaacgtgcatcaccattatagttcaataatgatgctagtggctcaggaggggcatgcagttttggcaattgtatgcgtcctcctttgcaacatagattgtaaattatttttctttttgaaatagcagatgcactcttgaccctctcctggtaccagaacatggcacgacaatacgggcattcatacgtcggagggccatagtatgatctgtctgggtatgatgctgccacaaaagcgctggacaatgtcaaaaatagtctcgtgtaaaaaaacaatacattacgtgcacgtattcagaacagcggccgaaccctttagcaatcggatatactccttgtctgtccgggaggaactaccgttggctcgtgcagtgcgatttgctgcgaacaaagacagtaaaacggcctatgaacctaaactgcacgaaaaaaaacaagcctaccatcacagacaacaaaaagagcataccatccacattggccaaaggaacggacggatccatatttgaacgcaggagggaacgcctttgcctatttaactttgccagctgaggtgcaaaatccatcaacgaacatttcctcttgcaccgactttcctgatggggctgccctagcggaacgatagcatgttctatatgcattgcactctgttgggacagaacatttgtggcccttctctgccggctggcacgtaccctacgcactctatccatagcatgcgtttctaactgccatcataattttacagaggcaagaaaagaatgaagcaaagaacacgggcaaaaaaagtggctcaaaccacacagatacagtgaacgaacaatataaaacgaccgaaagctctggagcaaccacatgcagatttagacagcgatgaatgcaggcaatagaaacaaaatactaaaccaatcaaccataaataaaggacagaaagattaatagcgcgggaatacctttagcaaggaatatgctcgtcgacaggcagaatccactaaaacgcaccacgaagcgaacacacaagctgtgaacagaggcaaggaagaagacggaacagagctgcagagaacggagcatgatcagtgaataagaatgtaggaagcaaagcataacacaaggccaatgaaaccagcaacaaccaaaagtacctgctaggtcttagaagcagcccgcacacgtgcaatggaagatgatcaggaacctttaaaggtccattgcagcccatgcagatcgcctcccctaaatggaacaaaaggtgcagggtcaatgctagcaagaacagccgcgcagtcataagcaaacaaacaagagagaacaaacataaaacccaaatgacagaacggacaggagaaccacacgcattgatccaggccttaccacgccataacgaaaagttgaacaggagcaaaacgagtgggagtttctcgagcaaggaacagaacagtggagcgaagaaaccgacgagaggaggagaaaccgaagggaagaaagaaagagaaacgcaagtagtaatatatacagacaaagatagaaggggttctccgccgagctgcagcaaggaagcaaacaatcatgtacacctgcacaccaaacacccacaaataggaaccaaacaaatggctagctgagatgacactgccccacctatcagcgatataagtgcagcgcacctagctacaacccaagaaaacctgaccagagattagctgtgttcggctgagggagctgggaacgcgcacagtacttttcctccgtgcacgcttttcaaactactacatggtgcaattttttataaaaagtttctatacaaaagttgcttaaaaaaattaaattaatccatttttgaaaaaaaatttagctaatacttaattaatcacgcgctaatggatcactccgttttccgtgttcactgtgcgcgctgggaatggatggagccgaacacagcctaacagcataggctgcagaagaagaagactgcatggaccaagccgaatgaaccaagcatccaagcggattggacatggcccaggacgcagaggaacggggcgcatacaccaggaccacagcgatgcctgatattgacaacccacgcaaacgcaccaatagcggagaagccatcacagagtaatcccactacaggcgcggtctccaacagcatatggtcctagaccgtaacacacaggttcagaataaagcagacccaccggccagagagaaactgtgccatggacacagcgcacacgcgcaccaagcgaccaaagcaatctgacacagcagctaaggcaaacagcatagacctgttccacgttaggtacgaacaggcagaggccatgcggcccacacggcagccacaggcaatctgtggaccatggctacctcaaaaaacaaagaaatgcaccacgcaacgcataacaccggagaaaacaatggcaaggacacccaccctaccctgcgcgcggcgcaatgcaccgcacacaaaccaaccaaatgaggccaccacacagggaacaacacgtggcggacgcaacgcagagaaccagcggacgagaaaaaggaaaatgtggcatgccaaacgcaccgacgcacgatggtcatccaacggcggagaacgcgcgcaacgaccgcgctccaaatccacccctgggctccggctggatgacgtgccaagcaacggcaagggccacgacagcgtaaatcgccgcccagagcagccatttccggcgagtttgtatatagaagattaggcatactagtcaccaatctgtagcatggactattgttagcctcgaatttgatcttgtatgctggataattcgttattttcccattttgatggcttgtattaaaaacactagtacaaaatgattttttgcagatagtccataaggggtttacgtgtgcggcatcgctacccgcacgcactaaagggtcagcgaaaatcactatttttgcgtgcgggtggcacacccatacgtgaaaatcggatgatcgaaaaaaaattccgaaaacgcaaaaacttaaccatagcaagagacacttcttcgtgaggggacatgtcctagtaggacatgtttactatatgttcacatcccttcttcttgctttataaatacgtacgtgtaatcatccatatacaaacgtaccaagtgaatacaagatttgatccctcttgctcaatctctctccctcccgcaattccctacaacaaaaaatgtacaacggcaaaggcatctgatcgcatgatgatgtgtcccacgataccgccaccatgcgtggattagacgtcactaaaatcaatccacgcgttaatttggactaatcgatgcgtgcgcaccggttagattttgtgttttgcattatgcacctcagttgaattggtcgttggccaggcagaagactttcaaaagattaaacccacaaggatatttaccaagacaatcaattattgattcatagctttaccgtgtagatataatgctgctacggaaatgagagatacgacgtggagatggacatacatcgactttattagaacagcgcatttcctccgtttaaaacataacaaaaacaaatctaacattggatataatccagtactcttcctattctagtattggacatgatgacataacctatcttacatagggataaaaaaggggttcctaacgcgcgcgtacgtgccgcgaacggaactcgcgcgtacgctgcccgtcgctaacatgtgattagcactaataataacgtgatagtgctaatcataattagtacctaattttttttttccttttttctaatagattaaaaactttcaagttagatttgaaaactttcaacttaagatttaaactttgaagttaaattttgaaatctttcaatttcaactcgaaatttaaatttggaagataaattttgaaaaatttcgactcatatttaaaaaatttcaactcgaaaattgaaaactttcaactcagatttaaaaagtttcaacttggatttgaaaagttccaactcgagatttgaaaactttcaattcggatttaaaaacatttaactccgatttaaaaactttcaacttgagtttttaaatttgaattatgaaagatatttttttattaaaaatatcttataatagaaattttgaaaacattcactacatcctaaattaactaagatgaaaatggatcgtatagatgcatgcatgcatgtgtgggaccgaggtgcatacatgcatgtgcagttggcttgccacgtgcgcgcgagataagcatctgctgcgtctgcgcgaattagcatttgtgcaaaaaggggcagttgatttaactacggtactaataaaatattagcatgcatggttgacgttgaatgagagcctatattgttcaatatttgaacgtgcacaattggttaaggttaccttgttttcttccaatcataatagtagatggttataagtcaccgccatacatactgtacttcagtttgacctagagtcctagagagacgaccactcactatccaggatgcatatcgtactagcaataatttcaatccaaataggtggctcatggttgattataataccttcgtgcttaaatgaccatgtttctgactacataccttggacaggtacttaggaattatttagttgggaaaaattttttaggtttggttgtcacattggatataccactactacagaaaaagtaaaaggtgccggttcggaagccctaataggtgccggttttctgaaccggcacaaaggaggcggcactgatgatacttgtcatcggtgccagttctagaaccggcactatatggtcctaataggtgccggttctaggccaaattgtcatgtggctgtcaaataggtgccggttcgcggcgcgcgtgttaggaaccccttttttatccctatgtaagataggttacgtcatcatgtccaatactagaataggaagagtactagattacatccaatgttagatttgttttgttatgttttgaacggagggaatgcactgttctaataaagtcgatgtatgtccgtctccacgtcgtatctctcatttccatagcagcattatatctacacggcaaagctatgaatcaataattgattgtctttgtaaatatccttgtgggtttaatcttttggaagtcttttctgcatggccaacgaccaattcaagtgaggtatgcatgattacaaaacacaaaatctaaccggtccacacgcatcgattagtcctaacgcgtggattgattttagcgacgtctaatgtacgcatggtggggtgggggtatcgtgggacacatcggctgtatttagatctaaagtttagatccaaactttagtccttttccatcacatcaacctgtcatacacacacaacttttcaattacatcatctccaattttaatcaaaatccaaactttgcgttgatctaaacacagccatcattatgcgatcatatgcctttgccgttgtttttgttgaagggaattgcgagagtgagagagattgagcaagagggatcaaatcttttattcacttggtgtttgtacacggataattacacatatttataaagtaagaagggatgtgaagatattataaaaattttggcgtaccacatcggatatacggacacacatttgaagtattaaatgtagactaattacaaaacaaattaccaaaaactgaagttatttcggaacggagtaagtactatgattggatcaacatatgttggtgcttgcccattcaatttatccttactctttggtgttgaaataaggttctcctagccggtgttcggctctgaacgagttgcatgtcatcaaatcgccctctctcactcgatctggtggctaacctgatgattctgaagattttcggacggggaacatcgaactgaagaacaagttcagcagaacagagcaaaaacagaacaaaacaagataaatttttgcattgcgtaatgccgtgcagcttttcgttttttttctctatttattcacctccatatcaaagaagtctgttacatgtaaaacatgacaaatgaaacagctagatctgagagtccgtgccatgcatcccacgatctgtttccagctcggtcacaaccgactaaaaacacggtagtagctgatctgaataatggttcctctggactatttccagtcagcctattacatgcacgatgagataactgaaaaactaaaaatgcagctatacacgaggaaatatgaatgctcaagattatcccaacattgccatggctccgacgtgaaagcaaagcactgccaaaatagaaagacgtccgtatatatgcactcatgcatcaagtcatcggtcggggtagtggactggatcaagtcagcagtccacgggtcattgccactctactgtccctagcaagacattgacctcaaataaatatggcagataaggacttgaccgacgccctgacctcaaataaatatggcagataaggacttgaccgacgcccctctcgagccctttttacttatatgggtaaaaattttgacgtgtcacatcggatatacggatacaatatttaaagtattaaacataaactaataataaaacaaattacataaattccgcccttaaaatgcgagataaaattattaagtctaattaatccgtcattagcaaatgtttactgtagcaccacattgtcaaatcatagagtaattaggcttaaaagatttgtctcgtaatttacacgtaatttgtgtaattgtttttatttttaatatactctatgcatgtgtccaaatattcaatgtgacagggtaaaaagacatactatacaacccaagcataactatttttttggataattgataaaagtacaaaaatatataaacacgtgaaaaaaatcgtatagtaggtaagaaagaaaattttagaactcatatctactatattatcacataattctctcgcaacaacttgcagcgtaccatctagtatatatataggctgcagtgaatttataggtgtatatatttctcctcgccgaggccccaaaccacagacatatggtgctagttcaatgcccatgtttctgatgatcctgcttcttatcactggcagcctggttcgttcggctgccatctccgaaccttcgattgccatccccgacgacggcggcgccacgacggtgtttcccggggccagcatccgcctactccatcgatagttggttgtaagtgccttcctttccgtcagagagaatttatctatagaaactcttgcggaccgttgcgcgctacagattagtcgtcgtgtcggctcaaacgacggtaagaactaacaagacgcttaagaaaggcgatctttaggttcactacattcaaatagagaaaatataaatataaaaatatatataatcaagataattacgccaccggaaaggtaaatatatacatctagaccgttgttcatatgcacctcaatctcctggtcgacatgtgtacaaatggctccagtgcaaccgtgttccatcatgttaccttcccggtggagttgctatatataggcacagcatatattaggtaccatcaaagattgagcagtacgcactgctgcattcaacactccaattgctagtgtggatgttgatgccactgcatattagcccttatttagttttcaatgttttcctcaaacttccacctttccatcacgtcgaaactttcctacacacataacttccaacttttttcttcaaactttcaattctagtcaaacttccaattttggcatggaaccctaaatgacacgttgaaggagacagcttgccttttgagtttttttttcctaacagctttgacttttcagttgttcaccgttgtgctgattttcttcagcaaactagcctgccactacagtcgatactctaatttatgctgattttctattcttttacactaactttgcacttatttaattatatatattttttattttcatatatatagatagatgtatccacatatccatgttacttacggattctgtaattagtttttctattagtgcctgaacaccccatgcaacatcctatataatacccgatgtgacatgctaaaacattacacccctcgatctaaacaccccctgtgtctgtgtatatatatataatctcatcttcaaactcattatatatatagatcgagaaaaaaaaagacaaatacctgataaatttatactcacaaaactatcagaatttttatgttatttgttacaattaaaatataatgaaagtatttgtatatttttttctagatttttgagtgaaatttgttagttgatgtgcatggtatgtacacgagaagttttgtgtgcataagatatgttcccttctaataatatcccaacatatgaatttatatgtacaggattgcatgtgaaaaatcaatttgtgtagtacacgcgataagaacttttctaggtgtgaccaccctttagctaagtaatcttttcatttttagaacttttctaaaatatatttagaattttatttttattttggaccttctaaattctcttcgtgagcacatcaacatactccaacacatctgcaccctcatgccaagatctaccctattaatttacgtctaaactcacatcttgtgcagagtagaggttggacatgtcaaagacaaaaacggtaattaggtggtaaaaaatgtaattaagaatagtaaaaataaaaatattggataattggttcaaagtaaaactatgataataaaatataacttgaagtgtaatttactcaaaatagaacaatatgaaggaatgaaaacttagatctggaggagccgaagctaatctcgtgcgcggctggaggcatgcatccgccaaacgctctactcccaatatactcccttcatcaaaaaatgtttgacgccgttgactttttaaaaaatgtttgaccgttcgtcttattcaaaaaatttaagtaattattaattattttcctatcatttgatttattgttaaatatacttttatgtatacatatagttttacatatttcacaaaagtttttaaataagacgaatggttaaatatgtttaaaaaagtcaacggtgttaaatatttagggacggatggagtatatatatgttgcaatcgtcctcctgggcctcaaattaagacaagagtaaattggatatgatcatagatatatatgatcatagatatatataaatgccaggtaatacgtactagtagtattatagtttcaaaaacaatactgttaattaactaatctgacttgtggctacagaaaaatcgaaaactctacacaaactctctttttctccgtacttcggcaagcactcgcggtttattttcttgtggaattttttagtaaattcattttaagttcttatcatgcaatttgcgtgtatttttaccaccatagtaagttcctgattctagcagtgaatcaaattaaaccagatttttcggttttcgtgtgctatgcaggtaccaacgacccttacattgttaccagttgtgctccttcacatcgtgcttaccagtgcaacaggccaccatgtgtccatatcgttcatgcgagcaccgcggagcaacgtttgccttaattatgtacttcctcagttttataatataaaatagtttaggttttgaataaattaatgcatgaattcatgtatgtgttttaatgacatatacaaattcatataaatgttagtgaatctagacaggtaaggtaagagagaagtttaaatgacttatagtgtgtaacaagcgtgttgggagtacgtataggtcccggtatatgcgaatttctgtacctttttatcttatgtatttatatggtcctattaagaagtgtcttttgttcgtatgcgtcgcagtagttggcccattgtaatcggctagatggatcctgtaaattgttaatgatgtacagtgtatatatgaagaaaataagattaatttcaactgaggctgtttcttaaatgctttttatgtactaacagcatttgtcactcttcacattatgacgatgcaaccagagtatgtaatcgatcaattcatgtaggaagttggtgctctgatccctccatttcttattattatacattttaatttttacctaatcaaacttttttagacataactaactttattaaaaaaaattagtaatacatgtaacatcaaattagtttcattaaatctagcactaaataaattttagcagtacatttgttttgtgtttaaaatcactgcaacagaatcgacttgcgtagatgagcccccatccaacttccgctgcgattatattgataaaaaaaaagactagcatggtaaaatcaattttcgcagacgggcctcttaactacctcgcctaccactagccaaccagaccagcatccactctctcttccgtaaaatatctttgtattctttcccccatccctctccttatcctctctgctacacctatcttccacttcctgttctctccacctctccgctccacttcctccaacggcaagtggtagcgggagcagtgagctcgagacctgtcagcgaccatggggtctggcggcgagattgtgagaggccgttgggtgcggaatccggcggtagcggatccggtgggctctccccatcccgtgtagatccaaccgactccgctccctcgtcgtgcgttgatccggtaggcatgggcgcatggcctctcccactgcaagccgacatgcagatccgccaatggcagcaatggaaagagatgtcaggtagggtatcagtgataatgacaatagttgccggataggtacacgcgacggccgctaggcacgggagctgcatcccgcttctagctagggttttggattttttgggaattcttttttagctaaaaattctttttgcaagaggatgccctaacagagagaaaacaaacggtctgttttgatacgctctctctcgtggcccgatcttctggtgagagggataactctcgctttgatcgagtgcgacgtttgcgatgtggctaccatccagaataagtctaggacgccgtgcaatcgctacactacaaacgatgtcgtaccaaccgtgacgcgcggttgatcatccctgcaatgcaaacgagagaacactgcaagaacaagataagatgcaatataaatattgcgaataggtgattaagcacaaataaatagttgcgattgaagtggtagatctaatcgacccggcaaatcaacacaccaactattgggggctctgaatctatagtcgccgactaatcgagcgaggactagagacaaggtgaatggcacttggcaaaattcaactaaacaaaacccaaatgtttttgaggatgtacaaagctatttatagaggaaaataaagctagggttaagtgctaattcgtggaggtggagggagacacttccgagatgggcctagtctattacaaggcccaaggcccaagttcggtttcagcaacaatactgtcttattttggcgattcccgttgactcgagatgaatttggacatgagaccagatgcgtttgaaaggtagcgagataagctttccacgaagtccaagatcacccaaatcggagttggcatgaaggtgctaggtccgtttgaagtcagtgctatctccggaggctgaactggacttggacttggaattatcattggagcgtgtgaagttatgagcgtatccgatgaagtgatgtcctcatcatcctccccttcttgaattggagttgtcctcgactcaatcccatcttcttgattgtgtgcactctctcgtccattggccatccttggaggtatctcatcgtgaaaaacatcctcatattcctgcaaaaggttagtaatagcgggtggcaaagaatataaagtactaggagcagtagccaatgtgagtataggatctttgcaaaatagagcatagcaagaagaatctggctgatctagtgcacaaatattatatttagaagccaacaaagcacccttcaacttaatttcattctttgtggtacttggttctattttactagttgaagcaggatgtttagcaataatctgattttcacttttcgctttcttttcacattcaagtcttgcaaaatcatctttcaaagcagcggctggagtcatagaatgcaaaacaactcttttaccatcgaacataaatttatatgtattagtcctaccatcaaaaacaacttctctgtcatattgccatggtcgccccaaaataacagaacaagattgcatatgcacaacatcacattcaatttgatcatggtaggagcctatagaaaaaggtattttaaccaaacgggttaccttcatcttaccacatgtattaaaccactgaatatgatacggatgtggatgtggatgggtagtcaagccaagcttcttgaccatctcttcacttgctaaattgttgcaactcccgctatcaataatcattttgacggtatggcctttcacaagaactttgctttggaacaaattgtgacgttggttttgctcttcacacttctctttagcactaagtgctagcttgacaattaggctaggatactgatctagcgactctggatgcaaatggactttctcgatgtcatcattatcttgtcctcctgcgtggttagtggtagctaaagcatattcatcatcacaatcactagcagaagtatactcaccatcagcattcacaaatagagctcgccgatttggacagtcacgtgcaatgtgtccaatgccatggctcctatgacatgtagtatcacgggtacgtccagtggaaactactgaagtttcactcttggctggagtctgaactgaagcatttttgcttgtttcttgagcatgggatggcgtggaggtaggtggtgtggaagaagctggacgaacggcagtagtagattgacgtggtgttgactgtcgtgtagaagtagcacctgcaaaagaactcctatgcttgttgcgtccctgcacttctctttcagctttgcaagcaaaatggaataatctattcatggtattgtattctttatattcaagaatatcccgaatttctctcttaagacctccatagaacatagaaattctagcatcctcagtttcttgcaaatcacagcgtgacaaagtaatcatcatctcttgatagtatgtttctacagaattgggaccttgtcttaaaagttgcagtttatttaatatgtcacgagcatagtaaaaaggaacaaatctagatctcattgtacgtttcatatcatcccatgttctaggtctaagtcctctaccacatatatcattccaccatagagatgcaaaggaggtaaattcactactggcagctttaactttcttattatcaggaaaatcatagcaggagaatttttgctcaacagctaactcccaatctagatagacagaaggctcaaacttaccatcaaaagaaggcatagtaaaattttaccttagataaaggatcatctttgtccctaactcgacgttgtcttctatttctaacactctcgtcttcctcctcatcatcagcaacagattgctcttcatcttcattgtcatatctttggtgtcgatgggcagtggcacctgcaccttcttcacctgcagcctcaagtaaaccaatgcgtcgcacaatattttcatgtccaatattcatattctgaatgttttcagttaattgtttatgtgattgattcattttctcaatttgatccactactttcaccaggctttcacttaaggtttttaaatgtttatctgtgctttccttgtatgatttactattacgcatcaactcttcataccaattttccatgcccttcagtttatgcgctagattctccagtgttggttcatcggaacttgtacctgacatcgttagcaagcaaaagaaactcacaagaaagtgtcagttcctaacaatctatatatatgtggaggttttgaaggcactcaacactcaagcatataccaaattcttataatattctcaatgaatgcaaaaactactgtggctggttcgtggcacaatgacacgcttgatgagtggagcgattgcaaagccgaacctgtaaaggttactagtatgtggatcttggtaggcttaactatatcacaaggaatagcataaatcaaacagaaatgtgaaattgaataataatccaaagtactagttaaaattgctggcgtagcctagactcaatcttagcttaagcaagcaaatgatcacagtcggacaatccacaactcgctatagtaagcaactctctccaagattccaacaaaaaaaaaattccacactttctttttctggttttttttctctttttttttctttttctgattttttcttttttttccttttctgattttttttcccatcgtctaccatacagccgaaatatttttttttcttccatcaccaaacattagttttgagccacgcaatttcattcagcttttgctttattgagttttgatccactgtcgagtcaagtgctggtttaagctctagattagtcttggtttgagtttgcaagtgtgcgtcgccaccgtagagaaagttgcgcagaagattgataggtagcagattggtttgcgagctgaggttctgttcgcatctgagacgattattttgttatcggttgcatgtaccagataattagggaaattttgtttccttgttattccctccgagattttatcgtgcaaccaagtgaaaaaaaaacccagatatatttaccatactttaaaccgagcaattttactgcgcatgtgtttccttgatggatcagctgcttatttgattaagtctctccttgatttcatgggcatgcatgggagaagttaattctgtaccgaatgttagagcctagctttcctgtacgtgcttgcagactagcaggttttgctatttcgttcttttagtgtgagtttgctgggtggtctgtaattttttttttttgcccagctattttgtgtaatagctgtcgtttgttaaaaaaaataaagaaaaggcagaaggtgcaaaaaaaaaaaagagaaaaagagccccaccaaaaagaaaaaaatcagaaaaagaaaaaaaaagagaaaataaattacaaaactaaaatcctcaccaggcaactaaagctctgataccaactgatgacgctctctctcgtggcccgatcttctggtgagggggataactctcgctttgatcgagtgcgacgattgcgatgtggctaccaaccagaataagtctaggacgccgtgtaatcgctacaccacaaacgatgtcgtaccaaccgtgacgcgtggttgatgatccctgcaatgcaaacgagagaacactgcaagaacaagataatatgcaatctaaatattgcgaataggtgattaagcacaaataaatagttgcgattaaagtgatagatctaatcgacccggcaaatcaacacaccaactattgggggctctgaatctatagtcgtcgactaatcgagcgaggattagagacaaggtgaatggcacttggtaaaattcaactaaacaaaacccaaatgtttttttaggatgtacaaagctatttatagaggaaaataaagctagggttaagtgctaattcgtggaggtggagggagacacttccgagatgggcctagtctattacaaggcccaaggtccaagttcggtttcagcaacaacactgtcttattttggcgattcccgttgactcgagatgaatttggacatgagaccggatgcatttgaaaggtagcgcgataagctttccacgaagtccaagatcacccaaatcggagttggcataaaggcgctaggtccgtttgaagtcagtgctgtctccagaggccgaactggacttggacttggaattatcattggagcgtgtgaagttatgagcgtatatctgacgaagtgatgtcctcatcatgtttggttggagggagtttttaggagggattgagagtttagagggatgaggctattaactattttgtttggttgggcgacatggtaattttggtgggatgggatggggaattgaggaatgaactccctccttttcaatacctgggtaggggcaggtaattgggagggaattcctcctttacttcgcctaaacaaatatcagccatccattttcattaatgatctaatctccaactaaactccctatcaatttccaccacctctaccaaacaagagactgggatgaaaaatcaaattcccatcttaatctcaccatcaattcccttgtataaactcccaatccccttccctcaagttgccaaacaagccgaaatggtaagccgctcgcgtagcacagcctggttacgcaaattggtttactctctctagctaaaggacgtgactagacagctaccggtcgttggtttgtcttatccagcaaccattccatccggtataaatcccccttcaacttaaatcacatattatttttaagatatatttgtatcattgtactccactcaaaatatgtgtcaaaacgagatccatactgaatatattcaaacattttattaatttaaaagtaatttattacatgttaggaagtaacttctatattaccaggaaataacttttacatcttatacatgattaattatcattagttacttcatcaatattatttacaatccatcaaaagttttatcttcttttctcatactacattgaaaacaaaagtgaaaaggaaaaaacaatcaatgcttaaaatagatttatagaaagatacttcttaaccatgcaaaagttacttccaattaacattgtagttactttaaaaattgttaaacttacttgtgctgattaaatttaatataatttaatttctagatatatagagtcatatttttattcctacaacgaatttacttctaatgtcgtgacaaagttactttatttttgttttatgttacttttataatatatgtaaattacttttaggctttattgaatttacttttatatgtcttaaaagtaatttagatatattataaaagtaatttgtattttttcatcaaaatataatcatgtgagatcttgttataaagatttatttctacgaacataacggtgtaatcggatcgtagatcggatgagtagtttaagagaaaattttatttgaagcataggtggttcctatttgcttggactaatattatattttcagtagagtaatggcttcagtggtgtcacgctgtaggagtaaaccgagaggcttcttggtgtagattttgcactaattaaagtgtgcaacatcaaacattccagtgatgagtcacggtagttagtcctgtttgcctccttagcaattgtgtggcactagctaagctattattatcagtgaaaaatacattctacatctcgttatgctggtcgaatcgaacgcatacgaaaaggtttcgatttcagcactggtatatatgatctcgtcgtatagttcgagcagacgaagagcttcaccccaggccttcttctccacacatttgcctgaatgatctgtttcagcaacagcaatatctgcttttataccacctgctattgacacttgtatttcaagttagtcatagagccagacattctcgatgctttccaagcctatatatattaattacagtatttaattagcatctcagtggctcagtgtcacagcattgtaaatgatacttctatgacacaaagcattcttgctcctatgatagttttatctatggcattcatataatgatcatgccaaatcataataaataatttgagtttattgacccgaaacaacaactgcatacgtcgaaagacgtggttactccacagtggttggaaaagaagtaaagtgtattaatttgagaatttttcttggggatccccctattacatggccttatgagactatttatagcccttattacaggatcttactactagggttttagttatacaggggaatttacatggttacccttatgaaagggatatttacatgggtgcatagtgtaattgaggttcatagacctctgatgggtcgtcgggcgatcgtcggcccaatcgcccctaggattgatgagccggaaaaggcttcttcggccctcgcgggggcgaggttgctttggtgaagtcgtctcccttcggcatatactcttcgccctgcatccttcgcgcaagaggcctctagcttggcagagtacccgcgcgatccctcgcctctcgctgtccttgttccatagtcttcgccatggggggacttcgccccgactaactttgacgtctcggacttgaatcctcactctttacatagctttcggtagattttggttgaaaggcctcgtgccataccgccaacaatatatatggtgcggacacgctataagtacatacgaagcctgaaaacaataaaattttaacgagcattttgctgacttgtcatgggtcagggcaaaagccaagtgttgtccatctggctccatcgcgctgtcgagggccatgtccaggtacaagttctgtgttaattatatgtatagcaaaaaaatgatctcttgacaagttgttgatgaagttttttttttttttatggatcgttggttattatttttagtacaacaattaaggtggcttcatctcatctgtggtacacatttcactggtggagaaaccatctttcgtcggtcggccgatttccacaatagtcccggatgcaataaaaaccggggctaaagatgatctttagtcccggttcaaaagggtaacgggcatatttgatctttagtcccggtttgtgttaccaaccgggactaaagatcatctttagtcccggttcgaatgctgtcaggtcatatcaggcccccccgggatctttagtcccggttggtattagatcgtaactttagtcccggttggtagtaccaaccgggactacagtcccacccctatatatatgtcttcttcctcctccagctgcccgagtaagcttcaaaatttcttcaaaaaagaggggaggtcatgccaaaatttctattgaatttattttggtgattaattacatacaaatcggaggtgcctaaaaggtttgcaacttcatcctccaatgttttttttgtcatactacatttgcacctatgttttgcacactttttttgtctccaaaatttagttgtaagttgatgagagagaaaatgtgtgtggggaagaaagaatatatagaaatttagttcatttgctaaacaaggttttataaaatagttgagaaggaaaactctagtgaaagttaatcttaaataatagaaaacaaactaaaatgaaaattaaaagaagtaaaacacattaaaattagtttaaaactttacaaatagtttttaagaattatttggtgtaatattttatgatttttgtatgaataaagatatcttataattattgtatgactgtcattattgtaagaataattatttgtgtacggtttttttgactcatgtagatggatcggcaatggatgtacgctgaccggcggtccaaagagtttattgacggcgtgcactattttttgagagtggccgaagctaacaggcaaaggggttttatttgttgtccatgcaataagtgtaagaatcagaaggagtattctgcatccaggactattcatttccacttgtttgagtcggggtttatgccaagctataattgttggacatcccacggagagcaaggtgttgaaatggaagaagatgaagttgaagacgacaatattccggactttgctcagtatgttggatttgaaggaaatcaaacgtgcgaggaggaaatagctgctgatcgtaacgacgttgcggatgatcttggtcagatgttgcaggacgccagggaggactgcgaaagtgaaaaggaggcccaaaaattggacaagatgttggaggaccacagaacttcgttgtacccaggttgcgagcaggggcacaaaaagttggataccactctggagttgttgcaatggaaggcaaaaaatggggttagtgacaaggcatttggcgatttattgaaactcgtcaagaacattcttccggggggaaacaaattgcccgagacaacgtacgaggctaagaagatagtctgcccgttaggactggaagttcataagattcacgcatgtccgaacgattgtatcctatatcgcggtgaggagtatgagaacctagaagcatgccttgtttgcaaagcactacgatacaagattagacgggacgatccaggagaagttgacgggcagctaacaaagaatagaattcctgctaaggtgatgtggtatttccctataataccacggctaaggcgtttgttcaggaacaagggaaatgctagaatgttgcgatggcacgctgaagagcgtcaacaggacgggatgctgagacaccccgccgatggttcgcagtggcgaaacatcgacagaaaatttaaagaatttggaaaggacgcacgaaacatacggtttggtttgagtacggatggcatgaatccttttggagagatgagcagcggccatagcacttggcccgttacgatgtgtatctacaacctccccccctggctatgcatgaagaggaagtacataatgatgccgattattattcaaggccccaagcaacctggtaacgacatcgacgtgtacctaagaccactggtcgaagatcttaaacagttgtggaagaaggaaggtgtccccgtgtgggacgaggacaaacaggaggagtttaacctacgagcgctgctgttcgtaaccatcaacgattggcctgcacttagcaacctatccggacagtccaacaaggggtacaaggcttgcactcactgtatggatgaaacagaaagtacatatcttaagcactgtagaaaggttgtatacatgggtcatcatcgattccttgcagcaaaccacccggtacggaagaaaggcaagcacttcgaacataaggccgaccaccgtacgaagcctaaacatcgcagcgggaaaacagtgtttgctatggttaaagatcttaaagtagtgttcggaaaggggcctggaagccagcatataaagagcgaagatggtcacgcggcgatgtggaaaaagaactctatattttgggagttaccatattgggaattcttggacgtacgccacgcaatcgacgtgatgcacctcactaagaacctttgcgtaaaccttcttggcttcctaggtgtatacggaaagtcgaaagatacactggaagcacgtaatgatctgaagcatatggaacaacgcggcgaccttcacccggaaccaaaggagaaaggaagccattacttgagtccagccagctacactcttagcaaggcagagaaggaaagtatatttgaatgcttggagagcataaaggtaccgtctggatactccacgaatatcaagcgaataataagcacgaaggagaagaagttcacaaacctaaagtctcatgactgtcacgtgttgatgacacaactgctaccagttgtaataaggggtatccttccagacaatgtccgggcaacaataacaaagctatgtgcatttatgaacgcaatttcgcagaaggtcatcgatccggatagattagaagcccttcagaatgaagtggtgcaatgtctcgtcagttttgagttgatatttccaccttcatttttcaatataatgacgcatctgctttgtcaccttgtgaaagagatccgtattctcgggcctatgtacctacacaacatgttttctttcgagaggtacatgggcgttctgaagaagtatgttcgtaaccgtgctcgtccagaggcaagcatcgccaagggttatggaacagaggaggtcatcgaattttgcgtagaatttatcgaagaccttcgcccaatcggggtacctgaatcacgccatgaagggagactacggggaaagggaactctcggaaggaaagcaataatgacggtagacaacaatttattccgtaaagcccatttcactgttctgcaacactcttcattggtagttccttacatcgaggagcacttggctctagttcacgccaggaacatcggtaagtccgatgcatggattacacggcatcacattgatactttccccgcgtggctacgacaacatctcatgggtaacgagtcgatcaaccaacaacttgccttcctggcgaggggaccgtctgggtcgatcacgacattccagggatatgagatcaatgggtacacattctacacgagaggccaagacatgaagagcacgaaccaaaacagcgctgttcgtgtcgatgccatgggacacgatggaacaactgccacgtattacggtgccatcgaggacatatgggaacttgactatggtcctctcaaggttcctctgttccggtgccaatgggttaggttgactggtggaggcgtaatgattgatgacagtgggatgacaactgttgaccttaacaaggttggatactcggacgaaccttttgtccttgccaatgatgtaacgcaagtctttttcgtgaaggacatgtctagcaaaggaaagaagggcagagggcctgatgagcctaagcgtcaagtggttctcccaggcaaaagaaaaatcgtcggagttgaggacaagactgacgaggattacgatcagttggatgggcaaccccctttcacggtgacgattgaccctagcatcctcctatcaaatgaagacaccccttactcacgcagcgatcacaaggagggaacaatagtgaggagaaagtacgtgcggtcaaccgtcaccgccgatgtaatgccgtaattattgtgtacacgatgtaaactattttggatgtattgattatccatataaatcaattgatgtatggcatatgttaattacgcacgattattagaggtttcaacaagtttaaatcatgtatatgctagttatatgtgatacttacaatttttaaaagttttaaatcacacaggtggaaatatcatatgtatgttaattagagtttttaacatttaatttactagcattcatatgctaattataattgactagaggattttttaaagttttaaatcacgcaagtggcaatttcatatgttaattagagtttttaacatttaatttactatcattcatatgcaaattataattgactggagagtttttaaaagtattaaatttaatatatttttaaaactattattcatatattagagtttttcacaatttaatttactatcgttcatatgctacttatatatgactattcgaatttttaaaaggtttaaatcatgcatgtggtatttacatatgttaattagagtttttagcatttaatttaatataattcctacgctaagtatatatgatgattaaaatttttattaattttaaatcatgcagtatgtacatacatatcttaattagagtttttaccaatataataatatcattcatatatatgctaagtatatatatatattggagtttttattaattataagtcatatatttgcttattacgatttatccacttaatttattacagacaaaaataatttttcgaagtaattgtcattaatctttgtactttaaataatgttaaggcattaacttctattttataaacacatatgtaagcgaaaatcatatgcagtgctataatctttagtcccggttcttaaccctaaccgggtttcaaaagaatttcgaaatagcgggagtaaagatcttttctttactcccggttgttctcaacaaccgagactaaagatttagtcccggttgttctcaacaaccgggagtaaagatccgggggtgtatatattcctggtgcgccctcgtcttcttcaccaacacttagacgttttcggccgatcgatctctctcggcctctctccttcgccgccactgcctagggcaaatccccgcgccgacgccgccgtatctcgccgtcgtctcgagctcgtcatcctcgccgccgcctccgcctcctccgctgccgccgcatctctggggtgagagccgccgccgccagatctcccttcatctcgatctctccgatctcgatctctctccgtcgcgccgcccgccacgagacgccgcgccacgacgacgacgcgccacgccgacgccgcgcctagccgccgccggcacgccacgccgccgtcttcgccgccgcgcgcgcaatgccgccgccggcacgccacgccgccgccttcgccggcgcgcgcgcaatgcggccgccggcatgccacgccgccgcgccaaccgccgccctgatgccgccacaccgccgttaacgaacgagaacgagaacgatcgaacgaacgagagcgagaacgaacacgtcaacgtacgttgccgcgagaacgtgaacgagaacgagaacgatcgaacgaacgagagcgagaacgaacacgtcaacgtacgttgccgcgagaacgtgaatgagaacgagaacgatcgaacgaacgagagcgagaacgagaacgatcgaacgaagataagcgagaacgagggaacgaacgtgaatgagaacaagcgaacgaacgtgaacgagaacgagcgaacgaacgaggacgaacgttaacgtgaaatgcaatatatatatatatatatatatatatatatatatatatgttacttcgcatttatcataatacatctttttatatcttgcagaaaagacgtgttgtcggagtcgtccgtcaagcctgagtggaagagctagccctagaaggaattagagcagtcaagtgacgtaataatataaatgattgttatatttgtaatgcaattaattaagattattagacctgtaattagacttatcatataagattgtgtagtgttctaatattatttgagttttaatataagattattttgttgaaaattagacttagtatgacattattgactacggaattggtgcgactcctagcaattgactattgtagtcttaattagacttagcatatacgcacgaaacacttagcatacatgactattttagtcttagcatgtaatattatttgagttttaatataagattactttatttgtaattaggtttagtatgtaattattgactacggaagtggtgcgacaagtagcaattgactattgtagtcttaattagacttagcatatacgcacgaaacacttagcatacatgactattttagtcttagcatgtaatattatttgagttttaatataagattactttatttgtaattagacttagtatgtaattattgactacggaattggtgcgacaagtagcaattgactattgtagtcttaattagacttagcatatacgcacgaaacacttagcatatacatgactattttagtcttagcatgtaatattatttgagttttaatataagattattttatttgtaattagacttagtatataattatttactagctagggttgtataatatacgtcacctagacttagcttatatcacgatttgtaattagacttagcacgtaaggttgtgtagggttctaatgtacgacatttacacttagcatacatgacttagattgttaaaacataaatgtctcgtgacttagcagatgtttcttgtatcaacagatggctgaccgcgatgaggaacagatattgtatgatacaatcgcggagggaagcagccagtactagaatgaagaagaggggaacgaggatccaaaccagtacttgaacgaggaagggaacgtggagagggatgcggaggggaaccagcaagggcacgtggaaagggatgtggaggggaaccaggaggaggaggctagtggtagtcaaccctccattggacagaagagggcacgtgggcaacgaggtgcagcgaagaagcttgagggtcggcacatcataacggaagtggaagaagatggacgtcctagtgccccggccgaagccgccaagaactatgtacgtcacagcggttgggttgtgcgggataacgtgcctgtcagtacggtgtactggcgaagaacaagggcacgcggagatcatgagagctttgtcccagattcggagaaagagatgctgtggaccacaatgctcgagacattcacccttcctgcgggtacagaggacaaagtgaaaaggtggactctgaagaaaatggcagaacagtttcagagcttcaagggagatctgtaccagaagtatatactgaaggggcagacaccgaacttcgacacattcccaaagctaagggatcactgggatgagttcgttgcatataagacaggtgaacaagggcaggcgatgatggaaagaaacaaagaaaatgccgccaagaagaagtaccatcaccacttgggttcaggaggctatagtgtcgcgatgccgaagtgggagcagatggaggctagcttgattgagaggggtatcgaaccggcaacagccaattggccgaaacgatcgaagttctggtactatgctcacggtggaacgctcaacccagctgatggctcactggtcttcggcgatcagatacgagaggctgcgcgacgactaacagatgcagtggaagcctcctctcagggcacgttccgaccagacagagatagggacgagctgacactcgccctgcagactccagagcatccaggacgaacacgagggaaaggggtgattccttggaagattggtttcaaggaggacatccacacgtacaggagtcggatgaggagcaagagagataccgaggcgaagattgcagacctagagttccgggtatcgaggtacgaactcaacatgcaagaggaggtggcaaggaaggttgatgaacgcatggccgcacatcggtcccatgatccccagccgaccattcctcctgcaatggtgagcccgtcaggaaaccgtagcagctgcgcctcaacggggcaggtaggatcacagagcatggacgccatgcaaacacaggacgaatcgacctgtcccgttgatgacatcactcagcggacaccatgtgagctgcatattcctttcaagaacttatcaataaaggtaagatttagccattccgctagttgctgcttatatatgttgattactaataaataatctctcacaacatgaaggtggcgtcgggcatggccatcccaacggacccttcaggtacttaccactgcaggccgattccaacaggatactcgaaggtcgaagttgagttggtcgaaggcgcgtacgaggacctcgagctggattaccctggaggagacggtgagacgcatctacgagacacatgccatgccattattctatggcgcaggcggtacatcatcctccctgggcgacaggcggcgtctcgtgcaccatctcctccggctccgccatctcctcctcaggatcctgcaccgtctcctcctcatgctccgccagcaccgtctccacctcaggctccagcatcgactcctcctcaggatcctgcaccgactcctcctcgtgctcctacacctactcccccgcaagctcctcttccggcaccttcaaagtcaggggccccccagctccaccgcctgcccacataagggcaacgaagaaggcgaaagttgacgccgccaagaacaaggacccggggtacgattgcacgcaagaggagcttgacgcttaagttgcatcagaagtcaagagacaattcgagcctcgaagtccagaaaagaagattcctatagaccccagtgtcaggaacttcttcaggggtatgtctgcacctgtcaaggaggccatcaagctatcggactatgagcgaacgctgaagaaagcatcttctggaaattccaaatcagtccctcagcttagagagcaactaaaccaggagatcgagccgttggtgatcggggaagacatgacgatagaagaatttattattgacaccggtctaactacggatcaattgctaggagttgaaccaatagaaaaggcggaattgaaatacatgtacgaactcggtaaaccgcttgtcaagcccgagctggtgcagtccctacccacaaaaatgtacaagttccatcagctgtacatggagatgagcgccaccggtagagagatgatcggagcgaggatcagggacccagacttcttgcaaggagatgatattctctggatcaatttcaagggaatctacgaagtataccagctggatgccctcgacgtctctattatgagttgctggattttgtaagtatatcgtttagttataattcttaattactacgtctcctttaattaattaggtccttgtatataagtagactatataaaataaaatactcccttttatcgttgtagaatggtgattcaaagggcccgacagcggagggttttcgatactggattcatcgactctcggagagtaaacgtcgcaatgctcgaccaatatccgcaggaaacagaggacaatctcgtccatctcctgaaggcgcagcattacaagacgttcatactgttgctgtacaacacagagttagtataattttactgtcttcctacttaccaaatttcattcccgtacgaacttgctaagtgtttcatatgtaatgcatcccacgcacattgcagattccactgggtgcttttactcttcgacctgtcggcctgcaccgtcaacgtatatgactcaatggataaaaaagagtctacgttttacaaggttttcgaacttatagataggtactggcataagttcctctgttaattaagaaattcttattatgttaattatttctattacgaatcatatctttaaactccatgtagggcttggtatcggttccgtcatttcgtccacggcaactggagtgaaagacttaggcggaggttcaaatttcctgtgagtacacatgctctacatttacatttctccgattcaaattaatacatacaagtgtatattaattagatctcacgccgttaatttgtcatttatttgtagtgcgcaaagcaaaagcagggaactaacttgtgcggctactacgtgtgtgagtattgccactgccttgcagaccaaatcatcaccacaagagagctcgatgtacgtacaaataaattcaaattttcattacataacgatttcttgtttaattactaatcaatttcatacattcatatagtttattcgcatgagggataacctgatcacacacaaggaatttatcgcggcggttcaagaacaactcatgggattcatcaacgaagaaatccttgatcccaagggtgaattctactacgacagaaacacaattcaccggtccttagcttctgagctagcagcgactactactacgtcgaaatcgtagctagctaggacatataatggattgtaattaatacatgactacatatgtttctatatgcatgtgtacacattttctataatgtaaatatattttggtcatatatatatctatatacatatgcatttgcataacatatatatgtataaatacatatatattatgcatgtacatatgtactgaaccatatatacatataatataatataatataatatatatatatatatatatatatatatatgtatgcatatatatgtattgaaatatatatatgcatggtttatatatatatatatatatatatatatatatatatatatatatatatatatatatatatatatataaaccatgcagcaacagggccatgcaaaaaaaaaaaaaggtcagctcgatctttagtcccggttatttcacccgggactaaagatagcgatctttagtcccggattggtactcccggtttggaaaccgggactaaaggggggttacaaaccgggactacaaagggtttctccaccagtgctcccaatccaaattttactttggtttttgctcttgtttggatgaatcttaatgtcaactcatcactcatgcatataaggattttcggtcatcctcctggcctttgatatatatccatgggaactactggagaaaggctctgtagtctcggttgggaaccacctaactacgaatctgggactaaagatagacatttattctcaaatcacaataacattctcatcctcaaatcacaaattgaatgaacaaattattctcaacaaacaatcatcacatatcatctcaacaaacaatcgttcacagattaacaaggaaaaaagataaaaaaaaaggaaatacgcatgcgcgccgcccccccctcctgggcgcgcgcagccctgacggccgccgcctaccgtcgccacgcgcctccccagcccgaccaccaccgaccacttctggcagccgctgccgcatcttccacggccaatcccgcctgctccggcgcacacaggctgccaccgccgtgcgccagtctctcactccttgatctaaggcagaagaagataggataagaatgccgtaaaggataagagagagaggggagatgagaggataagaacggtctgctgagagagaggggagatgatgagtttggaggataagccctagggattatatattgtatatggatttttagttccagttgataataccaacccggactaaagatcgatgtttagttccgattgataatactaaccgggactaaagatcccaggccccctgagaaaatctgacggtaaatgaaccgggactaaatatgatccttagtctcggttggtaacactaacagggactaaagatcatcttggaacgatagagttttaaaccgggacaaaaaaattatctttagtcccggtttctattcaaacctagactattgtggtttttggtcgaccggggaaatatggtttctccagtagtgtcagttgcagatccatatacatacatgtaccatgggagggcaaaactgaatagatttgtgttttttagtccatagcaaatgtgtagttctatttgcacatatccccatatataaatcagtttgtactacttcctccatcccagaaaaacacaacctaggcaaggatgtgacatctcttattacaatgaatctggacaaccctttatccagattcgttatactagaaaatgtcacatccctttctaggtttatttttttttttggaacggagggagtatgtcataaatgttgagcttcctctgaaaggactcttaatttcgaattgtaacaagtattcctttgaaattgtgagctaacaaatttgttttatccctcgcacatgaagttggtttgaacatgagatttggtggtgacatactaatacctatacctgtttagcgatttttgcatgtatttagaacttgaaaaatgtccaaatacccccctaaactttatatggtagtccgtctagcatcctgaactttaaaaccggatatccaacaccctaaactttaccataccatccatattaccccataagatggttttggatgatagttttgcatattttggaagcttaaacaaataattttttctaactaatataacatatttggatatcatcagttataagttatcaatttatttttatacagtagtgtcatactattattatgttgtaagtgagagctaataaggagtaaacagaaagatttaagtcaaaattttaatatatatgtccaaagcatatgacatgtgatcaaactcatccaacttatataaacggtattataaagtttagggggttgaatgtcctattttaaagtttagagtgctttacggacttccatccaaagtttagagggtaatttggactttttccttagaacttatatgtcaggttttcacttattcgatggttttcatcatctattccccgctttaacacatgcatggctcatatttttctcccgcacacgtagaattatttcaaatttatatttgaaattaacgtatttgcatataatgtctattttgttattgttgatatattatgtacgaaagaaataaaatgcatccatgcatgtatcgaaaagatcagcatttgtcacttgtgacaagcgtgtactttgtgctagtacagatcgagtatcattattggacttatatctaaaattaatgcatattatcatgacattcactttgtgcttgttgatacattatacacgcatgaaaagaaactagcgattaatgtacaaacgttgaagaaaatatcaaaatatggtgtttacagtaaaactgtgatcttcagtcctcacaataatataaaaattcatcacccataaatctgccagtagacccacatagaaatgtgctacgatcttgggatgccaccacaccccgctgggccatcagatttccaccgtagctgcttaagtgagtacatttctcaccactggtggcaattgaatatctaggaacatatgaggtctacagcggttgctggtaggctggaatgccacacttttgtggtacaattgcacttttgaggatgcatatatgtttttttttttgaaaagcttagacgtcaagagcattgctggatatattggaagggaatgattggtttaagtacaagaacaaggcagatctctggtgagagccttgaaacatctaggaccacctaaaaaggaagccagacaagaacaaattacaaaaggtctatattttcctttatcaagaaagctacttgggtcgctgattgcgatctttgctggaaaatccatcggtttcgctccagccaaacatgccaccaagtggttaacagggttcctatgattttcttcttttcacttttaggcccaatatgttccatctccactaaaaatagaatcccaaaaattagttagtaaccacgtatgattggatgggcccatggttggtaccgattttttttttaagaagcgcgtggatcagatcagatcagatcactcccctgctgtgctgccatttctaaatgccgcgagctcctgccactgtcacataaacccaccggccacggtggtattgacgaatgatttcacatctaatgtggagaaatagaaggcccagttgatcctctacacggccgtgtcatgaatctgtaggttaatatcgtaggcaacatgttaggatgctcttgtttcgatccgtcgcacccgatgaagggcagttggtgctatggatggagggaaggcggcacgggagacgggcagatggcggggatggaggattggtgctgatcccatggaaaaccataaccgaaaccgacgaagttaatacggcagcttgggtgcagcgttgtgctctagttagcacgagaaagaagactgcgcgagaaggggtaaaaggaagtgggcaaaaaaaaaaaggcccaaatcctaaatgggattggccttgattttaggtgtaggtaaattttgggaccatgattgaaagtctattggaggcctaatgttaaccaaagtctcaaaatttagtcttcagtaacatatttgggcctttcttggagatgctctaaagttcctctaaaatcattctaaagatatgctctaaagttcctctaaaatcattctaaagatatactccctccgtccctaaatatttgacgccattgattacataggaccacataagagctgcaagtagtcaatgtgtcatcttttgctgagctggcagcttgcataacaataggtcatttcgatgtagacgttctggttaagaatatcatcttattgaatcctatttacaagatggcagtcgggctaaataagaaaataagaaaaaaaaatcaacgatcaagaaagagaagactctaaatatattacgtttagctgtcaactgaggctgagccactgcgtcgatagattcactccaaaactgctcgttagccactgcagtctgcagcatacagcagccgccgtggaagctgaacaagagttatcgcggcacactagtattctgctatgctactgcctactggcttctatgcagccacgatcacaggatgtagctttagacagacccttcgttagttgcttttgtgagtatgtgactactcgagcttaaacatcagggtagcagatcattgaagagatctagcaagatgcctatccatttctagtcgtcccaatacttcacatgcctatgttttttttttttttggatcaacatggagaactggtcagagacaagttccaatatgggggatatgtcttataggtaactttctcatctgaattactgaaattagcgagcatggttgtttttatagatgaatggactgcttctatacatttatagtagatgaaactatttattgtttcacatacccctccgacttattaaaattttgaccggtaaatacacaagtgattaattagtcgttaactttctgccaacttggaatgatggaatggtttgcacctctcttttctctggtcttgcttttggataggcagatatctctactattaaaaaaattaaagatgttattgccggtactttggtacgtcatttgtgtatgagtcggttttcaaattcgttaacttttggaaatacatatccgtatttgagacgtttattaagtccgtttacatttggaaatacagaagaagagccgtataagaaatccctttaaaaaactcgaatgctaacttaagatgatcggactctaactgcagctcatgactttaagcgaattctcatggtgaatttcaccttaattaaaccgtataataataataagattaaaatagccttcacccgtcgcaacgcacatgcattttttctagtctatatatatgtctaatccttttaggaatggaaaagagattgaactaaaatccaaaccaatccaaggtgatctttgaatcataaatacagatttttaacccttgaagatgaagtgtagatttatggccagtaaccagtcaacgacattattgcttcattctatctctgacaacatggtaactgttcaaacaggagttaattaatgatttgttaatttacagaaaattaactcagtcacaacgtgaaaccatgacaattggaaaacacaaatttagtatatagcatgtgtacaatagggcaaattcaaattaaatgacatttctcaactcaatgatattggcaattctactgaagagatgtgtttcccaataattcagatagcttcctcttgagggagcaccaatgctagtgtgcttgatgtaggtggttaactgatagcctcatcattgctgattcgaggaataagtaaaataacatatttgcaaatgaaaaatagtctatgaataaaacttttatatacgtgttcttaacgatctaaaaacaaacgctgaaaaataaaccacaataaaaaaaaatcccaaaatcaactctaaatttatgattgaaaatttaaattttggctaataagtataggcataagcaaaaacatgaggccgtttgtcagtcttgttcacaaaagggtgtgatcactagcaaaggcacatgctccgtcatcgtcatacggtccattttgctgataaaaatggaagacatgatttccactgatttgatctacagaaatagaaagtagtacaaatatttgttgccattaagcagaacttctcccactgttcaaatctgagatcagcaagaggggcagaggagcaggggaatgtgtcctctggtctacccaagaacagagcaggagccagcgtgagatttcccctgcaccagaaagaccaatagaaaaaaaaaattcagcaaaacaaccaaacaaacttcacagtcatgtcgccaattatttcttgggaggaatcgtgtgatactcggatagagcttttcctactttcatagtgttaatatttacactggaaactagaaccaagttgattctccaatgatccaattaacgagagttctagggtaagttgtgtacagatcgagcagctgaactcagatggcaaaatagacgcaccgaattactagctaggtgtgtgcttcctgattctaattggtgattgctctttcggcacaaaaaatgggatggcaacctgattgggtatctaggctgtatgatcatactaggctttcaagaaactaacttgactaagactaatgaattcgtatatattcaaagttttctgctttttctgtcatcaccattgtttattgcataaagtttccgtgtgcctctgaataagtacagtggcataccttaatttagctagaatagttcacagtacacaaaattattgatattatattcgtgtgccgttccatagaaaatcactcctatgcaattgttgcatgggccatcaaaattttgtgatcaatgcctttggaatagactgcataacagcatgggagaaccttaacagctgcattgcccccatgttaaaattgtagtgtgtacaagtgtaactacaaaatcgtaatcatagtttatttggattcataaagagaatcttcactacaacaactggaaagatgagtaccagcacaattttactagtttcaggaggtgaacttcagtagtatccatccatttcctcagttgatcagtgcataatatttttctttgatggaaatgatatcatagtaaacatcatccattgtcggtcgatcttttggtgatgtctctgtgcacattagcccaagcttggccatttgtatggcgcatgttagtatttcaggcacaacatgatttgggtcttcaccttcacaatattcggtgatagtaggatctaaaatgtcactgatttgatccggaaatgccgactccacaaagttgtgaaggtccattccatcttgaaagatttcatcagttggttgctttcctgttatcatttctagaacaataattccgtaactgtatacatcaccctcagctgagaccttgcatcccaagccatactctacaatcaatattgtgcaagttaataatattcattagtcagtcaaaatatgatacaattttgcatcacttccttggtagagctagtggaaacaatagataaaatacaaataacaatgaagcaagtgctcacctggtgcaatgtatccgattgatcctcttaatccagtagtgcttgatgaattattgaggcttataaagttgttgtgcagaaactttgcaagtccaaaatcactaatacaagcaaccatttcgtcatccaaaagaacattgcttggtttcagatcgcagtgaaccaaaggaggagtgcatcggttatgaagataatccaatgcagtggcaatgtctccagctactcttacccttgaagccaaactaaacagttttggggggctttgactgcatggttttggatggatccagctttcgaggttaccattcgctctatactcaagaattagtgctttaaactcgtttcctgatggatcaaaggttgaacataagccaattactcttacaagattccgatggcgaatgcttttcagtgcctcacattcagcagaaaaactattgggtgctccattttggtcaagtctaaatactttaattgcaacatcgcgtgcaccgaacttcaattgacctttatataccaatccaaatgttcctgaaccaacaagacttgttgaagagaaaccatatgttgctttgtacagatcactgtatgatattttatccaaacgcctgaacgaatggttaatgccgattctctccggtccagatctcttcttcagaaacatgatggcaacacatgccaaggtaatcataacaattgtactaactggaactaccacagtaagaatataggatgtcttccgtttggctgacagttccttgcaaagtggtaactgtaacattggtgaacttgcacataacattttatttccttggatgaacacatcgctagaatttgcaaacacgcctcctttgggaacaggtccctcaaggttattgaaagatagattgagagagcgtaaagatccaaaagactcaaaatattttgggatttcaccagacaagttgttttgggaaaaatcaatctcaattatgcctcttaagttaattagagattccgggatgcctccttgtagaaaatttgcctccaagcgaactgattccaaaacaaggcactcaccaagattggaggggatctcaccagataattggttgttggagatattaagagaattaagattaatcaatctaccaatctccagtggtatgtgcccagtgagttgattataggatatgtccagacctttagaaagtgtagaaatcgaaaagagatctaacggaatgcttccattgaggttatttcttgaaatgtttagctcaaccaaatttgtgcatcttgctaaacttgaaggtatttgcccagttaattcattttcctgaagataaagttcaatgagctgctctagtgtgcctattgatcgaggaatttctccagaaagcttgttgtgagataagcttaggatcagcaagtttggaagatttgcaattgtgctgggaatttgtccggagagcatattattacccatcagaatggcagtgagaccagtgaggttttctatttctgaaggtatgctgccagtcaactggttctgtactagattcaatatctgtagtccttttgataggttgccaatagaagtgggaagtactccttgtagattatttccacccaaccacaaattttgcagttgggtgcagtttgttagtgaagacatgaaagtccaatctccagactcaagcttattgtcacctagatctaagtcagtcaacatggacaaggatcccaatgaaggaataataccagtgaaggagttgcgtccaaaataaatctctgtaagattcaaagcattggctaatgtagcaggaattggtccttcaaactggttcccatgtagtatgaaactagtgagtcttggaagggtatagccaatgttggtgggaattctcccaacaaatcggttgtcaccaaaattaagataggtaagatttgagattttaaatattcctggtgaaataattcctgataagttattataacttagatctagtaattgcaaattagagagttttcctaggctctctggaatggtcccttctaagttgtttccagaaagcatcaacttagacagggagagaatgttatcaattgagttgggaatctcgccagagatgtaattattagttaagcaaaggtatcgcagaaccaaagatgtttttgagaatggaggaatagtcccggatagaccattctgtgagagatctatgtaagttatggtagagctgttgaagagagaagggggtatttccccaacaaggctattattttggagattcacccatacaagtgttttgctacttcccaaaagtggaggaatggtgccagtgagctcattgttaggaatgaatagtgcagaaaggttgggaagcaaaccaatctccgaaggtatgcttccatgaatatggttattgctaagaataatttgctgaagaaatgaacaatgagcaagacttggaggaatcttaccttcaatggagttgctatacagattgatggtttcgaggcgagaacatgacgataaagtctctggtatttcaccactaagtgcattcacgctgagatttagatacctgaggtgtgttaaacggccgatctcaggtgaaatgtggccattgagttggttaccaggcatgtgaattctggagatgaaactgaggttagcaacacaaggaaatatttggccggtgatgttttctgactcgaggtctaatccatctactcgagctggaagccctgtgctgcatgtaaccccatgccaatcacacatcgaaacactggaatcatttctccatgagcctaaagctccagaggggtcatggagctgggacttgaggcagaggagagcctgcctatcagcattggattcgttgtgaaactgagctgacaagcagaagggaaggcgcaagttcaggaaaagaatgaaggctagcactagcatcggtgtgatgggtttattgagagctaagcgaaacatttcttttgatggaattgatgcttgaagactgaaccataacggaagggttagcatctatatataggacaccacgtatgtgtttagttcacggcaaaattagaagtttggttgaaattgaaacgatgtgatggaaaagttggaagtttatgtgtgtagaaaagttttgatctgatgaaaaagttgaaagtttgaagaaaaagcttgcaactaaacaaggccgtttgcatttgaagtgaacgttttacagttccaccattgttgggaacttcttttgcaactagaaccttagcaaatctatttcaaaatgtagacgtaattaaattgttagaacctggacctgtgagattaatttgatgacgtatgtgaacactggcgcatgatatggtgccagtgcagacaatagcatataggacgatctttcgtggaatatactctgagtcccaaaatgaatgaatttctatggtttaaaatttatccgaataaaacttatccacctactccttcatcttatccgattacaaacatccccgtttcttaaccattttattatctgatgctttaatttcataattttttcttacgattacactacaggcgcacaggcgcacacacattactacgcatgcaagattatactcacacccccctccccgtaaatactgccctagtcttttgagcctaattagtctatgattagccataagtgttacagtaacccacatgtgctagtggcggattaattaggcttaataaatttgtctcgcggtttccaagcgggttatgaaattagttttttcattcgtgtccgaaaacctctaccgacatccggtcaaacgtatgatatgacagccaaaaattttcttttcgcgaactaaacacactctaaaaaagtggatggaggtctatctgataaaaaataatgttctgaaaggctaaatttcattcggtcaaagaagacggctagtataccattggaaaccatcgcttgaccttgttggagtcttgagactttgaagttataccggtcgtcctgacgtccatgtcgtggattcaattgtccaagctgatagtgtagctatcaaagtatcaatgctttcttctttttcccttgtacgtattgatgccgttgatttttttaaatatgtttgactgtttgtcttattcaaaaaatttaagtaattattaattcttttcttatcatttgattcattgttaaatatatttttatgtacacatataattttacatatttcacaaaagtttttaagtaagacgaacgatcaaacatattttaaaaagtcaatagcgtcaaacatttagaacatttaggaaggagggagtagtatgcagctgtcactgcttgcatattttcctatacgttagtactatgtttgactgttttttcatttccacacggggcactcgtaatcaggcccatctggagtcccgtgtacggccgtaaaagttcgagccaaaaatcatgtgtttcaatttaaatcattaggttcaaattaagatatctttatttttgttacttaggctgtatatttagatatagaggtgcaaaattttggcatgtcacatcagatatatggacacatatttgaagtattaaatgtactctaataacaaaacaaatcctatctttctataaagttaaggcccactaaatcctaaagctcaacatgcaaaaatgccaaatcatccactaacaattattacatttcaaacctcatgcaagcatgctaatttattaagttataaagatttaaaatgcaaacatcttaattaaattctcattccacataattcatataatatttcaatatatctctccatcattttttataatatcctatatgcctatatagtgcatcctcacttaaattttagagctttaaaaatccaagcatgttaaatcatcattccacataattctaaaaatatctctccatcattttgtataatatatatatacctatacaattcatcctcacttagttaatgctatttctctcttctctcattatgccatatcacctcaattgtttctatccctccaatgattaatctatgatcagaattatcttcctcattttcttctctcgtaaatccacatcattatacttttacatttagatcatcattctatatactatttaaattatgataaaccacatcaacttattgaagtttctgtcgtctagctatcttacacattatttctatttattattaacataccaaactcccgcagcaaagcgtgtggtttcatctagttacagaatccgcctgtaaaccaagagaagaatttattaagcctaattaatctatcattagcaaatgtttactgtagcaccacattgtcaaatcatggcgtaattaggcttaaaagatttaaaagattcgtctcgtaattaacacgcaaactgtgtaatttgttattttttcgtctatatttaatactccatggatgtgtcgagacattcgatgtgatagggtgtaaaattttgccaggtgtaacaccctgaaaatttgaccacaaaaaatctaaactctaaaaatacggatttttcaaaaactttttaaattaattgcatcatgccgatcttattcgcctattttatttggatttgatcttgaagtttattaattgtgagtaaagaatagttaattaggaataaaccttaaaaaaaacaaattggtaaaataaatataaattaaaataaagattagttgtggataggaataaataaaatattatcgcgaccatatttggatcaattaaatttaaatacgatggaataagaattaaccctaattaaaaattcaaataaattatataaaaataaatatgagtaatattaatctagggagaattcattagttgagataacacaaatattgagtaaaatgcatatatgcaaaaattaggaattgtggaatcaaatttatatgggaaataccctaaaatcgggataaataggaaaagtcactattcattgccccctaggtgttcgaccgcgttccctagccctagcccctcctctgccgcgttgccctcgcgccccgcgcaccgtgcgccgctccacctcccctctaccatcgccgtcgccatcaccgcgcgtgccgccgtcgcctcgcctcccgcccgtcgccatcgccgcctgccgccgcgccgacgtcgccgagccgccccgagcccacgccgacatcgccacccccatgccgtgagtgctgtcgtcccgttgccgcgtcgcctcgagccccgcgcagccgtcccttcgccgcgtcgccgcccgtcgccgtcaagcccgcgccgcgccgcgccgcgccgtcatatcgtcgctgtcatgccatgccgtcgtgtcgccgcccatcgcatcccgccccgagccgcgcgccaccgctgtcaccgtcgccatcgatgtcccgtcgccgcgcgcgtcccatcgccgctgccgcgccgcgcgccatctcgtcgcctcgcgccgccgtcgtttcacccttccccctccttcccctctctttcttcccctctcccctataaaaaccccggcccaatcccccttctccaccccactccattccctcctcctctccctcttccccttctccacgtgccgccgtcgttgcgccgcccgccgccaccttcgaagccgccgcgccgtcgccccggagccgccgcgccatgcgtcgccgccttgcgccgccgtcgccgtcgtcgccgccggtgagccgtctcccccctccacctcgcgcccaccgccgtcgccgcccggggaagcaaagagccgagagagagagagagagatagaaagaagccgggagggaggagagaaaaagaaaagagaggaaaggaggaagtagccgggagagaagaaagaaaagaaaggagaaagaaaaagagaaaaagaaaagaaaaagaaagggagaaaaagaaaaaaggaaataaataggaaattagagggagattagggaagtttagaaaatttaaaataattggaatttaattatagattaattatagtcgtagaattgcaaaatttaatataaattatggattattcttggcaatttctataagaaatcgattcacggtaataatttagatgtagttaataactaaacaaatagatgaattcttatggattattatagattatttatgggtaatccctataagtaatcgattcacggtagaaattcggatttaactactagggattttacccgtgtattatatttaatcatttagtcatagactaaattaaatcgtataatatttctaggattccgtccaatatttagctcgcgatagaaatttctaacctattatatggatataatgctcgggtagattaaattaaaaacttatgataacaaaatatttatacccgcaaaatagtttgaatcgaaattgggtttgccttagttcgcgaataataaagttaatataaagaaatcgactttcgcattcgactttcatttggattcatttggatttttatttgaattctaaccgaattcaaatcaattttcgcacgtaactatagagcccgagggagttgcggatccaagcgaaggtcaagacccgcaagacattgagcaaggcaagtcagcactattccttgatcatgttgatcccaattgtgaaattgttttgtttacaaataaaattgcatgcaatgatgaacatcctacttgtgattatgccatgccttgattattgtttgccccttattccttcgtaaccatgtttacgtatgagtccctagtcaactataacaaatgcttagaaatgctattctagaatcatgcatactcatatttgtcaaatgctatatgcttgggcaattatctttgggaaggtaattgagatgtggcatgtggagacatgagcgccacattgccatgatattgaggacatgatttgtgaaaggagaaataaactaaataactgttttcgattgggcagacggaggatttgggtggtatctggaaaaggctagtaccgtccccggtcaattaaggaccgagtcatgaagttaagcatgaaacgaccctcgtacaaccgcacttctcgtatgggtatagacctagtggagtagatagccgagcggaggcagtatccctgcatagatggttcagccctgagtgaggcaggtgcgctatggtgggacagccgttgaggtagggccgagaggcgtgccctacatcggtgtcgccattggtaggactgccatgagtgtgtgagagagggaacttaacttgagccataatttaatatgtatgtgagacttctctttcccgggagcgccagaactcctctcactgctagaaacatggacgcctagagtgcatgaggatttaagttcatggagcgggtactgccaatgcgaggttatctaaaggctttgccgtggcgcatctcatgtgttgggacgaggctcatgtgttgggcagtcgcggagtgcgggtaaagtgtacatccattgcagtgtgagtaaaccaaatctattcgaatagccgtgctcgcggttattgagcaccgggacatgtattacacttggctagactctaaattctttaacttgtgtgggatgggatattgcatgatgatttttatgccgatggagccacttcctgagaggcaggaatatggacgtcctcagaaaaccataacgactcaatggcgggaagctatccttgggatcacaatggatggtggacagaaccgtcattgtttaatatgaatactggtattaaaacttgatcagtctatgctaggtcttaggcttgtgaaaagaattacaaaacttgctttgcgcaaaagaaccatagccatcctttgaattcctctgtcatgtgcatcattgctgtggtggcttgctgagtacggttagtactcacccttgcaaatataatcagaagcgggagatgaagcttcggaggatccctatgcctactaccaggagggagatgaagacgatagcgctcagtaggtcttagttacggtcgttggctgtggcaatggcgtgccgctgccttaactccgctgccttacctacttctgtttttggaatgtattccggaccactcggtccgatgatttaagactgtgcctgtgggcttatgatgtaattcgtactagactctcgtgtatgtgcacttgatatttcagctatgagttcgtgtgtaccagactacttgatccagggaaatggtactgattacacgattgattcctgttataaaaacgggggtccacaccaggggatctgaacagggccttaaagtcctatttttctgcttcattgaatctacggtgcatgctagctagccaccaacgcacaaagaattcagtttcgtgtacgcgcaaaagaattgcacgtcagtatattagaagaaaaatagagttttagttatacaacgcaaaagaccagacaggcccttgcctggtacagggtagagtcctctacgaaggggaaagcggaaaaagagctaaggaaaaccactgctcctataaaaaaagggagatgggtagaaactaccctacgttcccaataggtccccaaatgaagcggtaaccactgaaggatgtactccaacatcgctgagaccggtaagagggaggagtcgaaaaccctggcattccactctttccacagctgctaggaaaccaggaggactagagagtcaaggctcgtacaaagatgtgctggcatgggagccctggccgacggccaccagaactgaagagagcagccctgggagggggcaaactcatgccatccgggggaagacaggacaaggagctagacttatcgtgcgaaaacaagagcgaactatcggcacctagtttatcaacacgtgatgcatcagactcctgagcctcacatgggggcaaccttaatttccagtaccagccccactcgcctcagatacagtatcggccaggaggatcaccacagccccagtatttgcctcaatacaactagctggatcaaatacaacagcacatccaggcggcgcctcagtagaagccttgggcagatatgatagccgatgtgatgagggagcaattcgggctcaagcccaaggatagtgggagcctgtatcggcatccatacccagaatattttgagagagtatcattactgaaccgatacaaggtcccggaatactcgaaatttttgggataggacaatgtgataacatacgaacatgtcagccgattcttagcccaatgcggggaagcatcagctaccgatgctttaagggtcattgtttcctctgtctctgtcaggatcagccttcacatggttctcatcattaccatacaattctgtacaaagttgggccaacttggagaaatagttccataaatacttttatagcggaattcacgagatgaagttgtccgatttaacgttgatcaaacataagcatgacaaatcggttcaagattatatccagatgttcagagatatgaggaatagatgctttagtttggccttgacagattcccagcttgctgatctcgctttccagggcctactagcaccaatcaaggagaaattctcgacccaagaattcgagagtctagctcatctagttcagaaggtgacggcacacgagcaaaggtttcttgaagctagaaaagcatataaaaaggggaacaacattttttgaccgggaaacagtgggcgaagcccccacgattgattttcatttataaaagcagaaactgtacaagaagaggatgaaaaacattagtacatatgtctctgaaacaaaagacgattaagaccctgaggtagcaatggctgagtgggcaagaaacaaaagagtagtcacgtgccaatatgtcaaggactccggaaaggaggaaaaatttgattttgacatcaccaaagccgataggatcttcgatttatttcttcgggagaagcaaatccacctccctgctggtcatgtaattccatcggctaccgagctagggaagagaaagtactgcaagtggcataactcggggtctcagagcactaattagtgcaaggtcttcaggcagcagatccaatccatgattgagcatggaagaatcaagttcgacgaccaaaagaaatccatggaaatcgatggcaatcctttccctgtcaacatggtcaacactggcgaagggatagccgatagaagaagctaccgtcccaatgctgctacgatcatcaacatgtatcagaggaagcttgagagatagaaagaggagagttatggagacagcaacaacttcgaccctcattgggactgcgaattatttagattctgctggaacggagggatgaggctaccctcgaaggaagattgcccggggtgcagtgatgccgacgagaaccatgtcagcagttcaagccgatttcaccccgggaaagaaaatcggtcgatgcagaggaagttgcctgttcatcagagattgggaccggtctatcaaaattctgtacaaggggaagatggggaggatgaagctaggaatcaacagtggtgtccctctggtattttcaccaaaactcagaaaacaagggttcaaaggatgaggagtagggaacggttccaagaggtttatgaggaaattgaccatcggctgaagaggaccaagcaagaatggcgcataaagagtaaaatcgttccagccgatgaggtcgacgccgacaaggcaaaacaggtaagtaaaggaaagaccatcgaatcttcatcggttaacatggtgttcgtgttaccagcagagtattgcgccaagccagcggatgcagaaatactagaggaatccctagcaagattgatcctatcacccgagcaggccgtttttgagaaaccggaaggaactgagcatcggcacctgaagttgttatacgttaaaggctttgtaaacggtgagccgatgtccaaaatgttagtcgatggtggggccgcagtaaacttgatgcgatacgccacattcagaaagttaggaaaaagcgcagagaatctcatcaaaactaacatggttctcaaagatttcggtggcaacctgtggacccccgtttttataacaggaatcaatcatataaacagtaccatttccctggatcaagtagtctggtacacacgagttcatagctgaaataccaaatacacatacacgagagtctagtgtaaattattacaacataagcccgcaggcgtagtcttaagtcatcggaccgagcggtctggaatacatcccaaaagcagaaatagataagacagcggaattaaggcagcggcacgccattgccacaggcaacgaccgtaactaagacctactgagcgccatcgtcttcatcaccctcctggtaataggcatagggatcctccgaagcttcatctctagcctctgattaagtttatatttgcaagggtgagtaccaaccgtactcagcaagccaccacatcaacaatgcacatgataggggtatttcaaaggatggctatggttcttttgcgcaaagcaagttttgtaattattttcacaagcctaagacctagcattgactgatcaaattttagtaccagtgtttatatttaaacaacgacggttctgtccaccatccattgtgatcccaaggatagcttctcgccattgagtcgtcatggttttctgaggacgtccaccttcccccttctcaggaagtggctccaacagcataaaaattcatcatgcaataacccatcccacacaagttaagaatttagagtctagccaagtgtaatacatgtcccgatgctcaataaccgcgagcacggctattcgaatagatttggtttactcacactgtagtggatgtatactttacccacactccgtgactgcccaacacatgagccttgtctcaacacataagacgcgtcacggcaaagcttttcgataacctcgcattggcagtacccgctccatgaacttttcatcctcatgcactctaggcgtacacagtttctagcagtgagaggagttctggcgcacccgggaagggaagattcacacacatgtattaagttataattatgttcaactcatcacatggcactcctatcaatggcgacaccactgtagagcccctgccttacacatcgagaaaccactatgcatggatactgcctccgctcagctatttactccgctaggtctatccccattcgagaagtgtggttgtacggggtcgtttcatgcttatcttcatggctcggtccttaattgaccggggacggtactagtctttcccggataccacccaaatccaccgtccaccccggtctaaaacaagtgtttaatttctttcctaatttcacaaatcatgtcatcattatcatggcaatgtggcgctcatgtctccacatgccgcatctcaattacctttccaaaggtaattgcccaagcatataacatttgataaatattagtatgcaagattctagagtagcatttctaagcaagtgtcataattgactagggactcagacgtaatcatgtttacaaagatttaaaggtgaacaataatcaaggcatggcataatcacaagtaggatgttcatcattgcatgcaatcttatttgtaaacaaaaaaatttcgcaattgggatcaacgtgatcaaagattagtgatgacttgccttgctcaaagtcttgcgggtcttgaccttcgcttggatccgcaactccctcggtctctataattacgtgcgaagaacaatttgaattcaattagaattcaaataaaatccaaataattcacacaaaagtcgaacgcgaatcaatctttctaaattgattacaaagttcgcggaaccgctcatttcaaattgttgggtcattttaacctaagtcattttgtgatttgaaattacgtcctaagacttcatctaattattgagttcttaattacatctgaattactaccgcgaattgatttcttatagagattactaaaaataatctataataatctataagaattcatctaactgtttagttcttaaatacatatatgattatagtattactttacaaatactagattttagttaatcctataattaaattctaatattttaaatatcctaaacctctccctaatttcctatttatttttccttttctttctctcccctttctttttctttcttttctctcccctgtcggcttctcctttcctctccctctcttcctcggctctcggcctaaccgggcggcggcggccaccggacgcgaaaaaaagaaatgggggggggggggggcttaccggtggcggcggcgcaaggcggcggcaacggcgcaaagcggcgacgcacggcgcagcacgcggcacagcacggcggcggcgaggcggcggcgcggcggcacaaaggcggcgacgcgtggaaaaggagggggaaaacggagggaatgggtgtggggtggagaagggagccggggtctttttatagggcgcgggggactgggcggctggcccttatggcgacgcggcgcgcggcgcggggctcgagacacgatggcgacgggcgaggcggcgacgcgacgttggcgcgaggtggcagtggcgacgcgacggcgacgggacgacggcgctgcaacgggacgggcgacgacgcggcagcggcggcgcacggtgcgaggcgatgccgatgggtgacgacgcagcagcggcggcgcgcggcgtgaggcgatgggacggcgcggcagcagcgacacgacgggcgcgcggcgcggcgacgggacggtcgtgcggcgacgggacgggcgcgcggcgcggcgacgttggcgaggcgcggtagcggcgacgcgacggcggaacggggctcgaggcagcggcggcacgtgcggcgcggcagcgggacggcggcagcgacggcgacagcgcgcggcgcggcagacggcagcggcacggggcgcaaggcggcagcggcgcggggcttggggcgatgtgacagcgagcggcgcggcgcgaggcacgaggtgacgcgacagcaacggcgacagcgacgcgacggcgacggcgcgcggcagcggcggcgacggcgcttggcagtggcggcgtcggcgcatggcagtggcgggttagggcaagagaacgcgatcgaacacttatggtgcaatgaacagtgaattttcctatttaaccccattttagcccatttattatttaaatttgattctataattcctaaattttgcataaatgaagtatactgaacatttgtgttattccaaccaatggattcattctagattaatttattccatcttttatttatttctatcccctcacaatccttatttcaaattagaatttaattattcctttaaccaatctaatttcagggttcattcctaattaactattctttattcgtgatctatgaactccgaaatcaaaatccaataaaaatagtcgaacaaaatcagcatgattcaatttatttaaaaagtttttgaaggcccatatttttagagtcttgatttttgtcggtcaaattttcaggatgttacacaacccttcagaggccaagtgcgtttcaaacgtcgagctaaccatcggcaacaagacaatcccgactaccttttttgtcatcgatgggaagggttcatacggtctgttgagaagggattggatccatgcaaattgttgcatcccttcgaccatgccccagagtttgatccaatggcaaggtgactagatagagatcatgctagccgacagccaattggaaatgaagagccccaattattgctttgagggcatcgtggagggttcaaatttctacaccaaggatactgtagatgttctagatggcaaattagggcaaggattcatgttggccaatgatctggaagaagtagacattggaccaggggataggcctaggctgacattcatcagcaaaaaattaactcccacattcagaaccaagcttattgagcttttgaaggaattcaaagattgtttcgcttgggagtactctgaaatgcccgaacttaccgatcaattgttgaacaccagctccctattaaaccaggatatcggccattcaagcagccaccaagaagatgcaaggccaatatgtataatgatattaaggctgaatcactcgattatatgatgccggttttattagaccatgccgatatgctgaatgggtttccaacatagttccagtaagaaagaaaaacgacaaacttagggtctgcatcgatttccaagatttgaacaaggctacccctaaagatgaataccctatgccgaacgccgatcaattagtggatgctgcttcaggacataagatcataaacttcatggatggtaatgctggatacaatcagatttttatggccgaagaagatgttcacaagacaacttttaggtgccctggcggtatgggcttgtatgaatgggtcacaaagagccgtgaatggaaagtatgtgaaaaaatattacccaagtatttggctcaattcgtgatcgactaagctatgccgatgcattatatccgatgtgttaccatcgcctttagatggccaataactgttttacactactagaaaaacaatttttcatggcgttggtctatgattttcgctggcggaaaaatgccaaaaccgccagcaaaattgtaacgagggggtaaggggtaacgatcgccagtgaaaatagatcttcgctggcggccgcgttatacctgccgccagcgaagatatgtctattttctctggcggtcacttaggtgcactaccagcaaagatggataattttcgctggcggttgtgttatacagacaagtagggaaaatacaattattttttctagcggcccacttaagccaccgccagcgaaaatagattttcgctggcggtataaggaccgcttgcatagatgaaccaccatctattaatatggaccacgcggcccaccaccaccaccaccaccagtccaccacctacccgccccctctctccagctcccctccctctcttctctccctcgcgtctctcatccctctcttctccaccgctgtcggctgctctcctctactctctcctcctcccaccccacagtcgggggcagcgttttcggcgtggcgacgacgacgcgaggcaggcgtgtggcggcgacggtaggcgtgcgggcaacgacggcgtcttgggtgtgggcgcggcggcgctcgggagcgggcggcggctcgcggggaggccggatctgccgccgccggccgcgaggtggccagatccgccgccgccgggccacagggaggccggatccgcctccgtcgaccgtgctcctgcggatgatgtgtaaatcattttgatttttttccttttctttttccatgttgttccagatgatgtgtaaatcatgtttgatctgtgctgatgatgattttgtatttcgtgtttgaatttggaaatgagcagcgaatctagatgtgaatttgaaatttgaaattaattaatgaattaatgggcggctacatgggtattttcgctggcggctgggtagctgcatgcgggttttttttttgttccccaaatccattttcgctggcagccaaattaacacagccgccagcgaaaatagattttcgctggcggccgtcttaagccaacgccagcaaaaatggttttttgctggcggtcaataaccactagcgaagatcttgattttcactggccttcgctttttagcggctgcaaatcccgccagcaaaaatccaaaatggccgccacgaaaaatggttttcgtagtactgttatcgcccttagaccaacataatcctttctttttatataattggtacccactaaaaatcattgattgctataaagctcaaaatctgtgaggccacgtcatcatctaataccagccgtccgatcaattaggatgagcactatagaccatttgatctttcctgttctcctcgccctggcccaatcatatgattcagccgagcccaaccaaagtctcgctaagcagttggcccaggtgttgatactctatttctacgtgctgtgcagggcaacgtttcagcttcgtgaaaacggcaagggcatctattacggctgtaatggccagttagatctcagtatctcacactaatttaccctgaaggtttccttttctctcgcctcattacacatccttaaattaagtcaccgtatcatcgtcaagtagatcttgccaaatcgaaccatccgcctaagcctacgtctaatctcattcccagtgtatgtttttcatacctgttcttcgaccatatgacttcatccaattttccggcttcctttctttcaatcattttaaggttccgttaacactacaatgattcgttctttgttgttccatatgttaatgatgcaaacatcgtggcccatatgtgtaagtccgaatacttatgggtgcagcagggatcgactgttctggcatttccgtatgagggttgtctctagccaatggagtccgctcgctttactcatgtcgagaaggggatgggaagcgaggaggctgaaaaaagaagaataagtttgacattacgtgatcgataacgggagaaagattgagttgcaaattactgatgggggcggtactggtggcttcttcttcttggaggccaatttcttcctcttcaaatgtagaaagcatgtataagttgaaggtataaccatagtaagaaggaggaagcagtaaaaagcaatactggttggcgtttcggggggcttgaagtgttttgtgggcttggtggattggctggagatgttggccccgccactctcatttcgcttacatcagcagcagcatcgtcgatggcctcatccatttcctcgttctccaggcactcctccacgtccgggtctatggtcggaaaatcttcgacagcggctgccttctatttctttgtagttttttctttggggggagatttggcatccgacggcttggccctttttctcctaccagtttcaataggttcacgaggtagaccatggagcaatgaagatttcctcggagcattataaccgatgatggagtgagcgagccccccaccgttcggaataatccccgcagcataatttatgggttccccgctttggccaatgtggggaggtaaggagtctgtggcctgcaaaacaaaagaagagattgaagagtcagtaaataagtattggcatcggttcagcaaaatagtttgcgatagaggaaaaacgcttacttgcgggatctgatccgggaacatagtggtcatatacatcgaagccgattggtggaagaggtgctttttccactcgacccgccagcggtcaaaggttgcctcctgatcagggccagctcgatattatcaatgctgcccaatggcggccctggaatattcagaagtctatccatcatgagagccgatataattaccctctagattggatcttgtccacaaagaacaagccgataggtagctgacccagtccaagttgtcttgcagcactcataggatggtaggattcatacaaaatctggatgttgcgaccttgatgaatgccggcggggaggatgcagggagaaatagctgttgacaaaaccatcctagactgctcaaacctcacgtgattgatttcctcaaatctgaaatcggctgggagttcgaagtcttgggaatgctcgtaggcaaaccagatcctggagttctttggaaatccatcatagaagttattaaaccaatcaaagagtagttcaaccgatagatctgacccaagataagcaaaggccacttccccaaaagacgtgcatcggtgagttttaaccaggttcccttcatcatcttcagtaggctcgagggttgggaagctcatcatggttagggccgatcttccagacactttaatcgtgtgaaggttgagccatgtctgcaaaagccaccaagggtcaccagtgccgatgacagagtccacggcaatcctggccgatgctgagcccaaagattgatacagggctcccaagagatgtttgcccaagggaaactgccttttctctgcaagggcttcggccagatgctactagttggaggtagggccacagcttgggccacataacaggaacttttcggccagaaagcttaacttttccttcagggtaaccagaccagtccccgtgtttgtagtgataaaactagtccaaccacctatactcttggtcttataggaaaattggcctttagagttcagactaactgagttggctgccgacgtgacatccaagccagtgatcatgactatatctaaaagagttggcgtcatcggcccctaaccaaataagaaagcattgagggtgtcggaccagaaataagttgcagccgatagcatggattcatctctcttcatatcggctaaagtaagaagcagacattgagaaatccctagttcgtcccaatgggcttgcttgtgtgtcgatagtctcttatacaagtctggccatgtcttgacattggcagctggccaggacttgaaagtgttggtccaatggattaggctagggttggtttgtctaaaggggattcggttggttttggcattgaggaactgagtcgggtctgagttgccggttgggcccagaaagaactggttttggtggcacggattggggattgcaacctaatgggaaagatgctacagtagaaaaaaaaagggggaataaggagtcaagattgctatgaaagaatcacgcaaaggaaaagaaagaaccaggagcagttttagccgataagcagttacctcaggaaactcagccgccgaaacacttgagggattgacggccatcaccggaataccaagcgccgtcgaaaggaacgcctatgtagtcgccgagaaaactgacggaaggagtagggtgctccgttgactgaaggcaaaagaagcggaagggacaccgtggaattttttcgagaaggtggttctatttaaaggaggacgcggcaccagccgaaacagaaaagaaactctagatacaaactgaaacggaatctaacaaatctacaacatccctaacatcggggacttgggggcatttgttaacgaccaaatttggtgaggccatgggctggatccaaagccagaatcgaagctgatgtggatgaattctgtctaagaaaagcagagtgcgtgtcggctatgagcagcataggctgccgtatatatatcagctggtgccaaatccaacggagataagtcgatgcaggcagcctcggaaagacaatcccacatctatcatcagggttagtcaaagtacttgataggcattgccacgcgaggattgaagtccagaaaaaggcaattgtatctattaattaggatattttcagtttccttacggatatgtttgctaagagtccgcctaagggacttgttcgtattttaaattgtaatattgatagagtcgtgtccagcaaggacatgtttgtactttgggtataaatatgacccgacaccttgtaaacaagggacgacggttcaaaaatacattggcgcatcaccacccttttctattttcattattttgacgagtttttactttcgagttgggctgcatcgagttcgatctccgacgaagaggtaaagcttgttatggcggtttgcattctcgggattagtgcttacatctctatgacacactaatcctgtctatgtaaatcatcgagttatcatatatgctgtataatctagatcgatcccgtcatctaactccatcggctagcctctatcatcgaaaacggccgatagatatagatatcgatattgagctagattacatagtgtatctaccatcttgaatgagtcttcatcgatttgtttaaatctcatgtttcttttcacgcttaatgctgcattggttaggttcgatattttaagtgatgtcttgaaccgttttctctagctttttcaatgaattctaatagagatagcatcggggtttcagccgatcttacctggtttagttgtcttgtgccttatatggttctcgatcttctaaatctgccctttatattaagatcttgtttatttgaagcatatcttgctctttatcagtcttccagtccatcttacttgctatattgatctgcgttttatatattttatttatcctggtatcttagtataaggttgtatcggagtactagccgatacacattgggtttgctctattggctatgctgtaagaattcacaatctctactttgagacacatttagatattaagtaatttatactatctcagcacatcatctgatctatcccaatcacttggtttaaatgtatttcattggatagactgtgtattgctgacatctacagccgatcgagtatatctaataatctctacgctttatcttccctcactgatctaatgcaagttatgtcagcttggctttgaacgatatgtcatcggcaatccagccgatcgttggttgcaggatcaaaccaactggcacgctcaaaatctgaaggcaatctctttggacctacactagagttaagtagatctctcaggccagtgcgtgtttttcgcgtcaaaaagcccataatggagacctttttctctatcaagtcgccggctcctcgaaccgtcttagagaaaaaggctcctccagctgccgcgtccaggtggtcccagacgtgggagtgagtccattgtaaaaattttgcaaaatcagccagtcgtccatcccaagatgaggataggcgaccatatattcctgaagtcgttcccacgccccattaatggactcatccctcgtctgctgaaaacttaggattctcccacgaagggcgttggttttgcccatcgggaagaactttgacaggaatgccgttgagcatttgtaccagatgttgatcgtgacacggttggcataaaaccactgtttctcttttccaaggagggaaaacagaaacaatcgtagcctgacggcgtcaggactgatgcccttcactatgtatgtgctgcagatctccaggaactgttgtagatgtgcattggcatccttattaggcttagcgcagaacgggctagcatgcgccatcgtaatgaggctggacttcagatcgaaatccatgtctcccatgttgatttgcggcccagtggccacgttgttagcgaagggagcagggaattcacgtagggtcttgtcagccatagtcttgaatgttggtggcgctggtatggctggtttttgtgtcggaagagttttctgcggagcaacgacttgcggcttgatgctccgaaagaaaacttctggattctcctttaaattttttggcaagttgaaactagtcatgcactaccctgtttccacaataaaagtgaaaacaactaaggttagccagcaaaggacagtgattctacaagtggtaaatataaaatattagtaacggtaatctcgtttatgaatcttccccagcaacgatgccagaaatgcttgttggtatgtcttaatgacattactagaaacataattcccaacagtgacgcagaaatacttctggtatattatggttatagagtttatccgcaagcgtacggatataccattgtaggatttcacacgagagtattcgatgggtagtttatttgtttaatcccatgggaagattataatagagagaaccgtactaataatttatatattacttgtatcaaccaaagtctaagcaggggttaatataattcatctggtcgagtgacactaagcagaagcattcatactcttactcatgataatctaagctaagtggaaagaatatagaaagatcatattcctatacttctaggatgcatactgttataaaagctagtcgatatagcggaatgacgactaaccttcctgatcgcttcagtcatagatcactcaagacacgccagatgacgacacaggaacacacgatatttgttaacgaggttcagccgaagcctacatccccggggctctgattatgggcgctcctccccaaccaatatagctcctagccgctacgagtccatggcctcgccgccatcctctccctgcgtgtctacgctacattgtagtcgccatggttacattgtggtgccccccctctctatttaagagagatgtcgtgttacagagtccgactctaactctacctcctaacacctattacaacttcaagtccaactgtaatcaaatagaactagtatattcgacacctattctaaccaaatccaaggccagaaatgaacttgtgagagtgcgcagcccggcccaccaaccgtgggccacctaagtcacattgggtctgctcaaccacaggcccaaccggagccacaactttaggtcataggcctacacaacccaaaagactagtttgatgggtgaggatcgaccccaccttttaagtcgtgcttccccatcatcaattaccgatgtgggactaaacccaacaatctcccccgtcacaacatcaggcccaacaatctccctgtcacatcacccatgtgacccgaagacttcttacctgggcctcgggcctaacaatctctcccgtcacaacaacccatgtgaccccgaagactcgttaccggcctccccaccatgtgacccatagaaattgttccgtgttctaaaccttgggctttaataccacttgtgagagtacgcagcccggcccaccaaccgtgggccactcaggtcacattgggcctgctccaccacaggcacaactagagccacaactttagttcctgagcctacacaacctaaaagaccagtctgatgggtgaggaccgcccccaccttttaagtcgtgctcccccatcatcaattagcaatgtgggacaaaacccaacaatatacatattatacatatatcctagttatatcattacttagctaataccctctttccgatgccctcctggtgcttctagaagcaacccttaattgccgagtttcttacgacaatccatcatgaccatacaaccgaggctaaatacggaggagtaccctcccctggaaattaacttaggactatatacacgcgcggaggaatacccgtactgagctgtcaccattagcggcccacctcgtttctgcagcatataaccccaaataatgatctccaataatctaaacaccatgcttaaattaccagatattactctaatatcaccgtcatgacatagagtcgtcgtagatacgatcattatacccacaccattgcatctcctggataagctagcatcataatgaatataacttgaacatatagtaaagttggtatttatatactcggaaagtaatacaataccaaagtagtataaagaagaatattctaataaaagtgcaagtcttacaaaagaaggaaaagcgactagagccatacctgaattcttccaaagactccgaggactgaagattctattctaattctattccactatactctagaaactatactaaacttgagagatgaaatgaacttcttgcttgaggtgtgtggagaaagtgagaaggtgaagtccttttatagcctcccaatgacggttgtgacagttggaatggtcaaaaatgccctccaattgtcattgggatgcaatcgtggacatccacgcaaaaccctgcatccaacggtggagatggtggttcggccgaaccccctggtttggacgaaccatgggctggtgcaatccagcctatttttggctggcagcctcctggagttcttctctttgcagacaagtgaattttcacccaattgatcatgtcatttctgagttcttggcccattcattgataagtctgattctcgacatcgtccgattgattgatcacctgttttgatgtcgattctcctccattttatggtcattctctgcaagaggttagtaatcctagtgctagtggaatatttattatttaaacataaatatgcattgcaagcgtaactagttctcctttattttggtagtattgacggtcgaaactgatcgctaatgaccgccaacagtgttaccaactaggtgtaaagatctgtatgatctttagtcccggttggtaacaccaaccggtgctaagatctcaggggggcctgacagcccctgacaacatgtgaaccgggactaaacattacatagtcccgttgcgcctataaaccgggattaaaaaccgcttttagtctcggtttttagtggattttggctaaccgagcaaagatgtttctccagtagtgaattcatatttgtttgaagcacatatacctacacattgtgataacagagtcgaatacaaaatataaacgatggagatcggatagaatcgtacagataagaacaaaatactcgttttttttttctcgttatcaaagtatctagctgtgtactctctctatctctctctctcttcttatatgcaccctataagggtcaatgcaatacccaacactagattatttggatttgtcccatatttaattattccacaatactaaaagagatatcggtaacaactcgattggaaattcatgcacaggaaaacgacttggttgaaaactgattgtttgaattattgagtccaatgatccacacggacaggataagtcgtcggtcttcaggataagtcgtcggtcttcaggggcaagtaaaatatagattgagtggcctctgcacttataacttctaaagataacatgcaaatgtgtcacatcatcagcaactagctattattatctagaggattattcaaattcacgtgtgccacatcatctcactcactaataattattatttaggatattttaaatatcatacaaatatgatatattattcataattttgttgtctttttagtactcaatatgtaattaatgtcaaatcattatctccacatcattttcacattatttaaatgtgtacatctatcatttctgtaatgtaaaatataaatttatccacagatccggtggcaaaacgcgggatatcaactagtaactagtcttaatgatagacactacatatatcagacaggtactactacacatctagagacatgtatgtctttttgctattatgccatacatgtctctttttttttcttattataaaagctgcaaaacacctcctaatttaccgtccatatacaacggaagcaggacttcgctgctgaccatatgacgacctcggcgataagactgcaatcccttctctcaaccttgttgctagtgttcctgcttctcaccggcagcaacctcctcctttcaagatcagcttctacgcaccgaccaagcccttgtaagttccttgaattcactagctacttgagtttagtaccatggcttcacggatcatgatacaattatttctcgtgattggtggacgtttgcttgttggcacaaaatatacagtactatatcaattcaatattttcttccaatcatttattgaaacacaaacacttgcatgtgttgtatctataagttcactagctattctctcgccgaattgcacacggtccagcgaaacatatttggctcgtttggttaatccttagaaggaagatattcaagggtattgagagagattaattctacacctcgataaatataaaattattcattttcaaatcctcttatttatagattgagtaaacaagtccttaatacttgtttggttactctcccataaggggattgaagggatttgaaggagatttattccgcttctattttagtgtggaattattttctcttactcgccccgaatccttctctcttaggggattaagcaaacaaaaccttatgcaaatactattggttcctaactgggatagggtgctggtttccaaacctgccttgggcgcatttttaaacctggattacgttgctgcaggagtaaatttttatttctcgtgcaggtaccttggaccccaccaatccatctcccatctgtcctggtcaagctccttccccgtattgtccccaaccgccatgtcacaacatgaatcacgcgccagccacggagcaacagggtgcacatttgccttaagtagcagatggtaaagggagcgaggtgaaaaacgtatatatattcagggaaaatttcaaaccaccccaaaagtcatttaacgtttgatgtttcaccctataagtaattttgttggaaaagcctcccaccacccagttttgttgcaacaatctttcaatacaaacgtgattaatcaaatcagcccgttatcactgatattgtgccaccatatgctaaactagccgagttaatcttgtctaggtgcttatattagaccactctttatgtttcactgtattgattttgttaatagctaaactcagtgcaataacgtttaagatctgatccgcaattatgtttgtgggaatctttaaaactttttaattttgacagctccttgtttatgaaaacatgttgatttggtcaaacacgtacgtactgggatggttttctggacacaacagtaggattttaggagggtagaaatttatagcaacataatttatgggatggaatatcaaatttcaagtgttttatactgtggtttttgtaaatttccgtatattttagttcgtgtcatcttttaactcgtcccacatctgtgatcgtctagaactatagtatgtagtagtatgtaataacttatgatgtattcctactaaggaaataatatttccattgcctgcctgctaatgcttttcaaataatcaatatatctatctatctatctatctatctatctattatatacatactaaaagtccattaaacttcctacaaacgctctcaagccgccacgtgaaactcctacaaacgctcctaggtcgccaagtggctctatctaatctaaccgtcgattttaacttaaattggtggacccaatattttagaccattagattagatttttacttaaatcggtggacccggtattttagacaattagattagatgtattttattttattttaaagaaactaattccttactctattacgtacgtatatgggagaaacacaactgaagtaaccaataaagcctacctattgttcgcgtcaaaagaaaaaaaagctgcgcacagaattactataaaatcaataagaaaaaaaaaccatacgtacttagcaccatgggaaaaaattgatgatatttaaaataggattttctatcatttaaagataaaatattttactctataaatttacgtaaatatcaccgttgattttcatttaaattggcggacccgatcgatgttttagaacattagattagatgtatccattatgtatacttcctaaaaatgctcctaatccgccatatgacatcctgcaaacgttcctatgtttccatgtgatgctctaataaattagtaaaattctactttgtctctctgtcctttaaaaaaaagttttgtttcggtatcaaattttgctccataaagagtgtaatttttggttacaaagaaactttttaatgctgcttcgtcgatttctacttcatttaagcacaaaactaataacagtagctccttctccgatgcttgttttcacctctccttattctatatgaagggtacaagtaattgtaattatttaccttttgtttaacttgtctttaactaactaaaataatatttttttagaaatgaagagagtattaagaaagatattaaaacactactatgatttcattaatatggagaaaataaggtgggagaaataaggaggcatctggttcaatggctaaaaacaacaaagaaaaggatgtaatagcactattgaattagatttagcgtatcattataaaactacacaatcaattttagggtccaattcttaaactaaaactacacttttatatggacagacggagtagaaaaaatagaaattaattttgagtcctccgtatataagacgtggggatgcgtgcccatgggtgaaatagcttctctccctctaggccttcgaagcgcaggggatggtagctccggtcaaattaatgtcgacaagcctacaagattgctctatgtcatcccgcctgtcgctggtcatcgtcctgcttgttatcgtcggcagcacggccagcaccgttcctcctgttgccagttcaatggagaactctccttccggatgtaagtgctttattctctagatcgagcgttgaattatttaaccagtataacagttaagaatattgaacacagaatataagatcatcaagtcgagaaataacaaatatgaatgcgggactaacgaacaatgatatataaaagtaaattaggtaaacaaagcaaaccagtcaattcgtcggaatcgacatgtttatcgtgcacttaagttattagtatttttctttcatgtgacgttatcaaacttttatgagaaaatccataaaatgccatcgacaaccaccttgatcccagaaatgccatcgacaaacacaacttcctgaaaatgccatcgtacaagcttatttctcccagaaatgccatcacaccgttagtccacaccgttagaacaaaacattttacaagaatgactaaattgccctcgctccaaataatactatcccaatccaccggtaaaaaaaaactactgctaatgcttgatgcgtcacatgcatggccggcctgcgtcgaaggcgtcggcctgacacgcggacagccagaggaagtgggagggtcacatcggcagtggcgaatgtctcgtccgcgttgtggttggagtcggagtcggcgcttcgctcgctatccctggaggaagaggaggagaggcgggcgagccccgcggcggtcatgctccagacgcgggcgccacagtaggggcagcggacgcgcggctcgagcggggcgtggtggatgacgaggaacccgcgcgtccgcgaccgcatgaacccatggtacgcgtccacgacgtcgtcgtacgcggcgtcggcagtggccgccgcgtgctcgcaaagtggcctggcacggcggcgaccgccgcgccgcagcagaagaagagcagcttcgccatcgccagccaacctcccccaatgcgtcgatgcctgggaccgtcgtgcggatgcctgctgccgacgcgccgccgccggctgctacctcctcaccacccgtcgtgtcaacgcctgggaccaccatgcggacgaatgctgccgacgcgccgctgcctaggggccccgcgccgccacctgggactgatgcgccgccgcctgccacctcctcgccacccgtcgcatcgacgcctgggaccgccgcgccgccaccgcctgggagccccgcgcctgctgccgacgcgccgccgcctaggaccaccgcaccgccgcctgggagccccgcgcttgctgccgacgcgccgccgcctgggaccaccgtgtcgccgcctgggagccacacgccgccgcctgggagccctgcgccaccacctaccacctcctcgccgcccgtcgcgtcgacgcctggaattgacgcgccaccgcctgggagcgccgccttgccgctgttgcccatcgggagctggaggttgaagtggaggggaggaatggtggccggcgatgggatggaagagaaggggatttatcctttgttgaggagggtaatttggtcattttgacaaaattaacagtgtctaacagagtgaaagtgacggcgatggtatttttgggacaaaatggctcgtacgatggcatttcctggaagtcgcgttcgtcgatggcatttcttggattagggtgtttgtcaatggcatttcatggattttctctttatgattagtcctgtttgcctccttagcgattgtgtggcactagctagctgttgttatcagtggaaaatacattctacatctcgtgatgctggtcgaatcaaacgcatgcgaaaaggtttcgatttcagcactggtatatatcgtatagttcaagcagataacgagcttcatccccttcttttccagtccacacatttgcctgaatgatctctttcagcaagaacaatatctgcttttataccacctgctattggcatagagcgaaaatttatcgatgctttccaaggctatatatattaaagtaaaaagtacgaattaccccccgaactatcacggtcgtccgaattacccccctgaaccacaaaaccagatattcttcacccccaactatgcaaaccgggcgaattacccccctgacccaatccgcggtggttttggtctacgtggcagtccagtcagcaatttatttattaaaaaataggtggaccccacctgtcagtctctctctcttctatctcttctatctctctctcctccagacggcgacagcggaggcagcggcgaggcgagcgcggcggaggcagcgagcgcggcggaggaggcagcggcgaggcgaggcgaggtggcagcggcggcggaggaggtgagcggcagcggcggggag

SEQ ID NO: 5101 - DNA, 2777 bp, Oryza sativa
cctccaattccggtacgccccgttgatccagatgctgattttctccatgtgtgtttggtcgttgcttggtccttcctgttactagtataccgtacagcgttgagaggtcgctatcttgcgctgctcacggtgatgagctttgcttggatcgattaggtgatgcagcacacggttgttacctcaatctagtctcgattagacatgctacatagcagcttaattattcagatgtcgtttttctccatgtttttgcggttgcttgatcattcctgaatcctgatacatactgataaactcaagaggctcatttaagtgcatctgtgtgtacccgtgcaggcattcaacatcagataggccaagatgaacatcgccacaggggcaatgaacaccctcctccccaagcttggggagctgctggttggcgaatacaagctgcaaaagggtgtcaagggagagatcgaagaacttgagaaagagttgaaaggtatgaacgcagcactccacaaggtggctgagacacctgtggatcaacttgaccagcaggtcaagatctgggccagcgaggtgagagagctatcttacgacatcgaggatgccatcgacaccttcatgttaaagtgcaaggggcatgaacctgccacgagcttcaagaaggtcaccaatttgttcaacaagttcaaaactaaccatcagatccacggtgtcatcaaagacatcatggaccaggtcaagaaggtcagcgagcgtcgtgataggtacatagtcgatgacaatgctgccaggccaactgttgtggatgttgattctcgcctagaagctatgtaccgaaaggcaacaaaactcattggcattagcaagccaaaaaatgagctaactaagcgactcttggaatatgacggctcatccagccaacaatcaaatataatttctattgttggattcggaggcttaggaaagacaactcttgccaattcattatttcaggagcttaaggcaaaatttgacagctattgttttgtttcggtgtccttgaatcctgatataaacaagattctcaagaacattcttctccaacttgatgagaaaatgtattcccacatagatgaaacatgggaaacgaagcagctcatcgacaaaattagagacttcctcaacaatagaaggtacatttctatgttatacctaccttttatcattatttgaagataccttttgttgtacaaataagagtcctggctcaagtttttattgtattctaatataaccgggaatcctagctcaagtttttatactattataatataactggcttgtaaataaagttttggttttccaatggaacacatagttattcagaaatctgccctatttacgcataattaagtatctttgtaactttgtgaatagaaattcacaaagctgcacttattgtgtcaaaattgttggaaaattacacatttaaagctgcacatcattttcgacattcaatgtgcaagatacatattcctatcttttttggacaggcttcacatgatttatatctaggttcaataacatgtgtatatgctaccatctttaggttcttgtgcgtgattgatgatgtatggaaaaaatcagcgtgggatactatcaaacttgctgtgcaagatgctaaacttggtagcaaaataattgtaaccacgcgaaacaaggtcattgcagaacatgcaggcggtggtgtttatgaaatgaaacccttatctgatgatgattccagacaattgttctgcaaacgaatatttgactctaacgatgactgtcctgctgatttgtgtggtgtcactgagaaaattttgaagaaatgtggtggtgtaccgctagcaatcatcactacagcatgcctacttgctagcaaaccaaggaattcagaggaatgggacaaggtcaataagtctatcagtttggggcttgagaacaaccttgatgtggacaacatgcggaagatattaagcctcagttacagcgatctaccttttcatttgaagacttgcttgttgtctctaagcaaatatactgaggatgagctaattagaaaagatgttttgatatggggttgggtagcagagggttttattacagatgaaacacgacctgcagggacaagcttgcaggagattggcgagagctacttcaacgagctcatcaatcgaagcttgatccagccaatgagtgagaacactctttgggatgaagatggtaaggtgcatgcatgcaaagtacatgacatggtgcttgagctaataaatcagctgtcagtagaagaagattttgttacaacgtatttatctgatggtcaacaaacaggtaaacatacatgtacagcacaaaagaagaagattcgccgattatctctccataacagcaataagtcctatgcctcgccagaagcaagagaacaattgtccaaagtaaggtcgattactatcttcggcaaggtcgactcgataccacccttgtcgagctttcatgtcctgcgtgtgttgcagcttgaggactgcagtggaatggacaagaaccatcttaatcatctcgataagctactcctcctaagatttctgcgtctagggcactatggtgccactgagctccctgaaagcattgggaaactggaatctctcgaaaccttggacataagaggtgcacgtaaaccaagttcttttaaatctcataaggtactgtttccaatgtctttttgccaaactaaggaaactgttgcggctatatgctggcagagtgaa

SEQ ID NO: 5102 - DNA, 4957 bp, Oryza sativa
gggggagattttgaactccagatcgttggggatttttatacaggggttagatccacccctttgtactcttggtatgcatttttttaataattttaaaccttttctttaattatgatagatctatgcataaaaatgcagaatcagcacccgttcatcctcaatcagaactctaatgaaccttaccaatgttatgcagcgcattctgggtggcacagactcctaatagctcttgcagcttcaagcagccgaaccagctatcccttttttcttacaaggatatgcacatcgagctcttgtataatacattaaatatttaaaaaatataaactttacatatagcttaaaacaagtgatctaacaaatgcagtggagaatatatatttcaatccgtggagtaaataatccatttcaacaatcccaccatgaataatatgaaaactaacagggtcttatatcttcttccttgaattccaaataacatagtactgctctttatagagagccaactaaacaactcgattctaatttcatggaatggaaacaaccaaaacaactggtagatagatagatagataagccgataatttcacccactctgttgcatcgcctattgttcgtgcgctcccttgttgggcttacgatgatagattgcaggtgatactgaacgaccataattacatgacgagtaagacacctgcaacaacaagttagtttttattaaatctaccattgaatatatttttattgtattttactttgctttgaaaatgttgttatttgatcaaacttgaataagtttgatttaggaaaaacccttcatcgatttgtagtgtgaaaaggagtacaaggtaaaaaaaaaagtctcaattgaatgattatttgtgttgtacagataaaaaaaccaggcaaatatctaaccatgcaaatatgcagaaatttggctagttggaaattaacttggagtgacccacgcatataagcattatttagagatgcacttgatactgcagtggtaagatgtgtgtggtttcaaccctgagatcacgtgttcaatccccaacatgctcgtaatttctcaatataacaattctcttacgtaacatagttgacacttgactgcaatggcataaaagaaatcatctcaatataacaattctcttacgtaacgatatagggggaggggaaaaaaggaatgtataactaggagtaagaagttgattgcacgctgatatgctaaagttcataaagagttttttgggttttttttaagataatgaataacctggcagctgcatcaaagacgtacataggctatcatgcattactgtacgccaagcaaagatagaaaaaaataacgttcataaagatacatcatattaaacgttgagtgggaggcttggtggacctagcattatataatggctagtgcatgaaaaaaaaggttgttgattaggggaagaaatcagctaagtacctgagttagttcatcacaatagtaattcgagcgctgcttgatttggatagtccttaagtgcctcttcaataacagccgtgttctcacccatgtaatcaatggttacatgccgaagggagtggaggttctccaaacctaaatcatttaagtcacccctccttagtctggtcccaatacgaagacaaagcctttcaaggtggggcatagctcctggttgaaacgacggcatcatgcagctataaaagtgaaaatcttttaaactccgaaatgcacatgcacctctgtggatagtgagcttttcctgcagttgttccgaaacaaatgctaactgtagcctgagaaagcgaagagatggaagctcagcgaggcgatcaaggtggtcagactggagatattcgaaacacagacaaatggataaggtggtgaggcgggagagcatcgacgaattgatccaacatgggaatgctttcatatacgaatggtgcatgaacaacctttggagaccgaaaggaacctgttgcatgtctatgatttcttcaaaactattattatttctcaaatctaggtcttgcaaattggtgaacctttgtatagacgtttgaatggattcctttaactcaaatgttttttcactactgaaaacgatcctaagagtccttagctccggcaaattagcaagctgttttattacctttcgggtagcttctattacaagctcctgtaaagatttcatatcccccagcatcagaccttgcgccagcttcacttcgccagcaaatagccgcaatagtttccttagtttgacaaaagacattggaaacactaccttatgagatttaaaagtaatatggtgttcttgatctagcacctcttatgtccagggtttcgagagattctagttttccaatgctttcagggagctcggtggcactatagcaccctagacgcataaatcttaggaggcgtagcttgccaagatcactaaaatggttcttgcccataccactgcagtcctcaatctgcaacacacgcaggacatgaaagctcgacaagggtggtatcgagtcgaccttgccgaagatagtgagtgaccttactttggacaattgttctcttgcttctggtgaggcataagatttgttgctgttatggagagagagtcggtgaatcttcttcttcttctgtgttgtacatgtacatttacctgcttgttgaccatctgataaatacgttgtaacaaaatcttcttccgctgacagctgatttattagctcaagcaccatgtcatgtactctgcactcatgtaccttaccatcttcgtattgaaagtaagtatccatcggctggatcaagcttcgattgatgagctcgctgaagtagctctctccaatctcctgcaagcttgtccctgcaagtcgtgtttcatctgtaataaaaccctctgctaaccaaccccatatcaaaacatcttttctaattagctcatcctcaggatatttgcttagagacaacaagcaagtcttcaaatgaaaaggtagatcgttgtaactgaggcttaatatcttccgcatgttgtccacatcaaggttgttctcaagccccaaactgatagacttattgaccttgtcccattcctctgaattccttggtttgctagcaagtaggcatgctgtagtgatgattgctagcggtacaccaccacatttcttcaaaattttctcagtgacaccacacaaatcagcaggacagtcatcgttagagtcaaatattcgtttgcagaacaattgtctggaatcatcatcagataagggtttcatttcataaacaccaccgcctgcatgttctgcaacgaccttgtttcgcgtggttacaattattttgctaccaagtttagcatcttgcacagcaagtttgatagtatcccacgctgattttttccatacatcatcaatcacgcacaagaacctaaagatggtagcatatacacatgttattgaacctagatataaatcatgtgaagcctgtccaaaaaagataggaatatgtatcttgcacattgaatgtcgaaaatgatgtgcagctttaaatgtgtaattttccaacaattttgacacaataagtgcagctttgtgaatttctattcacaaagttacaaagatacttaattatgcgtaaatagggcagatttctgaataactatgtgttccattggaaaaccaaaactttatttacaagccagttatattataatagtataaaaacttgagctaggattcccggttatattagaatacaataaaaacttgagccaggactcttatttgtacaacaaaaggtatcttcaaataatgataaaaggtaggtataacatagaaatgtaccttctattgttgaggaagtctctaattttgtcgatgagctgcttcgtttcccatgtttcatctatgtgggaatacattttctcatcaagttggagaagaatgttcttgagaatcttgtttatatcaggattcaaggacaccgaaacaaaacaatagctgtcaaattttgccttaagctcctgaaataatgaattggcaagagttgtctttcctaagcctccgaatccaacaatagaaattatatttgattgttggctggatgagccgtcatattccaagagttgcttagttagctcattttttggcttgctaatgccaatgagttttgttgcctttcggtacatagcttctaggcgagaatcaacatccacaacagttggcctggcagcgatgtcatcgactatgcacctgtcacgacgctcgctgaccttcttgacctggtccatgatgtctttgatgacaccgtggatctgatggttagttttgaacttgttgaacaaattggtgaccttcttgaagctcgtggcaggttcatgccccttgcactttaacatgaaggtgtcgatggcatgctcgatgtcgtaagatagctctcttaccttgctggcccagatcttgacctgctggtcaagttgatccacaagagtctcagccaccttgtggagtgctgcgttcatacctttcaactctttctcaagttcttcgatctctcccttgacacccttttgcagcttgtattcgccaaccagcagctccccaagcttggggaggagggtgttcattgcccctgtggcgatgttcatcttggcctatctgatgttgaatgcctgcacgggtacacacagatgcacttaaatgagcctcttgagtttatcagtatgtatcaggattcaggaatgatcaagcaaccgcacaaacatggagaaaaacgacatctgaataattaagctgctatgtagcatgtctaatcgagactagattgaggtaagaaccgtgtgcttgctgcatcacctaatcgatccaagcaaagctcatcaccgtgagcagcgcaagatagcgacctctcaacgctatacggtatactagtaacaggaaggaccaa

SEQ ID NO: 5103 - DNA, 1654 bp, Oryza sativa
ttagaaggcgtagctaaccgagatgattaagatggttcttgtcaattccactgcagtcctcaagttgcacacacgcagtacatgaaagctcgacaagggtggtatcgagtcgaccttgccgaagatagtaatggaccttactttggacaattgttctcttgcttctggtgaggcatagacttattgctgttatggagagataatcggcgaatcttcttcttttgtgctgtacatgtatgtttacctgtttgttgaccatctgataaatacgttgtaacaaaatcttcttctactgacagctgatttattagctcaagcaccatgtcatgtactttgcattgatgcaccttaccatcatccaacagataatagacactcatcggctggatcaagcttcgattgatgagctcgctgaagtagctctctccaatctcctgcaagcttgtccctgcaggtcgtgtttcatctgtaataaaaccctctgcaaaccaatcccatatcaaaacatcttttctaattagctcatcctcaggatatttgcttagagacaacaagcaagtcttcaaatgaaaaggtagatcgttgtaactgaggcttaatatcttccgcatgttgtccacatcaaggttgttctccagccccaaactgatagacttattgaccttgtcccattcctctgaattccttggtttgctagcaagtaggcatgctgtagtgatgattgctagcggtacaccaccacatttcttcaaaattttctcagtgacaccacacaaatcagcaggacagtcatcgttagagtcaaatattcgtttgcagaacaattgtctggaatcatcatcagataagggtttcatttcataaacaccaccacctgcatgttcagcaacgaccatgtttcgtgtggttacaattatcttgctaccaagtttagcatcttgcacagcaagtttgatatcatcccacgctgatttttcccaaacatcatcaatcacgcacaagaacctaatgatggtagcatataaacatgttattgaacctagatataaatcatgtgaagcctatccaaaaaagacaggaatatgtatcttgcacattgaatatcgaaaatggtgttatcaaattattagcaaagtgattgcaagcaagattttctagaagttacaaagaaaagattacgctgtgatttaaaatatgaatgagaaaactaaatagtatgtttgtcaatcgacaatgcatggctatcaaacttctctaattcgaaccatagaattattatcttttgtctcataagagagaatctttgtttttaacttctaaactctcctataaaatagcttgacaagatctccatgtttcaatcttctgtctaaatatcgtgatttgttccagttactacatgttattaagtgattatgtcgtattttatatagggttgacaaatgaatctgaatgtgggaaatgctagaatgacttacattgtgaaacggaggaagtacaaatttacatgggcaatttttcagcaattttgacacaataactgcagctttgttaaattctattcacagtcacaaaaaaaacttaattatgcgtaaacagagcaaatttctgaataattgggtgttccattggacaaccaaaaccttatttacaa

SEQ ID NO: 5104 - DNA, 3849 bp, Oryza sativa
cgcagatatgttttgttttttttttggtgcttcacgactggaagaatggccgatgatattgggttggtcatcctgtagagagaagcatagattgaatttggaccagaattaaacagcatggcgcttactaacccgcgtcaatgttacctgtctcctggcacattttgatttataaaatcgatttgaatttttggtcgattttgtggtactggggttgattttgtttgatgttcagtttctataatgaaaaacatctggacggacgcgtagtctaatgtgatggagaatattgcaagcccgaatcttaaatcgataatcccttatctaatgtaagggacgatctattgaaactgctaaggtactctatatatacttgaacatacgtgacaacaaacagtagtaattgtaattgacataccaacagaaataattcccagtgaaaaaaaaagttaacagaagaacggtaatctccatttgacctacatagtactccagctcgcaatgacagatctgcacgtacaggaatgaattatcgagaacgaagtaactcttgtgccggaattctggtagacttcaaaatccagtctatcacttgatttgatatacacggagaattatgttacttatcttatggtacatgaaacaatggaacacgttctgaatgttactgacgaaaaagaactcatctgcacaaaagaatgtctcggcaaaaacagcatacatctcatccggtgcaaatggcgatacatctcaagccgaccagtgtaagtggcatttctcttctactacaggctacaagcctaacatacaatctgtgtatgatggatggatcaagccggtatgcagtatgaggtgctcagtgtcggaggaaggacgcacaccaggtgagggcctgccgggttgcagcatgttggcctcgccgacgtgcggcaggcccagctgcggcggatggacgtagccggacaccagcggcacgcacgtcaccgtgatctctatccttgaacctgtttgttgtggaacatgcgcgcaatgttattcacaagggcttgtaggcgaactgaaaatttggcattgcaagatggaaatcgatatatcgagtttcggtgtctgaactcgaaattattagttaccttgtttgtttgacagcgatacgtgaccgcatttcctcccaccaaccatccaggtctgtggggtggcgtcgacttgataaagtattttgtcctgccaaaaccaaattctagttcagttggaaggagaaaacaatttcatctctcttgtcctatggggcctgtctactgaagcaatgtactcacaagatcataaccattaaagtactggtacacttaatgaatgtgattttaagcaaggctcatatggagacttacggctaacagagaggcatgctccgggttcttcagcctttcaaccctccatctcatgttgaccagctggccaaccctcaagcagtccgaagaaaacggaaggaacccaactgccacacatgggtccaggacagggcgcttcatcttcaccgcaatcttgaatacaagctcctcagaatcatcaggtttaacacgaactggagagtgtgctccagttgttctgtcaccggatattccatacttaatattcaacatgctatctgcctttttagctcatccatatctggaatgtgggatgcaaaagttatattcagtcaatcatccatgtgtaagagcaaggatatataacagcaaaaaagtgtgaccctctcataagaaaatgataattttcttttttggataggaacacaaatataattgccatgttttttacatctgattttctctttgcaagatagaagggagatatggaagatgtaatcaagaaacatgggcagtgtcctgtttgtgaacttgaagtctcacaaatctaaacacatgaaagaattaggtgcaccagcagcatgctagcaagagccagcgattatagtatggtaatatgcaattagaaatacgctaataccacttgtctgtccctaaaagattttttggatgctctgatattttggttataggaagtgcaacagatgaattgcaagtggcaactgaagatgataagtgtgatatttaaaaggtctcacctcctaaggcacttaaacgtattacaaataagattccagctctcgaagaaggagcaataaccagagggaacaagttcgaagttggtcgtccatctccctttcctgtgtgttcaaatccagattgcagatccaaccatatatcctttacatgcagagtggccttcacttcagaatgcaatatcacctggacaccaagaaaaatacaaattgggattcaagaatccaagaagactgaatgactatcaatacatgaagtgtctcagtgaacaattgtgcagagagttgtacctgcagtagtagagttccatcatagcacttatctactacgcgtgtgctcacatggaatgggttagtgaaatgtactgcgatagtcctggaaataaaatcacaatggtaaatttattttatttggacccctcaaaaaatttattttatttggtgtacctaaaaaatcaaaatatgggaacagaaaaaagtttacctttcaaacacttgattaagaaaaactccaaattcaagcttgagagcaatcattctcatcccatctactatgctctgtttctgaggggatgctgcacaaaaaaaggacaatacaaaggtcaaccaattgattgaaacatacagaaaataaaatattcaatcaactgcctggaacattctaatatgctgaatacattacttatttattttgtacaaacctggcgatgcaccccttgcaattgtatcatcaatagcacgaacaggaaaccatacaagagtagtcacatcactagcccagtctggtatttttatcttcccatcttcaatagggaccttctcaaccttacgagtatcagtggagcttgatgatgtcttggaagcatcagtaccaccaacatgctccacatcacttccataagtttctatctcaatcatctgggactcctcaattttcagtccagcacccgcatctatatgcaatatgccatctttcaaagaatagtctattggcttgacaattaacccaatccactgaagttcattcataagcaatgcagaggacacagcaggagtaatatcaactaaagcccttggttttctcacctgcagtaattacagaaaacacttgaggcaaagcccaatataatatggttcgttaattacaaaaatgtttattctgttagttgatatccatcttttagttgtgtcttgtgagttaatagtgactaaatttttgtgacactccagttaatgttaatgtcatcaccttcaaaacaggccttgttggcttctcaaagctcatgaattcatcagtgtccactggaccatcttgagaaaatccatgcgatctgaatgatagcttgccaatctggcccgtcagagcacccaacacataggatccaggcttttgaggaggaatgtcgaaggtgatgatatttctaccgggtacaagaactcgagcatctgaactctttatcgtctgcatgacatggaaacattaggtgattgaaaagaacaaatgcactatctggacctttttacgcgttatagcattagcactggaagttataaaacggtgaaacagaagtctaattgcaaccatactggtataaggctataactaacatcccacaaggaaataaacaataagcaaacagtaatgtaatagcaactcagctgtaccttaagaccttcatctgcactagaggaagccgacaatcttaagctgagagactcgagtgtgatgt

SEQ ID NO: 5105 - DNA, 3160 bp, Oryza sativa
ctctgatcggcccggaggggggaggccgccggcctcgtcggcatggccctcccatttgtagcagtaaagggcagcagggagaaggccggcggtgacggagctgcaccctacgatgattgtgtttttttatgggttaattggatccatgccattgtaaatttacccaattaaaaatttactaatagtattcatgaaatcgggtggatgccactgaaccttttaaaaattagaaacatgccactctgtcacgatttctgataaatcctccgttaaccctaaccgtgggcatcaaactgccctcaaaccgtggcatcaaattgcccccaaaccgtggcgttaaatcctctgacttcttcgttttccatctctcttcagggtctcctcctgtgatttgcagggacgacgcccgagggtggaggcgacggcgtcggcctggcagcgacgtgcggccgcctggcaaggcgctaccgatacgcgtgcgtgactgacggaatcaaggtcttaactgcaattaggattaccaggtgttatgagcaggatctaccgaagaggttgccattaaaaaagatggtgccttcctctgtcccactaaaaagttcgagcctccctttatgtcatcgtcgaactttatggtgccctccacaccattccgtcgctccgtcgctattctttttgggttaccgttgggcaactctgtcatgtgggcccggacaggaaaaatatcgctcttgccctttcattctctcttctccctcgattcccctctctccaccggctacacccagccgagtgtgccgagccgctggacgcccgcgccaccacgccggcctccccttccctcgtcaccgccgtctcgaccgagccgagcgaacagctcctccagcttcgccatgccgcggatccgcgaacccgtccacgttgcggtggcggctctgcatcggctgttgacacaccacgagcagtgaggaggacagtggcctcctgctgataacctccgctacagccttgatggggtggtggtcatcgtcgtcgttgcaacgctgccgcccaactacaagacgaagtcgaagcaacaaccctcgcgccgcatcaccggcgatggcgtcgccgtccccggcagcgtggccgcagcggacgcccgacgaggtggaggacatcatcacgcgcaagatcctcctcatcgaccgcctctccctctcggaccaacccgccggcaacccctccccctttgcctacctcgcctcctccttccgccacgccgccgacaaggcctgcaagatctccaccatccgcgacgccgccctccgcgcgcacctcgccgcctccatcgcgcacctccgcggcctcatcctttcctacgcccgcatcgtcgttgggaaccccgacaccttcccttcgccacacaacgcgccccaccctgccgccgaactgctcgtattcctcctacccgtggccgccgccgtcgttgtcgccacgccgccgtcttctccccagtgccggcagcggtggcgaactgcgcttcgccctgcaggagcccacgtcggccgcgtccgtccccaggcgctggctcgccttctcactcctttgctgctgttgcatttgaggggagagaggagagtgctaggatgcctaagggcaattaagttatttggctgcgccgttacccaccgttacaacaaaaacggatggaatggtgtggagggcgcgataaaattcgacgatggtatggagggaggctcgaactttttagtggcacagaggaaggcatcatcttttttaatggcacacagggaaaaacctctctaacgaactagtggaaaatcgcaagcacttgatgttctccctgccatcaagcattagaatcagacaatcaacatgctccttgttttcacagacgggagcatgaacaaaggattaagcaacggtcgacactagatacctcttgatgcttttttctatttttaggcgtggagtttctgaactttgctttgtttctgtttggaatctggtgatggcgctagcgcatatgtaccaagtggccgtcgctgaagcagtggacggatgaggcggtggcagtgcgggtggccgcagagggtgtggtttgcgcgatgaagctggccgcgccgcgcctatacctgtggtgcacgcgcctcggcggcaggagcttggcgccgtccaattatctaagggctggcagtctggcacttcgccggccgccgtgatgcagcgccccgggttgcgctgatggatgggttgacagactctactagaaaaactattttttacgggcggccaaaacatgttttcgcgggcggccaaaccatccgcacgtaaaaatcattaatttttccagacggaccaagcaccacccgcgaaaatcattttcacatgcagaaattcaattttcccacgcaacagcagccccgcctgtgaaaatagtttcagcgctaaaaaataattttcgccgccaaaccagcccgccctcgggtttcacccacaaataaaaaattcttattcattcaacaaaagacaatcacaaacatccattcatcaacacaatctatacatgaacacaaatgcatcggattcaaatccacaacaccgacttgcattgcagcatcaatcaaaataaaaacaaataaaaaaagggttaattagatccatgccatcacaaatatgtcgattcagaaaaataccactacaattcgtctattcgtagccgtgtcattcaaattttataaaattggaacagtgccactgccgtcacgttttccatccatctcttcttcttcctgttttcttcttcttcgtcccgtctttgtcttcttcctctttccttttctttcttccctttttcccgggtgctgttcatcgtcaccatggccgccaccgcgctcaccaaggtgaggcggctccttgtggtgggcgtcaacgacggtgaggaagaaaccaagcaggaaggaaccaaacaaaactcaggaccaagcaaagaaaaatatatatgtgatttttatttgttgcttccacggattcgatcctggaatccaagaacatggtctccaatcttttcaggcaaaaaaagtagggatggatggatgaatgcgtaaggatctggtgggctgaggggattggatccaaacatacagtatgagagaagaga

SEQ ID NO: 5106 - DNA, 1040 bp, Oryza sativa
catgatcacatcttgaaacatcaacgctctgcaatgaaggaaaatccttggaagttagaatggatcaatgttaacaaacattcagtttccagctaaataaccaaagtccaatttgtagaagagtaatgaacatatcataacagatataagaatgtcatagtttccactttctaggaaactacaaacttgaagcatccttacatcataactgacatgaaaaatgtgcaataaaatcctatagaagtaagtgtcaccattgtcacacagtgattacctgcagtgagttgctccccttgcctagtaattccaggccatcatcatctatgcatgagcaacaaaccattgccaactcctcaagtttctcaagtgaggatattgatctaagggattcatttccaacctggtccagcaaaaaaaaaaatctgttttagttttatagaacccaagtacgtcaagaacataacgaaatggaaattgtacatcaatgaatagctattcaagatggagcatactgcagcaaggacataaagaagcaaacatccataatatcgacgtaaagcacaaccattgtactgtaaatgttcctgcttccagtggtacattcttcaaccatgtcaagaacagctgatcagctctatctgacctagtcaccccatttggttactacatatcaaggttggttgaacccaagctcaccctttctagccaactgaattaacggaaaaggactcatcttcttgccattttattcagaagttatgtcttgacgaaatgtgatcaagcccaatattaagtactctgaaactcatgctccagttacttccctattagcaaaactgttctaaacacaccatgaatccaccatacaggaatccacaacagtaatctgctgcaactaaatgaatcaggctcaaaagaagcaagtgtagatgtcccatggtaaatttctcgtctgattccaaaaggacaagtaactagtagcaaattgcaagacttcaaccttctccaggtacaaactttttcatatctggacaaaccac

SEQ ID NO: 5107 - DNA, 2153 bp, Oryza sativa
ccccccacccctccgattttcttcgctggcagttttatctctgtcccgccacgaaaaagatttctcaaacgtcatgaaaaaccgtttttctaatagtgtcccgcccctacccctgctcaccgtcctcctcgcctcatccctctctgcacttgcttcggccgccgctcgcggcgaagccggtcgatccgccttgcccgtagcccactccagccgccactcgccccactccgccgaccgtgtgcccacctgggtcgttgctcgcttcggccacaagaaggggagagatataagatagagagaagaggggagagagagaggagagagataagatccagtgtgtatgatacgtgggacctgcttgtaagtatgactagttatttcaaaagccacagcccatattccacaactgtttttcgaaaagccacggctcactgctattttttaaaagccacaactcaaacaaacacactgttgatagaggtgagtgtgctgttgttagtacttgcttttggactgtgtttataataaaaaaactatacctacttttaatgtttaagttttgtctcaatgtttaaatattatcttaaaatgttggcatatgtattttgccatcgcatagacggattcggccagcgaaagttttccaagtcgatcccatcggcccgcgtattttgttttttgcgtgaatattgttgtgctaattaattagtgagtattatggattgtgaatggattgtatttcgttcatatgtattctgtatatgtgaataattctgtattctgtgctgataatgcaattgtaacagatatattgcactgatatatattccctccgtattttaatgcatgacgccgttgatttttcgaccaacgtttgaccattcgttttattcaaaatttttatgcaaatataaaaatatttatgtcatgcttaaagaacattttgatgacgaatcaagtcataataaaataaatgataattacataaattttttgaataagacgaatagtcaaacgttggacaaaaagttaacggcgtcatacattaaaatatggaggtaatatctaacttgtgtagctaaaaaaactatagtcctatatatttgtaacagttatactccatctatctacttttgatagtcatattttcaaatctgaaaattctatttttgataggcatatttcaattcatcaacctatcatcttaataactttctcggatttaatgtttgactctccattcttccacacaagattggctacttgagcatcgtgaaatgtaaatattaatgaatcgcttttttacgaggaatgaccagtagcatgtttaaatagatgataagtagaattacttatcattagtctgtgtgccaagataaatatgactatcaaaagtagatagagggagtctatattgctattaaataaataaaattataagtaaacaaattcaaagtaccaattcatattatttaactgtataagtacaatactaatattatgaattaacagtaattatattggggaggcactacccgtcgagcgcccgattcgggcttaaaaaattcgtgctctgacgttagcgtgatgcatgcatacaaaaccactttaaactactttttctctcaaaatatttatccaaatcatgatccgattgcaccattaaattcgttacaattaaatctttaaaacaagaccacacatgtatatattccgatgaattttttaagcttattattgaattattttgaaatgttgtacgttgttccatcacgtatatcaggattgtttcactaaatagatcgatgttccaatcgtttacatcgggcgctgtttcaccttgtatgaaaacaaagtttcagcaaaatagcgaaagaatgtttcaactcactgtaacatttgatccatacatagtgatacattataagtacactatgtgaaatattatttgtggcgttgtttcaccttatataaaaacaatgtttcagcaaatagcgaaaaacgaaagaatgtttaaattcactgcaatatttgatccatacatagtaaaacattataagtacactagataaaatatttttgtggaacaaaaaataaaacaaattcacttaatatagggtttccataatatgtggctgatttgttataaaaga

SEQ ID NO: 5108 - DNA, 5147 bp, Oryza sativa
tcaattttaaaaacaaaataagggaaatcaaataacatttgagaatggtaagctcattttacctctttttcgctgcccgagtggatcgcaagttgtattgcgtgggttgcgtcccctgaggcgcgtcgggaagctgtgacatgtctatctcctcggcatctggtgcgacgtagtcctcatcctcctcgtcctcatcgtcatcgtcgtcgctaggtggagccggcgccttcccctttcccctcccttgcttaatgcgtgacgacgacgagccaccaactccttcacgctcttctatcctgatggagtgtcgagcagtacttggacgcgcggattgaggtagtggtggtggtagtctccccggttggtacacgtcgtccaatccaaccgacctgcaacctaatcttgctgcaagtttccggcacctttgacgaactttctgcatttcaaaaaaaaaagaagtttgttaggcataactcaagtaatgcaaagtgctaaataaattttacctctaaaacattgcggagcgtgttctccgtgtcctcaccacccctcggagcttggagggcatgccccatttcattcacactcctgaggagctctctcgactgaaagcgtgaaaagatatatgttagggtctagggtgcaaatgtaagtaactttgacaaatgcaagaaaacttacgactttgtctctaagtggggcgtgctccatttgatatccaactctagtccggacatcatagggattccgcccctcatcggagtcgcggtcatcctctatgtcggcttccgtccaagtagggcggaggaacagtctatatgtcctatgcagccaacgaaggtactctgagaaaagatgattttggtgtatagtttcgatgtacctatcgttccttccggctgttctccattcatcaatgtatctattatgctctagcccccagtctttcaccttctttgttctcaccctgtcatacctagacaagtagaaggtgatgaaatagtagtgagcatcgacaagggttaaatggtacaaaattgaacattgacaatgaaagcaaacaaagataagaaatatttacttgtgtaattcaactccagttgagatgtcctcaaccggccaatcttgtttcttcccgaactgtcgcatgacacggtgcggaaggtggtactcaactgcccagaaacaaatcaatgggcactggtacatgaaatagtcagagtctcgattgcacatcgagttcagggtcaggcttgaagcctcatttgtgtggtatggtaaccactcaatctgcaaaagttgaagagatgtcgttggttagtatctcaattaaagaagtaaatgtctaactagaagtgatattggaagtacttacatgttgaggctgcaagcagtccatctcattgacataatgcttgtatgccacatcccggtgagcatgtgcagtggcagtactctcaaaaaggtaggccactgtcttctccatgtctggctcattgtagggccaaggagtgaagctttgcctccacttaggccttccaaccggtagtcttaaccacatccacatctgaatcaatagcacacaaccactcatgttggatgatggtgcctgacgacaacaggcctcacagagctgtctatatgtccacactaacactgctgacccccaactgaaacggcccagatcaccaaggttggcgaccaaaggaatccatatcgccgaagcaatgtcacccccagcatcaggaaacagaacccctcccaacaagtgcaagatgtatgcacgggcataacactcaacacgccatggctcagcatcgtcgtcaagatgtgagaagttctgactcagccaagacaggggtattccattctgcttcttcttccccccttgcccctgctcaatgttcagtggaatgccaaacagctgctgcacttgtgcatgccatccaggagtatctgtcttgcccgtcacggcatgcccccgtaatgggagggccaagatcatagccacatcctgtagagtgatggtcatctcaccactggggaggtggaagctgtgtgtctcaggcctccatctgtccacaagtgctgtcaacgcaggagcgttgaacactggcattcctctgctcacgaccaaggccaccccgagcaacccggcagcccttaggtacgggatgtacctatcgtcgaacactgggggggcatgagctctgactcggagcggttgaagtacctgcattagcaattgtaaatcaattagttaatataatgtcaaatacacgctaccgatacttatgcacaagtgaatcaatgccgattcataccctccccgcctcgatcgcagccccgcgatgacgggcctcgtagtacgcctccaaggctgggtaagtcggcggttgtccctcctcggccatcctacatgaaaaagtaataaattcaccgttagttaccaatgtgacatatattaaaagaaaatgaatgcgagaacatgagtaggaaaacaaaatatttacctccctaacacttaaattttttttggacttcttcttttttggacgcttaggacacttagttttcttgtgaccctcctggtgacacaacgagcatctattttgcaccggcgcagcatcaagttgaacgcatgaaggtggtttccttccagaaccacccagacctgagtccatttcgttcttgaatcgtttcgatctcctcttccctcttgttttaatcttcaaatttgggtcagcaacaaattcttcaccatcgtacgatggccactgtgtggggtcgaggtatggctcaaagcgacttgcccatgtgttcacaacggctcttgaagagaactgatacggcattcggttgggagattccttatcaattgcatgaatcagataaacgtgtataagatgtgagcaaggcatatggtagagcaatggcctttggcaagaacatgagttcccctcaccttcaactttgaaggctcttgcgccgaatctaacaccaccacgcgttataccacccctctctgtgacctcgtatgtctttttctgcttatcgaaacaccttgcagtgtgtttgttcgccttactttcttgcaccttcatcttactgtcaaccttggtggaccaacgctgccctaactggactcgcttcaaagcttcatcatgtctgttcacaaagtagtcattacacttcatgaacgtaaatgatacgatggccgtcactggaagcttacgaacaccaactagcacgctattgaactgttcggccatgttggttgtcatgtaaccccaccggcggtcatttctatcgtatgcacgagaccacttatctttatccaacaactcatcttcaagccatttacgaggaccttcgggaatacgctgccttagtgcctcaacatccctctcaaatatccacttctcgtcaatctgacatatccttaggagctcttttgtctgatgcttgtccgcaccggccttgtggaaattagcactgaagtgcctcatgtaccaccggtggtgaaccgatggcaatcctggaacaggagtcatcatggcattcattataccagcatgtcgatctgagataatacaaacctccctatgcggcccaaccacaacccgtcggacaagatcgataaaccagcaccagtctcgtgaattctctttctccaccaaggcaaaagctaaaggtacaagttggtcctccgcatcagctgataatgcagtcatcaaggcaccaccgtatttcccagttaggaaggttgcatctatagctagtactggcctacaatgtttaaaagcctcaatggaaggaccaaagcaccagaatgcacgcataaaaatttttttggtcactccatcaacgttgacaaccctatcaggatgagtatcgatatggtagaccatactgggattcctttgcttaatggcttgcagcaaagtgggcaaacggacatacgcttcaccccattcaccgtaaatgagcttcatagcctcctctcgtgcccttccaagccttgccatacttcaccctatactggaaaacctcaaatatatacaaagctaacgcagaagcagagagtgtaggttgcagttttatggcattgcataacctatttgctatgaactttgatgtcagttgccggtggctccctgaaccttcggcagtagcacaactatgttccttacctacccgtgatatcctccacgtgccactagacctcttagttgcatggaccttccatttgcaccgtgggttttcacatttaacagtgtacctcctatttgcggcagaattgacaacacggtatggacgatggtgcacgatggcgtactcctggagccatagcttcaatgcgaccatggatgggaactctaaaccctttctgagaccatccaactggaatggttctggcaactgatctaggttgatgccgccatctactagtgcaccatgggcatgtgttaggtccctaaactcaggaatgtccggcttcctcccaaacaccttctcaaacgcacgacattcctctaatgctaacttgtcattattagtaagtggagggaatggacggtcatcatcagagtcttcagcaaattcaacatcatattgctcaacacttgcctcctcgtcaacatcatctctattgacttctactgagacagaatcgtgaccaccactcaattcgacataaaagtaatcatctggattcacatattggcctgctacttctgtcgggtattcagggttgactccgtacgacgaccaatgaacactcgccgacaaatgttcacttagatcaagcccctcttgtactaactcccttttcatcaccctcgctgcatccacatcatcagtaccgcaatgtctctttgatggtcctgcctcccataaatcatttccaagcaaaggtctcttcttctctccttcaccctccaagtcttctcgtaccaactcactcttacttgcaccccctccacgacgagaataatatgtcacaaaattcttctcaacgtaatgataagaatgagatttgtttagatccaaattttctacggtacgaactaactttgatgcaaacacctctagagatctaaactgagactcttttaccaaatcaaagtaaacttcccattccaact

SEQ ID NO: 5109 - DNA, 2084 bp, Oryza sativa
aggcagagcctccctcctccctttgccgcgacgcctcagctcccctcctcctttttcccaaatcggcaagggggcaagcccctttctccccctcctttttccccttttcctcccgccggcgtcatcctccctccctcctgtcgccgttttggccgctagccggagcgccagctcgcgccttgaccgccaaagtcggtttccaaaccgacattgccgccccctataaacccaggcgccctcccttccccttttcccctcccaatcttccctgtttctcgcccgcgccattgccgtccttctcgccgaccgcagccgtcgcgtgtgtgccggaggagccggtgcgcactaggacgcggaagggaacttcggccgcgccctctccttcctcttctccggcccgaggccggagagattactcccgcgccatcggcctctcgtcacagcgccccgacccgcacggtagtgcccctctccgttcttcctcctcgctccatctccccccttagtcttcggtggtagcacgagtagactccccgtagctagccggcgccgccccaaccattgccgtcgctcgccgtgtgctcgccaccgtcgccgctcgagctccgtagcacccgcacgtcgccagcctcgatcggcgtagctccgcccaatccgacgctagcatcggattcccgtggccgcgtggatgctctcaccgccgggaatcggcccctcgtggcctcgtcgccgtttccctcttccctccccgccggttgtcgccgccgcgattcgccgccgtcaagcttcctccggcgaatccgagccgttggctcgtctcccctcgtctcgtgcaaccacccggcgtgctcgctttcgccggtatcgccgtggttcgctccgccgctcgccgctgttgtccgccgtccgttccggccggcgtcgtcgtctacctcccgccagcccacgtggcagccacgtaggcgccacgtcggcgccagctcagccgaggtcgggacgggccgaccccggtcagcccctcccgtgcgcgcgttccaccgcgagccgtgaggctgcgcgtgggcccgccgcatccgttcctccgcagaccgcgcgcgtgcaccacgtccctcccccgcccgcgcgcgtgcgccgcgtgctccctccgcacggtgagccgagccgctgacaagcgggtcccacccgggaccgcgcacggtgagcccggtccaccggccctctctctcctcccctcccgcacgcgcgcacttgggccgccttgggccggccggcccatttagctcggccggtccgctccttttcccttgggccgcgccctagccgcccgaggaaaagtctataatccctccctctttccttttcttttctttttcttttccaaaaaggatttaattaaatccttttcctttagaccaaaaatccaataatcttagaaattcaatatcttcccaaccgtaaatccgtttgactccgttcaacttccaaaattcctcaaatctcgagatctatctaatggcacgcttagaggtcattaatagggctttattttcgcagtttgttgagttgtcccgtttcgcgtgtagtttcggagcccgtgtcacgcccagaaattctcgaaccagaatttctaagctgaatgtgcattaaatccctgtccaggaccagccagggtacacaaacgataattgttgacatacagatccacgtcttacaaaaatagaaaagattacaaatgcagcggaaaagataaaagcgagctaaaccgggaagcttgacttcagcagcgggcgactccactccacaggcaatccttgacggcagcgacgaaaccaactttgacaaaacagctccaactaggaagatcttcagctctggtgtgggggaaaagagagcaagactgagtactacccactgtactcagcaagtcataccggaagaggaggtatgatgcaggatataaccaaaggaggctagaggttcttttgcataaagctagcatttaaaagcagtagttgaaggcagtaaaacagttgtagtaattaatcaatattaaccaaacactgtccatcgctacaccacgttgc

SEQ ID NO: 5110 - DNA, 1236 bp, Oryza sativa
gctttgtttggatggaaattattttttatttttatcatattaaatggtgatgaattttatagtataaagtaaatatttgatctggtacccacttttatccacactagtctctatactgaattaaatttgataatgttaaaacttgtaaagattttaacacataggtaaaaatttggcaccaaatcaaacagatccttggaccgtctgatgagagcaactaggtcatatgatttgataggtactgatagctctcgctttggtggaaacttgagagacatgatccggtttccgattgacacaatctgaatcctgcaatcgcaacaccacgtctactcaggttatcaaccaggcaaccgtctcctcatgttataaaccgtgcgctgcccggttaatctcaccaagaaggttaatccctgcatgcgaatcgatgaacacaataaaaaacaaggtagacaacaactgaattagcatattatgattaagcattcgaagttggggttgcacaaactgaactagcgacgaaactacgatgacagaaataactaagcaaaacccaactctaaacgataatgactactgaataaatatgattagggacgctatagggttagacttaaggcgtctatctcttggatttagtccacgacctgatcattacaagacccaatgcctaaatcagagtcgggctggatgaaatatgtggcctgttttacagagtcccgactaccgaggaagaattttagcgtgggaccaaaaacatataaaatcagaccctataatctttctagcaagtacacatggactgtagcgcccgttccgtcgtggcgcctagcgggaaaattaattcctaaaaaccctaattgcgaaatttgtttcttcgcttgtcgtctagtgtccgtgccatctcaagatctcaaatccccgatctatcgtcgagttcaattccgaatccaaatccttccaaatcaaattcctccgtaaaagtctattttgactcccccggggtcgatgggccgaatttcgctcggcccaccttctcccctcccccggcgcgctcccgctctccctctccctctctcgccctctcccctcccccggggcactccccctccgctgccgccgcgccgagcgccccccttactttcccctcgctccgcccgcgcgtgcgcgagcgccgcgccgagcgcccccccttcctcactctacttcttcccatccctggcaagccctcccccc

SEQ ID NO: 5111 - DNA, 46101 bp, Oryza sativa
tgatggacttttggcattgtttaatgtgtggaatatgtgatggactatgtgatggacttttggcattgtgatttgtgcaattggaacttgttttagtctgtacgaatctgtgaattgtgatttgaattgcgaactgtgaattggtacatttgtgcaatatggatctacaatttgcagggaggcagagggcggcgccaaccaccctggcgccgaggttgagaagggcagcgccagccagtgccgcgtggcagaagggtttcgggctgggggagggcggcgccagctacccaggcgccgtggtccatgagggcggcgccagccgaggcccggaggcagaagggcttcgatgggtggaggaggggggcgccagccaccctggcgccgcggtcggggggggcgccagccgttgcctggaggcagaacagacttggcgaaaatttgggggggggagaaagttggtggggcccgtagaggaggggcgcgccagccatgctggcgccgttctatgaggagcggcgccactttggctggcgcccccttcggcctagtcagcacctccacgacagccctattgccacggtggcacgggcacggcgccagtgtggctggcgccgctatgttggggtacggcgccagccactctggcgtcccgaaaaggaccatttccggtttaagttttcccaggggtctatttataaaataagttttcaaaaaggaccaaattgtaaaaatttcaggtagaggcggcgacgtcggttttcaccacgctatggcccgcaagacatgtaaagttgtcaacacgcttgtgcggttttgggccgaattgaaggcgacctgctggttgggcgcccaagctacagaataaggaataagttcacttgatgaccctcaaaagtgatcggaatataatccatgagcctaaaccgcaaaatcggatatctcgaccctcaaactattaaaaccggtgcaatttgactcccttggcggttttagagggcggtttcgctgacgtgacggtattgacctagtctgtgtgctgacgtggcgcttagatagcatttcaattaaaaagatatacgtgggacccgtttgtcattcacacacacaattgtggattccactgacatgtgggccccacatgccatcttatccgtttcttcttcctcccctcctcccttctctatttctctccctctcccctacagccgtccgcggggagcgagcggcggcgggcgggggctgaagcagcggcggacggcgggagctgaagtggcggcggcggaggtaggctggagtccatgtcgtgccgctgccaccaccacccgcaccacccgacggccgacatcgagatgtcgtcggcggccgagctcccctcagaacccgagagattctgcgggtgtcgcggcggctggcggagactgcggcgagcggctgcggctgcacggagtcccgagcggcggaggcgcaggtgtggagcggcggcctacgagcagcgcaacggagacgcgggtgtggcggtggcgacctgcaggtcgagcagggcgcggccgagctcgccgtaccccgccgcgtgtgcctcccgccgccgccgctgtggtctcctccatcttcaccgtggtggagctcagcccgggcgccgccgccgcccgcaggcgatcagctacaccgtccgctccggccgcctcgacgcgctcgcgctgctcctccttctcgcagcggatataccccatggtgaacgaagacgcgcagtatggcgacgagctccgggccgtgtgcccgccggacgcggaggagacggcgtgggtgcacctagaccacggcacgccgggggagctcgacagccagtgctacgtacaggaacgtgctcgccgggaaggtggtggctattcaactcggatcactggacgctgatcagcgaagcggcgacaaggcagatggtcgaggacaacgcggtgaacctgtcagcccctttgcttgttggcttgccgcttgatgttagtacacacatgcactgcctgttgctaccgcttgtgcttgctagccgcagtccagccagtcctcatctgtcgccccttgccgattgcctcagcaaccagcaggagaatgctcgacgcagatgcctcccaactcgcgtgtggtcgcgtcgttgtcggccggctcagcacgccgaccgcgtccatcggcggcggcggggcctcccccgctcgcgccgctcctcccgcctttaacgcagccgccgtcgcaggtgcaggagaagccaccgccggatgccgccatcttcgaggggatgccgacgcgagtcgcggtggcgagacgcaagcggcccttacgcgttcgtgggcgcggcgggagaacggcggaggcgggtgcgtcgtggccggcaaagagggcgtggagcatagtggtggatagtacagtcacggggctgagggtggcgaggacgcggccattctcgtggcccgttttcttccttccgacggccaaccttccacggcagtctcgatatccgccgccgccgctccggccctcgcccgcacgccgctgtcgccgctccagtgccactcccaggtctccgccgccgctggccaccgtcccacactcgcggagagaaagagagaggggaggatatgatttatgtgggccccacatgtcagtgggtcccacctatacttttggtgaatgacaaatgggtcccacgtatattttttttatttctaatgccacctaagcgccacgtcaacaccatgtggacagaagaccgagtcaatactgacatgtaagcgccacgtcagcgaaactgtcctccaaaaccaccaagggagtcaaattgcaccggttttaagagttgggggtcgagatatccggttttgtggtttagggtcatggattagatttcgatcacttttgagggtcataaagtgaacttattccacagaataaacctagcccaaacatgcaaacaattgtacaggtggcctcaaatgaaaaaaagaagggagggggggaatttataccttaattagtccgttccatcgtgccaccttggtcaatataaatgcttgttcagtttattaccacttttaaccttatcattttttatgttatcaaatttggtactctctccatctacttttgatagtcatatttcatcttgacacacagaccaaggataaataattctacttatcatctatttaaatatgctactagtcattcctcgtaaacaagcgattcattaatatttacatttctcaatacccatgtagccaatcatgtgttgaagaatggagagtcacgcattaaatttaaaaaaatcattaagatgataggttgttggattgaaatatgcctatcaaaaataaaatttttagatttgaaaatatgactatcaaaagtagatggagggagtaataccataaactaaacactcttcttcattgtcaccttaccaaattttgatatttctaaaagtttcttccaataagagaactttcaaaatttggtaagttacaaactgaaaacattcaacaataccaactttgatgacaccaaagtgtgccaatatttggcaatgtcaaatcttagtgagattgattttgacaacgagctgaactaagctaagaacgcaagcaaattaggtattaactgacagctccataagtaactcgaaaagataatgaaataagtcagagctttaattttgtcttgtgtttcttcagaaaaataaactagcactcgactaagctaagaacgcaagcaaattactatgtaaaaaaaggacaagtccccctaagaaaacaggcacctacttatgtgctcgagttaaacgacatatttgaagactatttcctccgttctaaaatataagacacagccactcttaacccaaagaccaagaaacaattattatcatcttctagtttgaatcaccataataaatactcactccatctacttttgatagtcatatttcatcttggcacacagaccaaggataaataattctacttatcatccatttaaacatgctactagtcattcctcgtaaacaaatgattcattaatatttatatttctcgatgcctatgtagccaatcttgtgtagaagaatgaagagtcacacattaaatccgagaaagtaattaagatgataggttgttggattgaaatatgcctatcaaaaataaatttttcagatttagaaatatgactatcaaaaatagatggagggagtataatacatgcatccaatagaattagaggtcttgatggtagaggattaaaaaagtaataatttaacggagaagaggttctaattaattgtatgcatgcatgcatgccttatattatggaacatccaaaaaagtagttgtgccttatattatggaacgtagggagtactacatgatagattttcctggacaccacccattttgtttccatgcggtccgaaactgaaaccgcatggaaaaatggggggacgagcaccgggctattgcccgcacgtcttaacccgactgcacgggataatcctcgttatcccgtgctgtcgacttaagagaaccgtacggaaaaatcgattttcgcgtgcaggcttttaagtggactgtacggaaaagtagatggagagtatggacgaccaggatggatagaagtacgtatgtatatagtatacaactccctctatctactcgtgatagtcatatttctaaatttaaaaaaaatatttttgataggcatatttcaattcaacaacctatcatcttaatgattttctcgaatttaatgcatgactcttcattcttccatacaagattggctacatggacatcgagaaatgtaaatattgatgaatcgtttgtttgcgatgaatgactagtagcatatttaaatagatgataagtagaattacttagggcagtcctaacccataacactagacatggtttccataaactccacatcatcaagaaactagtactagacactactcttccaatgcaaacaccactattccatacttcaatttaatgctacttatctcacatgatgccttggatgttatgtagaaaccatgtctcatgctagatatagtttccttatctttcctcatttattcacttgccacgtcattttttttcctaggtggcaacttatttaattgctatggacaccatcctatttattggattgggaatgtacttatccttggtttgtgtgccaagataaaatataactatcaaaagtaacgaagagagtatatttatatgagtagtacacaagtctagtcttggtactagctggcgagccttgtgcatttgttgcttaattatctcgggaagggaaagagttggggaggtgagaactgagaattgaaggaaggcagagcaggggagtcggtagctagtttttacggtgaagaagatgaaacgatactccggtaattgatccttgattaatgttctagtggtactagttttattgtgaggtttaaacggatgagggttgtagctgagtcaatgacatgtcagccacggcaaattcaaatggacgtggctttgcatacaatattttttacgaacgcaaaaaatttgcacgttaatatattataagaagatggcataatttagttacacaacacaaacggtcagaaagccgttgtcaggggccaagaaaaaaaagaaacaaaaaacaaatacataaacggttagctacagaaaaagaaaactcctaccacgagggagggatgggtatggaaacccactacactccggcctgcatctaggcagggagctggagaagagcgaagatagggcgatgacgttgtaagccgcaaccgtctcgatttacacaggaccctccgcctcgatttacacaggaccctccttagacaccaacccaagcttgcatatcagattgtgctgcgcacacgagaccgtatgactcgggccgtcgagcgcgagtttggccgcaatcctctcgctgtggctcggcacttccccatggccgcgatggcaggcgacggaggcgggtccagtgggagcaacgcagggggcaggccggcagaggcctagagcagctggcaagaaaggcgcgtagagcaacgttcaagtccgccatcggccgaccctcaagatcgagaacgaccatctttgcatgccaatactcgtattagcggattgtcctgcctgaaatcgttggaattttcagtcacctttgaatttactggatgtgcaatatagaccaatattctataggaattgtatatatatggtttggaaaactcaaatccttttaatcaaaaggccaaataaaaaaaattctataaaatttcaattatatgaaattcctctgtaaatcatttacttcaaagaggctctaaatttcttttatgtttcaagccaattcaaatgattttttttggaataataattcaaaggaattttgtaggatttccaaaatttcttcaagtaccctgtgttccaagggatatttgtttggataatagggtttagacatgttaaattcctacataagtttaaacggcaacatacttaattaccacaaaaacttattacacggcaccttattacacatgaccatggatgtactagcatataaccacgtcgcctaaacaccgtgaattactagcccacacagattcacagccaaacaagagtaatctaagcatgaactccatcacaaatccctccttaattagcaaggcgattactcactcaaccaaacgccacacacgaaccagcaagccaacgccagcgagcggcggacgtcggcggcggcggataccatttcttccctacaggaaagcggcggcggccgccttggcgcccaccgtgcgcaggaggtggaagtagagcttggggttcgccaggaacgccgcgcgggagatgacgtagccggcggcgcccggcgcgttcatgatggcgccgccgactgccgccgtgggccagaggaagtaggcggccacggcggccccgccgacggccagcgccgacttccccacgccctgctccttcacgaagccgacccccgcggcgaggcccggcttggccgccgccgccacggtggaggccacggccgccaccgcgctcttggcggagttgagcaggccgccgacgaactcgctcacgccaaccatattctgctaagcaaaccaaaacgacagtaataaagtaaagtagtattagctaccgaggtgaggactgagtagtggagtcttccgttgcttatgtagaaggccatggctacagtaatatagtaaacttctataaagttgcaacttccaaaaagaatttaaaaaaataaaaacatattcttattagaaaaatctagtacataataccagttccaacccaaaacactagacatggttttcataaactccatattattaaaaactagtactccctagacactactttctcaatgcaaacaccactctttcatacttaaatttaatgctacttatctcacatgatgttttaaatgttgtatagaaactatgtctcacgcaagacctggtttccttctcttttgtcattgccacatcatgtttcattctaggtaacaacttatttaatgctatggacatcatcctaattattgggttaggaatggcctaatatgtcacatcccatactaaccttgtatttttatgaaacgaatggagcagtcccaatatatacgtatcatcattattgttctaattatatttttataaagttattaagaatataactatataaaagtaaataaatctaataattttatctatatattggatttttaataactttctgaatctattaatgatttaagagctcaaggtttgactctgtgtagtatacaccattagagcttacttggaaacgaaggaattcgacattggtaaatactacagcattgattgattgtttgcacggtcccaaggtgattcctttggctaaaaaggtcttaaagataggaggtgcaccatgtaccaccagcactaacgaaacaaaagtatgagctcttgtactacgcatcacaagcaaagcaacagtgaaaggtcaccttgactaacaacagtgaacgacgaaatcgaaaaaggtaagaaaccaaagctgtggaaagcatgaaggtgaaatggaagtgtgacgcaagatgggattccctgattgatgtcatgtatgcttatgtcacgttatgctgctaggaaagataaccggcaacgaatctgggagttttttttggaaataatattattttaatggaaaatcgcaaaattataggtcagttagacgaaatcgcaagtttagcaccctgtcgaacggaggcagttcgaaagggtacctgtcgaactgccccagttcgatagggtacagttcgacaggtaataaaataacataaaaaaagggaaaacactgtagcgacactgtagcgacgctgcctatcgaactcccgctgttcgatacgtccatgccacgcgccctatcgaactccccctgttcgatacgtccctatcgggtactgttcaagtacttttttattttttttcttggacaactagcctgtcgaactagggcctgtcgaactgccccagttcgacaggggtacctatcgaactgccccagttcgacagggcgctaaaattgcgatttcgtctagccgacctataattttgcgattttccattaaaataatattatttttaaaaaaaattcacgaatctggtgcactcatgcacacacacaatcaggcccctccaatctagatccaaaggctagtgttcaggtgaggtaattttgcaaaaaaagcgcccgcctcttgccctggcattttgcaaaaacccccctcacgattggttttcctatcccctcatctatcagatcgtgtgtcctccgagcgcactaatccatgactcttgcgattctctttgttgaacttgttcgttctcctgcatttcctcttgccataggtgaaaacggtgattgggaaggagcttcatgtccttcctatgaggtaatccttgaacaagaccttatgtcttctcctatatgatattttttcttacaagcatacacatgtactggatactggatattgttatattcttttttttcaagggaatggtataggagctatgcaatgttcttggcttccatggtctaacttgatttactatttctagagatactacttggtcaggtgctgaagaatagttgaatgaagatggtagcaagagaatatgggaggcatctgcagtagcaggaaaactattagttgatcaggacagcttgcttgattttaatgtatctccttatatatgtacaagtgcatttctcattattgatatgcttcagcaagcactgaaaattttcactatgcatgttcacataattaaacctggtattgataattttcacacagagacttcgatggaaaaaccagcaaatttttttacattcatatcagcaagccatcataaccttttgcattcagatttcaagaatttgagagatattacattcaattcaatctgggtgaacatttttaccatgtaagaagaaagaaaaatgtgcagtccgctcaaaattcagaatggcaaacattctgaatatttctgaaaatatgtgcaaatcaaatgtgcgtcagatttgttgttattgcttggtagttggtactgccaattgttgctttgtaacaccactaagcagtagcaatgattcttatcaaaattattcttcttgcttcctcacaccacctaacagtagcaatgcttcctcagagcgatagctttcagaatggtcaggaacaggggcatcgccacatactacatctacaatcactcaacgccggagagaaagctagtgcgcgtgtgtgcaccaggatgggtactgtaaccaagagcaagtacggagttgcctccatatccactgttgatgccacctgcagtaccggtgagagagagagaggggattaaatattagggtttgcagagaacttgaaaaagagaaaaatggaatttgggaatgtgagagagcaaacctgcagcttgggttcctcaataatgtatcccagatgatcgttttgaatcagtcttgaagctttgcttagccaccaccatcgccgaggagcttcgcgtcgtcgccgccgccatcatctccgttttaactttatttaaattagactacttcaagattaactatgtttagtaatatctacaaaatcaaattagttttattatatctataattaaatatatttatcttgggataaaaatgtaactaattttttcctaaaaatttggttaaaacttagagcatattcaatatatctgtaagtaaggtccatatctagaaagtcttctccaccagcccagtagtgtgcatagatcttaatgcagaatcaacgactaggggattaactgatgaattacaaatttgcaggcgactgcacagtagcaaaagcgcaaaaaattaaactaaaaaccagaatctagattccttttagctactccctccgtcaaaaaaaaaaacctagatggggatgcccggattcgtagttttaggtgaagtcacatcctcatctaggttgattttttttagggcgggagagtatttctcgtaatctctcagacagaacctacgtattgctcgaaaagctagctagccaggatagccaggataacatagcatgtcgaacagcaatcgatcgtcgatcgatcaatgtgagcagcaccaacgcaaacacttcaactaggtggcacgattaacgtaagttcctacgaccaagcaacaagttaacaacaaagcagcgcaagacgtacgtactccatccgttttatattgtaaaacattatagcattacccacatttatatgaatgttagtgaatctagacataatatattcatagcaattctaaaaattcttataatataaaacagtggaagtaataattaaggtcgtcgattcgtcacgtcacacggcgaaggcggcggcggcggcgacgcggccggcggtgtggaggaggtggtagtagagctgcgggttggcctcgaaggccatgcgggagatgaggaggccggcgccgcccggcgccttcatcatcaccacgggcgccaccgccggccaaagcaggctcaccgccgcgccgacggccacggaggcgatggctcccacgatgtatcccacggcaaccatggcgatccccgatccctctgcactggctcggcctcggcttctgttgcttaccacttggaagttggaagagatgaggcgcgcgcgatatcggcgaccaagatggatacgtatgtactccatatataatccctccgtcctttaaaataaaccaacatgtaacctctcatatagaataataaatttggaattctggacagttctttatccaaatttgttgtattaaaatagatacaataacaaactataagccaactctaaacacatatatagataaaaagaagaaagtgaagagcagtaggctataatttatagcccgctgcagcatagaatggacgcaatatatgtattacaggtgggatcatgtatcaatagtatagtatatgtttataggtaactattatatatattggctataaaattgattatagattatttggaactattagttggctatactattaaacttgctcttaggaggggatgtatctccttctagattgggtttttttttatagagggagtagcgcacaagctgctttaccttgggaagctaagtaaggccttgtttagttccccttttttttcaaaaaatatcacattgaatctttggacacatacatgtagcattaactatagataaaacgaaaactaattgcacagtttgcatggaaatcacgagacgaatcttttaaacctaattagtcatgattagccataagtgttacagtaactcacgtgtgctactggtggattaattaggcttaataaatttgtctcgcggtttctagacaagttatgaaattagttttttcattcgtgtctgaaaacattttccgacatccgatcaaacgtccaatgaggcatctaaaaattttcttttcaccaaccaaacgcaccctaaatgacatgtgggcccggatgaattcgaatggacgtggcttgcatgccaatactcgtcaaaagcttttgacacgcggattgttctgcctaattaagggatccgatcctcatcaattggaaaagaagaaaaattctatgcacacaaccacgacatccgattctcctacgaccacggtttatgtgatgcctgtgacatatactccctccatttgatattaattgtcatataattattgaatatataagcatatattaatttaatttattccataaataaatcataacattgcagatgtaaactagcataatcgcattatacgatctacacatataaattggacagtaaaccttgaacagatcgaatatgcgaaacataacgaatacgtattgagggttttcgaagctcagctgcacagcgggaaggactcgcggtaccgggcgttgacaacagcgtgcagcacccgagcgaagagaaagacgagctattgtggatgaacagcaagcagtcgcgcaaagcgcttcccaaaaaccttattgtcaccttctcccgatgcagtacgtcgaaggcgagggttccggagacctgctctcccaatcactggtgcacgctggcgagcaggatggaataaactatgtgcgacaacactgtatagaggaggaggcaaaccctaaattgatttcgcgtgtgtgttgactgaaaacacggcggcttaggagatttgcttcactccagtgcaggtccaaggcttgtctcaagtgtcaagagcatgtaggctgattttatcctgcaaccagcaagaaagacaaaaacgtaattagatgaacgatagccaatcggccgatagggccgatgacttattgtcaggacccaaccgatacgggtaaacctaattggctgtggctttatgatagtcaattagagccaaaaccctaaatatgccctattggttgtaggactgtttcttttagtttttatcaatcgttttaagacaatattatggaaatagccgatagatcaatacttagagcgaagaaagataatgtactggctaatactccaatacagacttatataaacagattaatctataaaaatataccaaataacaattgatcaccagatatgaagtttaagcggtcaatctaactcgatgtatttatataaagcaatctatctatataagaggcaattataaataaacagatcatgaaactcgcgctatcatatataccaggtaagatggactgaaaccccaatactatccttagttatgattagttccatgttagtttcaattatatgattctaagcacggctagggatgatgcatcacaaagtatgcaaagaacataaagtctagacaaaattgctacaggatatcgtgactaggcaaaatttgctataggacatcgtgacttcacggttttagctgtagtacaccgcacgaagtgacttttgggggaaaacactcccaaaagttggatatttgctagtgaacaccgcaagcattaaagtaataatttacggttagagaggagagagaaatcgtgtgaaatgtcaaaaatgcccttgggcccacatgtcaactctcctatctctcttctctctctatccctccttctcttctctctttatcccaaatgtcgtggcgacggcaggagggcgagggcggagcggccgcaacaacgggacggcaatggctccggccagcggcgcctgccgccgacggcgcccctccttcctcactccgacggcacctcctcactccagttgaagaggagagagaaatcatgtgaaatatcaaaaatgcccttgggccacacgtcagctctcctatccctctgctctctatcacctctttcacttctctcactaatctcttctctctctatcccacatgttactgacgatggtgggtaggcgaggtttggccggggcggcgggaggacgagggcggaggcagaacggacgcgaccaacggcacgcggaggagcggcagcgcggctggacgacgacggctgcagcacgcggagtgaggagggaggggcgccgctggccggagccgtcgcccgcgcgaagtgaggagagaggggcgccgtcgcccgcgcgaagtgagaagcaatttgattttgatcaaaatcaaaacgacttataatttcaaatggagtgagtacttatcggacttcgctaatatttttttttaaagtattttagttaatcagtaataaaacatactagcagtgaagcccacacaaccacccaaccagcctgagagcgtacccgtacataccaccgctcatgcatttggtacaatcttataagaatttgaagcttaatgttagtacggatggtgaaaattctataaaaatatacatgtttcaaataagaaacccttaggacttctttggatggtagaatttttcgttttttttgtatgaatcaatttaattcccatgaaattcattaaaaaaattctcaattccaacggaggctttaattcacatttcagtaatacatagagttcgactgttcgagtgatcagtagagcagcgaggtgtgtggtacaacgaggcaatggggggaaataaaattaagactccatacagcttgtaaaattaagaattattgaaaagtttggatggattttagatgagaattcgtaactattaatatcaaattttatcgctattaataaaaataaagtttgcatattgtttttatagaatttagtcacatatcggtatatgatataagtagtaccgtatatatggagggattatcaactaataccccattgttatccacaaattcaatgtgtaatcttaccgatgatctcggccttcacctaagaaaaacctcacatcaaccaatgataatcttattatttgcaattagctagaacagtaacactaacgatgaccttgacagttactatcatgaggaagtttctatcccatttctcatgcctcgtcttgttgtttcgatcgttatgtacagcaaaggaaaggaaaagggaagattaggaagattcgttttaacgagataagtcattaccgtatgattaattgggtattaactattttaaattttaaaaattaatcatttgattttttaaaacaacttttcatgaatttttttttaaaaaaatatattattaccagttcggaaatcatctgccgaacacagcctagacgacatcgataccttttcctggtggcaagcaaagtggctagcttaatttcaacatgcaagtagctgcagccaaacagcatataattttggaatattgtaatagaagaatatattgtaccccgtccgttcaaaatatatatatgacgtattttaattaaccgttaaataagcaagtttgactatagtcttgcactattttgcttacggttggaaaatcgtatagtcattagaaagcacttttgaacatgaatccaacaatatcattatttatggcaaaaagaaacctaaacattatttgagatagtcagttataaggttcaaaattagacagtcaaaattcacattacatttccgagcgtacggacggaagtaaatatgcgtacacgttcggcaaatatcatccatgggccatggcgtacgtatatgctagtaagtagtactaggaaaacatttgtatatactcccttatttatatactcgtaaagaaacgtaaagaaagttgtttagtataatgtttaaatcaaacattgggaatataaatcatgaataactctaaagttgttgagtttgaaaatgtaaaaattatatgaatagatttgtcttaaaaaataattttataaaagtatacatatatcacttttaaataaatatttttatagaaacaagaagttaaagttatattttggagaccgtgtcactgtcaaaaacttcctttacgactacggagggagtatatactaccgttaccgtatggcgtacaggagtatccgagtacgtatatacggggtgtacacgtacaccgtacacgtacgtaggttcattttacacttctcgccggcggcggcgccgccgcagcagcagcagcaggcgaggcggaggcagtggagcgcgagggcgccgagcacggcggggggcacacgaccactgcggcgacgcggagccaccgccggtgtgtccgtacgtcgtctccggcggcgggtgtaagagcgtacgtctcggcttcctcggcggccgcggagaggagcaggccggccaggaagacgacgagctccgtggtcctcgccatgacgagctcccacaggcggccgaagctgtggtcggcgccggcgccggcggccacggctgcagcgccgcctggtaggagcctctcctcgccgcggtctccgggaacgccattgctgatctctcgatctcagtagtgtgaggagtgagtgtgtgagtgagtgagactgatgagacaggaaaaatatgttgggctgtaaatatagaagtatgtttatctaggcccaagaggcccatatttccatatgtacatgtatatgttcagttgatagagtaatgaaaaagaagtgaagcttccagagaaaacaaacacaaaaaacttcatggtatcagagcaggtcgccggtgacctcgccgacgctgaacccaagctggcggcggcgcggaccagcgtggcacggcgaggcggcacggatcggctgccgccgaggagccaggtggtggcaagggagctgagctgggcgtggatcgtcggcgtaggatccggctgcggcgctgtgaccggaggagcggcggcggcggcgtcgacgacaggggtcgccagagctcgaagggaggaaggagacggctgctgcagctgcagcagaggcagcgacggcagaggaagccgacgtggtggaagtgctgagggcaccgggcgtgcacttgctggctgagttgcggcaggaggcccgtgcggtaggaaggagagagaaaaggagaagtaggagaaggagaggaaatctgcagctgaggatttggtgctgttgctgcgctgagaagaaaaggagaagcttgtgctgtagcggttgcaaggaaaaagagaggaaagctgaggatttggtgctagtggtgctgcagttctggtttgctgctgctgttgttctgctgaagtagtgttgctgctactctgacctgagagaaactgggaagtggtgctattgctgtgttttcttcttcaaattgaggtaatcagtgttgttcttgttgctgctacttgattaaaatggggaaaaatcagggacttgaacaagtgatgggtaaattggtggacatgcttgcaaagaaacttagtgaggccccaactacaagtaatgcagtggttcctcatactgaaacaatgcaaaaaattgagttgatgcaaaatgacattaagttggagggtgttaaaaattatttgagttggtcaaaaagagctttattgatcttgaaaacaaagggattagaagaatatgttacaagggagataaaggagcctgagagcacttcaaatgttgagtggaagacttggagtactaccaactcttcagtagtagcgtggttgttgacttcacttattcctgctattgctacaactgttgagaccatatctagtgcaagtgagatgtggaaaactctcaccaatctctactcaggagaaggaaatgtaatgctaatggtggaggcacaagagaagataagtgctatgagacagggggagcgttctgttgcagaatatgttgcagaactgaagcatctatggtctgatttggatcattatgatcctcttgggttagagcaccccgattgtatagcaaaaaatgaggaaatggattgagcgcagaagggtcattgagttcttgaagggcctaaattcagagtttgaagggagaagggatgcaatgtttcatcaaaccactcttcctaccttggatgaggctattgcagctatggcacaggaggagcttaagaagaaagtattgcctagtgtcacaccatcttcaccaagtgccacatatgtagttgcacaaagtaaagagactagggagtgcttcaattgtggtgaaatggggcaccttatgcgtgattgccgtgctcctcgcaagcctagttatgggagaggaagatttggtgacaggggtggagcaagaggtggaagaggttatgcaggtagaggtaacagaggtaggggttatgagtatagaggtgatcacagagctaatgtggtcactcttgaagagggttcttctggacctacaaatgttgatgttgccaaccttgttcattctacctcaggtaattcaaaccaagcatttatgtctatcaatagctctcattcaaattggatacttgactcgggtgcatctagacatgtcacgggtatgtgtggagaatttgcatcatataaaccatacccatttacacgaaaagaaacaattcaaactgctgatggaacatcatgctcagttaagggagagggtacagtacagtgtactcctttaatcactttatcatcagtgttatatgtcccttcttttccagtgaatttggtttcaataagttctcttgttgatcatatggattgtcagatctcccttgatcgtgagaattgtttaattcaggagaggcaaatagggaagaaacttgggattggcgtcaggcgtgatggactttggtatttggatcaaaaggagacaagtgaagatgtatgtcttgcattgatggcttctacaagtgaagaagaggctaaggtattacttttgcattgtcgactagggcatatatcttttgaaactatgagtaagatgttcccaacagaactaagtagagtggataaacataagttagtatgtgatgcatgcgagtatggaaaacatacaagaacatcatatgtgagtagaggactccgaagtatgttaccatttatgctaattcacttagatgtttggacttcacctgtggtctctatgagtggaatgaagtattttgttacctttattgattgctactctcgcatgacatggttatatcttatgaggcataaggatgaggtgcttaaatgcttccaggatttctatgcatacattaaaaatcattttaatgctcgggttcagtttattagaactgataatggaggggagtatatgaacaatgaatttagtagctttctttcatcagaaggaatattgcatcaaacttcttgtcctgatactcctccacaaaatggagtagctgagaggaaaaaccgtcatcttttggagacagctcgatcattgatgtatactatgaatgtacctaaattcttgtggagtgaggcagtaatgacagcaacttatcttatcaaccgcacaccatcaaggatactcggaatgaagacaccatgtgagatgatatttggaaagaataaatttggtgttccaccaaaagtgtttggttgcacttgttttgttagagatcatagaccttccattggaaaacttgatcctcgggctgtcaaatgcatctttgtaggctattcatcttgccagaaggggtataagtgttggagtccattagaacgacgaacctttgtaagtatggatgttacttttagagaatatgtcccattctatggtgagaagacagatttaagttctttattcattgatcttgatgattcaactagtggttatgatggtcaacaaatggaaggtgaaatattgggtccaaagggagatgaacaatcaaagaaggaaaagcttgtgattggttcaattccatgtcctataggtggtcctgttgcacaggagcaagaatggaggaagccacatgaagaggaaaatcttcaagtatacacaaggagagcaaggtgtccagtaatacaacaagttgaagaggataatcaggtagaggaagatgtaagtcatgagcaagggtctttggagtcagggggagaagatgaagaagttagagaaaaaggatctgacatgccaattgctgtcagaaaaggtgtaaggagcaatgcaggtaaacatccactaaggtatggttttgaagatcaacatgaaggtgatgatgagaataacatatccaactatgtttcttatgactctttgtcatctacatataaggcctttgtagcatcactagactcaatgcaaattccaaaggattggagagaagcaaagcaagattcaaggtggcatcaagctatgctagatgagctagaggctcttgaaaagaacaaaacatgagatcttgtaccatttcctgaagggaagaaagttgtcaattgtaagtgggtatacacaataaagcaaaaccctgatggaaaggtggaaagatacaaagcaaggcttgtggttaagggatatagtcaaacatatggaattgattatgatgaaacttttgcaccagtagcaaagatgagcacggtaagaactcttatatcttgtgcaactaatcttgactggccattgcatcagctagatgtcaagaatgcctttttacatggagaccttcaggaagaggtatatggatatcccacctggatttgctacctcacaaactaaaggaaaagtgttgagattgaagaaatctttgtatggtctcaaacagtcaccgagagcatggtttgatcgttttagacgtgcaatgtgtggtatgggctataagcaatgtaatggcgatcatacagtattctattgccataagggatgtcacactactattcttgctgtgtatgtggatgatatgattatcacatgggatgattctatagagatagcaagattgaaagaaaatctaagtaaggaatttgaagtcaaggatttgggtcagtaggcatcgagattgcaagatcccctagagggatagtactttcacaacgaaagtatgcattgaatctgctcagtgacacaggtatgcttagttgtcgaccggcctctacaccaattgagcaaaatcttaagctttgtgctgagtcgggagatccagtgaataaggagagatatcaaagacttgtagggcggctgatatatttatgtcacacaaggccggatataacttatgcagtaagtgtggtaagtcgatacatgcatgaccctagaagtggtcacatggatgccgtgtataggatcttgagatatttgaaaggtagtcctggcaaaggcttgtggtttaagagaagtggtcatcttagtttggaaggctattgtgatgcagattgggctagcagtcttgatgatagaaggtcaacctctgggtattgtgtatttgttggtggcaatttggtgtcttggaggagtaaaaaacaacctgtggtttctcgctcaacagctgaagcagaatatagggcaatgtcggtgggtctgagtgagatgttatggttgaggaatcttctatgtgagttgaagttgttgaagaatacttgcatgaagctatggtgtgacaataagtcagctatcaatattgccaacaatcctgttcaacatgatcgaacaaaacatatagagatagatcgtttctttataaaggaaaaactagatgagggaatgttgaagctagactttgtaatatctggagaacaaatagcggattgtctaacaaaggctttaggtgttgcagagtgtttgtctatgtgtaacaagatgggcatgatagatatctatcgcccatcttgagggggagtgttgggctgtaaatgtagaagtatgtctatctaggcccaagaggcacatatatccatatgtacatgtatatgttcagttgatagagtaatgaaaaagaagtgaagcttccagagaaaacaaacacaaaaaacttcaaaatatactcctagacaagttgagaatttatcctagaggatgctaattgataagattcgcaagagtacgagttgtactatatgcaaaatcaataaagcaaccacaagtattactactccatccgttctattttaagtgcaatcataagtttagttttcgtgtccaactttaattgtccgtcttatttaaatttttttaataattagtattttgttgttatgagataataaaacatgaatattactttacatgtgacttatgtttttattttttaaaaaaattaaataagacgaacggtcaaaatcatgcacggaaaatcatgaccgcacttaaaatggaacagagggagtacaaagtaaagccatttgttcagaggaaaatatgtaaaatctgtcattcagaaaagatcgaatactagtactgtgctcttcccgactcacatccttctttttccgcgacgtacgctatttaaattgctaaaaagtatttttctaaaaaaagtttctatatcaaagttgttttaaaaattcatattaattaaaattttaagtttttttggctaatatttgatcaatcacgtgttaataaacaacattgtttccgtgcgttaatgaactccacctcgggaactcagccttagcattaacctgctatggaacaatactccctccgtcccataaaaagagcattcttagcatcccaatgcaaatttagtgaggagtaaagacaactaaaatgtcccttattatttaaaaaaaaatagtaatgatgatagatatgtaaacggtatttaagggataaaacttctcgttttacgtgctgaaaataggcaggacagtagaagttgattttttttgacaaaatttaaacttcagaaattgagttttttttaagatggagtatatgagaagagattttttttccttgagattcggacaagatgacagtgatacagtttgaaacagagctgacaaacctcttccctttcagttaagggtttaaggcatctgacatcagatttcagataaccacttccctttcagtcaagggtttaaggcatctgacatcagatttcagataaccaggaagcgttttgattctcctctctaaaaaaaaagttctgaatcctactcttttaatccttgaaaaggcggtggcgctgttcgttttcttacatctgaagaacagatgaaaggaaatcacagcaggtgagacaagttaaaccacatctccgtcgattgcatacagagcacaacgacgagaggaaacatacacggctctacaatctcggaccaaggactactcatcgatcagagagaaaaaaaaatgcagcagatatgcaaagatcgttacaagacagatatagaacagagaagctcaaggcgtcattaaccctatgaagctttgacaagatacattacattaatatatattggctatgccgaatgccgatatatcaatatcgctggaagatggattgcacaacagtggctgccttagttggaagaaacatgttgatgttggccattgagtggagtgacgtttgagatcaacagatgccttcatgtgtgacttgtccggagcatccatggcggaagcttgctgttgcctgcttgtgccggagacggttgagcttctgactcccctgatcctcttggttggctttgactgaattaagatgaggaaaaacagcataactaaaacagacaatggagttgatgaaatagtagtaacatgctagatcattcctaacgtcaagttattgttcagacatgatatatcaagctgagaccaaaccatttggaggctttttcactgtttggttcaggcgctttcaggcctgggcttatttgttccaaacttccaatagccatatgaaatagaccggcagcatttgattgaacaaatttcaccggattaagtttcctaggcatagaccatcaaaaactactgaactgtgatagataatggaagtctgataaaagaaaaaatatagaataaaaatttgctgaagaacaaaacagagttttgttttatttatggtgagtgcaggggcaaaatatatggaagtaaaagcggtacctgttatttgttgtcgggatgggatctggagccgtcactggtgttggtgatgatgtgcttggtgttgctccattttgctcctcccggttagtgtttattatagcattgtttttctccttttctgtctccatgagctgctccgaagaatgtagacaaaagggtttgacctccaatacagcttttgtagtgatctgatataaaacattgttgtaaacaagaatgaaatttaccttttgcagaacattattctggtttttaagtgacttttcctgcagacaggaagatagcagattgtaagaatattcatcagcacgaacctatatcaacttcgtccatttctcagcacaatattaacatggctctgttgccacttgccagatcagatacagtaacaatcagtagtgcaggtccttttttttccctatgtttatgcatacattattgcgtaaaaggctaacggtcaagtccttgccatatgcatcgaagatttattttcccgtagaatgttcaattttacaacgtagtctgacttagtctgttctctctcccctagaatatatacattgatggcgactttcctgttatacccatttgacaacattgtgcatttcccacaatatgaccaagacaagtggcttctcgttagttccttaggtgattcaaattgactaatgatttcttcttataatggaatttctagaattgccaaaagacatgttttacatgaatatattctggtagaaggcaagaagagttagttgtctgaaaattgtttgaatgcaactttaatactccaaaacaatatggtataaacagactgctacattgctatttaaggagccacattgagggtaacctaccttcttctgaagctcagaaattgattcaaacagaagctgattctgcaaaagaaaaacaaaaaggaaagtaatgatgttttcaaagattagttggaaataattaaatcaagcaaatttgatccctcagtcaacagtgcataatggacacaaatttcaccttttttgatcttatatgcttcagagaatattccagttgatgttccaattgctggagttcttttattgttagtgtgtccaattgttcacctaagagttgccttgagcagtagatagaccaactcaagttagcataatcttgttaccaaagtgaaaatttcttaagaaagtttgcagtacctttggctcttctgaagtgcatccagtttggacttcaaaattccatattcatcaccccagttttcctaggagaaaatgaatatcaagatcagataactaaccagctagttaaataaacagccggagatagttctccaacagtcagggatgtttttttacctggtcctcagtatttggctccagtacggctctttcatcaaacgagtaacgctggtagcgttcaaggatcccttccatactacagaagaagtatcacatgattatgctttggtttgaccaatgcatcaaaagatgatgccaagcatagtcttagagcaatatcaaacaaatgcacagttataatttttgtaccctcaataattcttaaggcttgtcaggtgacaactacaaaagtaggatccattattcaaattatccatgtataaatttaaatcataactgctacaaaaattatgcatcagaaatagcactttgaaaaacatttgtatttgttggctgaaactttatccattcatgttcttcgtcgtaagtttatatctaattagaatgattaaaaaaaggattatctggccttaataacattagtacatatggtgaatccacattactcccttcgttaacaaataaaagtcgttttgaaatgtgtaatcaaatctcaacatcaactcactggagaatggattctaaactctcaagggaacatcccctcgttttttgcatgtcatctaaatggttatgatttttttaaaaaaaaatcgacaagatagattaatatgtgatagattacttcacaaacatgcaagttcaaattcaacttctacaagttacaacaaaaaaaaattaaactatggctagttaatgtatattcacggtcaaatttaattttttcattgcaacttgtagaatttgaatttgtccttgcatgtttgtggagtgatttatcacatattaatctatcttgtttattttttttcaatttttttcacaaccgtttggataacatgcagataatgaggggatgtcccctcgagagtttagaatagttcccaactcggtgtataaaaataacattcatagattcataattgaataatgtagttatattttaactattttatgagtagatgatcatacaaagaaagatgtgtgttagggataatgtcaatatcctagacaagaaataaaaaaaggaacagaaggagtatttggtagcatagaagtagcttgaccttaatactaacacaataatgagagagtattgttgcctatccaaaaattttgcaaatttgaaattatatttatcacaaaaggcatcatttaggtcccttttttcccttacgagctactgatattatgctccctccatttcataatacttggtgattttaagttcgcattgttttagtttggccattccaattttataaataaacttttagtattagattatgtaacatattattaaagtatgttacatggtaatggtaaatatagagatataaatcccatccatcataatcataaattttaaaagatattaatggttaaactgaagcaatcaccggtcaaaattgccaaatattatgaaataatagagtataggaataccaataatgaaatatttaaattcctcccattaaacaaaagatattagcataaacataagcagtttgcttaattgaaaaccataaacatggttatacttgaacagtatagctatgtcaatcagtttattgttgtcctaaaaaatccatttcaagaaataaacaccccaatttgtgagagcaagttaatagcaatgggcaatggcaacttgcaccatgtatagctaacttggtgacagtacacactaaagggacaaaagaaagttgtagtttcagttaaagcaaggccgggtattaatttacttcccattatcttaaaaaaaaaaagggaaatgaaaccgaatgcatcaaatgaacaagttaagtaagctggtcaccttatattccacctcgaaattaactaaacaaaagtatcaaaccatatgtcatgtaaagctggccgcgccatttataccagtccaggagttgtcagtaacttaagaccttactggcctggttagaggagccgcttaattagcaaggcgtccgtgcatatttcaactgaagtgctgctctaatgatttccagaaataacgagacaaataatacaagtttaccggcctagctaggctttggtaataagcatcacttgtatatgctacagtacacaagagtataagcatatgataaacctagataagcacactaattaaaatttaaacatatctttctttccgcccgtactgatgaagcacatgaattttttttcacctattattccattcctttttatacaaaaaaaaatggaagtgaacgtgttcaccaatgctacgatgattgatgagtccccaagaacaaaactgagcagcatataaagctaaatcagcaacagtgcatgtaccaccactgtatattactagcttctgatatgcatggcagcagcagcagcagcatgccagcatcacatagagagctgtaatccaggggacacaagcaacctacaactagctagacttcgcgagcaactccatcccgagctaagcagcaatcgcacgaacgaacacgtacaaagccatgaaccgtatgtgcaatcagagagcacatgagagaaatcaatcagcacgaaataatagcaatcgtacacgcaccaacaccaccagccccctcgcattccgcagcggaaacgatcgaacacaaggcaggaacccgtacgaaacgaaatcgaacgcatcaacaagccgcccaggaacggggagctccgcgagctcgcccatggcgcgcgcgcggcgaggaaaggcgacgggcatgggccgtactacgtaggtaggcgggaggtcgcggagaggaggaggaggaggaggaggagctaaacgcgtgcgtacctggagtggctggagaactcgtagagcttgcccttggtggagaagacgatgagcgcgacgtcggcgtcacagagcacggagatctcgtgcgccttcttcagcagcccgttcctccgcttggagaaggtcacctgcctgtttatcttgttctcgatccgccgcagctgcaccggccctctccccatcgtcgtcggcggcggcggcggcggcgaaggcggcggtggcggtggcgggtggagggtggagagctcggggaagatggaaatggggggaggaagagagagggagggggagggaaggcggttttagatgggggtggaatgcggtgtggccataccagggcggtttcgagtgcctcgttgtcgatttccgattggccgaggcggtttcggggcggcgtggagggatcccggccgtcggatcaggagagaggtcgttaccgcggccctggcccggtggggcccacgggccacgcggcgcgcgcgaacccgtgcacccgcgggctcgcgctcgggattggtcggtgggtcggatggggcccgcttgtctgtgactgcgggtgcggtgggctcgcgtgagggatgggtttttctttttccacaacgtaggggggtgtcgggtacaaggaaacgagacgccggatgacacgtggcgagcccacgtgtggtcgtcgaagcgggcgggtggggcccacctgccagtacaggtttttcttttattttatttttttctttttagaaattccgatacgatacgagtatttctgtttgtactactcaactccgtatagccgccaaactgtttggcaccgagtactacctagtagtacaatacacgtactgggagtaccagcgtttgtttgttggtgttgaaagatttttttttcttttttttaagagagttcgtgttgcaacaatagaaggagcggacaacaagaccgtagaaaaaggctagactttttttttttaagatactccctccggtttcattttaattgacgctttggacaatgacacgctctacaagatataccttggatcttatttttctattataatatatacaataaataaatacatgtttacttttattacagtgttttgaaagacaaatctatatatgtttttctagtttctttaaactaaatatttttaaagttattgatggtcaaagttataaaagtttaaccttaaccttgtctaaaacattaattaatatagaaccaaagggagtaatagattaactggtctccacagcccaagaaaaatgaactaccttgtggctttgtattgctatgctaccgtggttgattgcaaaattgcagataggtaaatgacctttggctacacacaggggcggagctaccatgattcctgggtattcccgggaatacccaacttttttatcaaaaaacaagtatacttttagtatatacacatgtacacatattagtgcacctaaatcctcaattcttcgatccaaacacagtccaactggcctcttgcaacgcctcctaccaacccgacccactccgtcatgacccatcagacatcagctgacccacttagccaccactcttccatacggccccctctccctctccctccgtgacccatccctccctagctcggttccctcgcgccgctccccatttccaaaccccaggtggcggcgcggcgaggcggcaaccggcggcggaagctggaccgtgctaccgcggaggggtggcgcccgccactccgccaagctcaggcggtcaggccgattgggtggccggtggccgcgaggggcaggggcagctagcggctcagcgcttagacggaaatacccaactttaaaatcctggctccgccactggctacacaaacgaatgttagccatgtctaaaaggattaccatgttaaattcatgttgaaatatttttttaaagataatggaaaataatcatggcctttaacaaacaagcgatggagccatttcaacgaaaaatatgtataaattagagcaacctttgataaacaaactatgaaaatatacatattggtttgctctcaccttccttttgttttggattatactcctctatcccaaaaataaatcaaactccagagatcaatctggacacatgtgtatccagatttttatttttattttttttgtgaggggggagggggggctacggagtgagtacacgaaagacgcgtgggcatgcagaccacactcccacatccatgaatacctcccactcccaatgctcacacacccacaaatgtgcctctcactcgcaaaccagaagcacatccctggtcccactataatgttattgaaagtacatccgtgtgtgtggaatgtttattggaaccagaatttgaaccatattagctatttctgaagtcacgtacccacgacttcaccaccacacagacgatgttttcccactactgtttgtattttccttagatcttgtgcaaaggttgcatcttgcatgagatctaggcgatttatcatctctccccttgcatatatcctccaccttatcattcaatgttacaagcaacgtggaaagattcaaggtgttttatgacatggtaggctatctcatggataaaagttatcgggactatcacttaagatgatgtggtaggagtaaaaaacaatagcgatgtcttcacacatgcagctagcatgaaaaaaatagagtaaatataatggcaccaaacgcatatacttgattagcatacttaggggtgaaaacaagtcgggccgagctaggctctgctgaaattagcatcacaagctaaaagagtagctcggcttggctcaacttcttcttgacctctagttggctcgtgagcctatgaacaaaaaatactttcagagatgaagaggagtgagaggatattggaggagccgacgagaagagtggcaactaggagtcgagaccaacaaggcgcgcgacaggtcattgggcaccagccgcaccaactttgcgagaggtgagtggcaactcgcacattgtgcttgttagcacaagctagcgacaccaaggagcagcgactttctatagtttggtcaagcagagaggcaacacgacgagttggtggaggctagagatgccttcaattggtggagtcgacatgcctacgtgcagcctcaagtatgacatgtgttgaaccgaagaaagcagtgttgtgggtaggagcatggctgagatagggaataggagacagggtgcgaggaaaggttgggaacttcggctttctttaactagattgaccactagactaataatgtgctatgagttaaatgagtgggctcgccagctagcttgggctatactcattctcgaaacgtgttgtcttatgagtgaaaccaagccatgtgagactaaatggagctcacaagttcgagatctttgtccacctctcacacaaaaactgatgagtagttgtattagtatgtgctttctgttgaaatgaaaaatgtataaggtgaattagtttgagttcttttcagcaataatgacaattttcttattttccgttatcatactttccaaatagttaaacattgtgttttgtgaaaaaaaaatatttacatattttttaaaaaaaatcaaagaactctactttttaagtttataatggctaataatcatgctctaatggttgttctagttatacgagaacatgcaacctgccttctcaaacgaagccttactcactactaaaaaatggtttttctgtcggccaaaatcagtctttgatttttgccagccttactcactactaaaaaatggttttttctgtcggccaaaatcagtctttgctgatttttgctggcagttaggttaaccgcctgaaaccaaagggtagagaaaataaacgttttcacattcggaacttaaccgccagccaaaaaacatattttcgttggcggttctgttacatgggctgctggcaacagtccatttttgcttacgtagtgttaagacgaccgccagcgaagctcttttttggttaaaaaaattgaaaatatgttaatgcatctgttctctgaccaccagcaaagaaaattaaagaaaaattgaaaattgccagatacaacaaccctgcattcccattccacattgcaaatcaaatccaagaacatgccacaaatacaagcacaaattccacaaaatataagcaaatctcaactattgaacatgcacaatcgccgatgctagatctgccctcccgatgcacgctgcacatggtcttgggcctcgccaatgaccggcttgcggcggcctcctcctcctcgcggtcactgccaccatcgaggtcgtcgtctcctccttgcccttgtcatccccgcacagatctggcaagaacgaggccggatccgcgccgatagaggtggcggcggctcgatctcgccggtggagaggggagagagctcgacaccgccaatctcgtcaccctctgtgggaaggagctcgtcacggcggtggggagggagcccgtcacggcggccggatatgatgcccacggcgcctcccgctgtctgcgctgtcgaagaaaaggaaggcaagacggggacggagttggatccggcccccgccaccgccaaactggatccagccgctgcctcctccgccacctccatgcccacatgcttcacaggctccaggcccaccgccgttgtcccctcaagcgcgccgctgcccccatgcatgagctcaccgtggacgaaccgcagccgccacccaccggtcgtctcccctccgcccagatctgggcctcctatcgcagcgcgcgggggagggggagggggaggggggaggcccggcttttgcgcgcgtcgatttcacagtcgccgcagtcgcggtccgctatcgccgtcatcttatccgccgtgtcagctgagagccgagaggtggggtgagatgaatctggagggaggtggtgaggagaagaggataagatggagtgactagtcagtggataaaatggagtccgcacttggtgttttaatatagcgaataacttcttgcggtcggcgctccttggcaaccaccagcgaaattttgattttatctagtggtcacttaagaggcccgctttaaaaagacctctatttttacaagcggttctcttatcccggccgctaacgaaaatgaattttttcgctggcagttcttagcacctcatccctcgttaaattttcgctggcggttttcgcttatagacgtcagagaaaaaaaatagataaacgccatgaaaaatcgattttctagcggtgactccctcccatcaaacaaaaagcaattctgacatagtcttaaaaatactgtttccgctaatacttcgtattgcattttttttagaaacctaataaaatcacaatttgtaaaagtactttctgagataaatctacacacgtgattttcatgtataccatctaaatatctttaagaagaaatttatgtgtaaggttgttttcgcgattgaagggtacggtgggtaattacagtcctccttccgatggaaatgccggggaacggcaacactctatattcttttatgtccttttgaatggatccatattcttggacaggtacattggatggcacatcaatattcacttggtcaaggataatacgaggtacacgatcaacatcatgatacgtactagtaccagctaaccactgcaccataattgaccgaggaaggcaccgatgagttgaagttttcaaattcctccatttcatattatatgatgatctggcttattttttcgaatcaaacatttctaatataaaacaaacatattataaatatacatttaatgctagatataataaagctattttcatgttgtttaattattctataaatttaattaaatttgaacatagttgacttataaatcaaagcgacttaatatgaaaacgaaggtagtcactccgtttcaggttacaagacgttttaactttagtcaaagtcaaactattttaagtttaactaagtttatagacaaatataataatatttataatactaaattagttccatcaaatcaataattgaatatatttccataataaatttgtcttgggttgaaaatgttactagctacttttttctacaaacctgatccaacttaaagtaaaaacgtcttttaactcgaaatgaagggagtagaacttaaaaacatgaaaaggtcggggggagaaacggccaccggcacgtgggaagaacggacgtcttccttcctcggccacacatatgcacgcacggacgccaccttgagatcacatttggagcaaagattctatacaaaagttgctacaaaagttttttacgaaaagtttctatacaaaagttgcttaaaaaatcatattaatctattatttttttaaaaaaatagctaatacttaattaatcacgcgttaatgcgaacattgtgttacgtgccgcctcctcctgaacagatcctaatccatcatcctcactccactctctctctctctttctcccgtcgacgcggaggcgccaacgccactgaccacccccatccatcaattcaatcaccaatcaatcgacggcgacgacgacaacgacgacgatggcgacgacggagacgaggacgacgacgacgtgctcgatcgcaagctagcggcggcgaatcatgagacgcccgcaatgaagtcgtcgtcgtcgtacgtcctcgtcggcgaatcatcggtcggcgaagcagctgcagctgcagcgatcgatcgatcgatcgatgtggccgtaacaacaagcggctgggagaaggacacatcgctagtccgaggctagtacttcctccgtattattttaatatatgacgccgttgacttttcgaccaacatttgaccattcgtttaattcaaattttttatgcaaatatgaaaatatttatatcatgcttaaagaacatttgatgatgaatcaaatcataataaaataaataataattacataatttttttattaagacgaatggtcaaacgttataaaaaagttaacgacgttgtacattaaaattaaaatatggaggtagtattaagctccgagctagctgctgaatgcagtgcgtgcagagagtctctgcactccgatccactgaactcatcacatgaaactgtttcacgtgtgtggctcggtttggaattattgaaccgattattaccgtatactatgcccctccatactataaaaaaaaccagcttagaattagatggggtttactccctctctattcatgctgagtaattttacagttgttgagaaggtaccatggggtactaaaaatttcgtgtaaaattcggtaccttatacgagataccaaattcataatagaaaaggtgatatctcatattagcttttaaaggacggtaaaattggtcattcatatgcatgccataaagcccggaaaaggaacggtgtcttttcttctcctctttggtcttgctgccatgcacaaatgcattgatcaaacgcatgaaaggagaaagtaacataggccttatttagttgggaaaaatttttaggtttggttatcacatcggatatacggacacacatttgaagaattaaacgtagtctaataacaaaacaaattgcaattctgccaagaaactgcgagacgaatttattaagtctaattttattaatccatcattagcaaatgtttactgtagcacaatattatcaaatcatggcgcaattaggcttaaaagattcgtctcacaatttacacgcaatctgtgtaattgttttttttccctacatttaatactccatacatgcgtccaaacattcgatgtgacagtgtgaaaatttttattttgagaactaaacagggccatagtataacaaatctgaataagaggttatctagatttattatactagctaggttatgtcttattcacatttagtttgattttctgtgaaacggactatgctttatcgtaatgataaattagatatttatagagagaaacttaatgaatgtcaacatttaatacatggtccaaaaaactgtctaaacattcatgtatttttaaagaggtgaagaaattacccaccgtataataccccgatgaagtaatggagcctggccacttgtgctgcagttgtacgaggttacattaactctatatgccaaacatgtgtttatggttccgtatttcgacgattcagaggtagatttgttgctttctccgtggcttttacgtcgttgcaggttgtgagttgtgaccactgaagctgagctcacgttcatgtctactatagtatctcagaaaaaaaaagattattttttttctcttcctatttattctaaaataaatttataaacacattggaaacagatagctagagtatagaataattctattacaatttgataaagtgagaatattatagttctttttttctattggtatgtatagaatagataaaaaatgaatttattttgtgatacagtgatgtgagagtattgctcaaacagaagacattaccaacttcgcctattttacttatgtctcactgtctcggcctcttttaagtttggacgtacctacgtctcgttttcatagacaacaactcgcaagctactgtataacagtggccgcctgattaaaatcctctgttttgtcatgttcttttgttaagataaaggattatattaacccggcctttacaccttgggggtgtacacagccaacaactgttttgtcatgttgatgtctggggataatctgctgagtttctgctgtcatagctgaaaaaagttcaggcataatgacaaatatgcacataatcgagtaaaatgagcacagtgccacagtgtaaaaactgcgtaaactcagactattcgcccaaactgtggcaaattgatagtattgtccgttcgttgctaatccgatgctaaaaaaatctcctaaatccgcggcattgtttagtggactttatgcctctacttcctctcaagtgttgaaatgatgcctctactacgtaaaatttgcgtatctttgtatcaggattcaggactggtgggtgtttggggttatatggccttgagcccttgacaagctcatggcatatgtgtgtgtgtgtgatcgagagatggagcaaatgtagcggtggaacttgtggtttgaaaattactatctccgtcctaaaatataaaaagttatcggtttggacatatgtattaaaaaaaatgtaggtgaaataaatggaaggagattatgattggttgagaaaaaaagtaagtggtgaatttgaatgatgtgtttggtttagaaagaaattattatatttttgaataagttctaaatgtaaaaaaatgttatattttgggacggaacgtgtactactcctaccacttattattattattattattattattattattattattattattattattattattattattattattattattattggcaaaaagatttacatttcttctttcttcttatggattgggatcaggtgcagtcacgactgcaactttggcagtagccactgatccaccatccaataggtaaggaacgtccaggattaattgtctctgctccctccttttagctatttgaacatgaaatgttttctcgttttctttatctcaactttctcaaatttaagagaaatcaaatgtagtttataaacaaaatgcacacatacttcactcaataatattttgcacaattgtacatagcactgacaaatgagctagtgagtttaacttttccctgtgtttgggaataatgcatccactgagtcaaaagaaaaaaactaaactactactccaaaatcttcccgtaaatcagtgtgaagcttctattgataacttttaaagaaaatgttccattcaggaaaaaaagaaactgtaaagaaaaaacaataggattaatgcttcttagttgaacagagcatgagtcacataaaaaaaaggttaaaggagttacatcaaaatatgagctctacttcaagcccttaaaataaatgccaagcttcttttaaacatctaaataagtagtactaaatttcttgtcaaatgaaaaataattgtgctagtatttcatgttcaaatgctaaatgaggaaggaggcaattaagtctgaacgttccttactagttggatggttggattagttgctactgccaaagttagtgactgcacctgatcccaatcctcttcttatgggttactcactgttcaccataggatgctggagtaccctgcctcatgattcggcgaaaacagccaaactgtccttgtaaacgttggattgacaggctttattggtgattctcccaggcccctacctcttgcatttctgtccattcaatcaatgtatggaaaacttttcagatggggtagtactgaagtggatacctcagccagtaaattccacagccgtgagccaattggctctgattggttgagataaaggtagaaaaatgaacaaaacaatcaaaataatttacggtttaaacctttatatctatatcatgtggtttaaaagtaaacggtagtagaaaatagactaggtaaaaaaaagctaaaactgactctaaaattaaaattaagttccactccctccgtttcacaatgtaagtcattctagcattttccacattcatattgatgttaataaatttagatagatatgcatgtctagattcattaacatcaatataaatgtaggaaatgttagaatgacttacattgtaaaacgaaggaagtaaaacttaaattttagccgtgaccaccaacaaggaattaataagagccttccaagtcaataattgagagacagagtgagtgagctattggtttcgaagagtagaagtaaaagtaagttggacattatatagggcgtaatctctcaatttcaatgtataagtatttagtaatggaggtcatatcataatacttggatgatttatatccagtactaggattttatatattggcatagagggaatagaaagagaaggtgccatccaatatatatatatatatatatatatatatatatatatatatatatatatatatatatatagtaaatttgtttggtgctccatggtgcccgggcaccattgttgaaattgagtatatacccaattcaaatgagaatgaaactttttcaattacttaggtattaacattaactactttactaactagtttaaagcaagtttgaactgaatttgaacttgtttttgttagattttgattctaggtatatagcatccatacatataatttgttaggtatgtaatcatggattgtgaaataaagttaaatttgagttgttttgttgataagtataggtataaatcaaattattataactaggtatatactcacaatttgaaaattttgaaaaatttgagtgattttgtgcattagataccatggtgcccgggcaccatggtgccccatatgagtgtcctatatatatatatatatatatatatatgtggaagagtccatcttctattatatatattcatatgtgtactgcacattcatgggaagttctctacttctcttccttttaaacactggaagtaaataaataaaaaataatttcctagaactgccaacaacaaagtcgttgtagtatagtggtgagtattcccgcctgtcacgcgggtgacccgggttcgatccccggcaacggcgaattagtttttaatttttttggcacttgaaatgcaagatgcatttgtgttttaaatgacgaaatagccgataatttccaaattggaaaaggtactcctccgcaactttacagtacaggaggtgattttgaacttcaagcttcaaaataatgtgttttctttgctgtttgttcagataagcaaaaacttcagaaatgcagtcgtaggtgaaggcagttctttcttctttttacaatggggccatgtatgtgtaagtgtaaatcctatgatttctttgataaaatgattactatcgtattattatcaattccaagcaggttgcttgtgcactggagagacaaaatttaggaacagataatttaaactgacataaaattggtgcatccagggatggtttaatttttttttaatgcaagtcttatcaaggcactacaaaaaggaagcataactgcacaacaccaacaaaacacatgatgcgatatgtaaacataaccaatatctttattctaatttgaaggtgattcgatcctgacattacaactgtttcatcacaccaaaaagaaaaaaaaaattgtaaataccatagaacagccaggacggttgtccagggaggtgacacatttgaagttacaacgctgaagcgatctcagttcaatcagcactaacaaaaccaaaagtatttcggtatttcagtataagcagttcacatgaacaaacgaagtttttatactaccgccctctcacttgctcttggcagtgccgtttgcggtggcaacagctccctttggtgggttcagctgatcccaggcctcaatccatgtgaccatggagtcggcgagcttgttgaagtagccatcgaccttcccgagcttcgccctcacttgcttggccagctcaaggtaacacttctggacagtgtcggcctccttcgggagggacgcagactggaagaaggggatcagctcctcctgccagaatatgccgttgtattccttcttgaggttcacaaaggggttgctcgctttgctgtgccagatgtagggaaggccagtcttaacacccaaacccaagtgatcggtaatcacctgtttttatgacagatattagcatggattgtgattggtgagtggtgaacaatagttagcttgcacaatgcacaaattatttctgaagggggagaaagaacaaaccttggtgcaccatcctgcccacatatcgtcgtaacgaccaataggctggccatcacccataagaccaaagtacatcgcaggaccgatgaggtcacggtcaaaagcaaggttcattccacacatcgggaataaagtgcccttcgggattgtcataacagcatccacatacctgatttcatcatcaataaacaaaaacatcagattggcaagaagagaacgataaaggatgagaaatgccaaaaatgtaacatcaatacctgctgttcctctcaagaggcttgacaagctgggtaggggcatcatagtctggaatgttgagccaaagcccatgagaaacggcagtcggggcaccctcacggaggctgaaggggtacccacggacaaaatcagcgccatcacggtacgggtcatacaaagtgttgaagaaaaatggagtggaagggttcagaaggttcttgatgtgctgctcaagtgcattgatatcctttcctgatgggtctttagcaacctgagattttgcaagaggaataggtcagcaatgaaccaaaaacaaatgatagggcggaatcagagaagtattagcattacccaaaagtaacaaaacagaggactaaaataatggcatcacactccaatgctcaacttttatagtgcaaggcatgtggaagtactcagtcaactgtaagctaatcaagaaaactattgtgaagatcatactagaatgcaactaaaggacatgaaagagaacatgactatattcttatgctgtaaacaactgaggaccattcatatagttaaggttgattctacagtacatccatgcatccataagccagcctaataaaacatataaatcaaataatttaacaagcaggtgggacccttgtggctcatgtgccccatgtgaatacacatggcatttgctttgggggaagaagctacaacacaaccgctgaatacatccaacagtattttttttccttgtagaagtaaaacaaaaataggaatacagtcgagataaccttcatgtacctttatgttaattcctacaaaatttgtgttccactggctcttaactgataactagtgaccgaggcttaatgatgtcatagtccatcacatgtgatttagatggattgtttggtcctgtctaacttcagattaacgtttttgtataaaggaatcaatcataattaaatacaaatctggaaaatgatgtgtagccaataacaaagccaagatgaccccaaaccaaagtggacataccattcagtccaaaagacaccattaacttgaccctttctctactgtttctacattgatatgttctgaagaaaagactactgataacggcctcgagcataaacaaagtaatataagcgtacatatgcattaacacaaccgacaaagcacagcggcaggacgatatatccgagccacattgtcgcgtactaacaatttctgaatactacaaacctgtggggcaccacagatatacatataacctattccagctcacatcccctccaaccgcaaccgcaacctatacatgaccaccaagcaagtgtagctagatccaatgcttgatgcttccaagcagtgggccaagtcaaacgttcaatccaagacaaagcaaacactgtcagatctgataatggcagactacatgcatgattccaaggattaaggagttactaccttttcaactaggcagatcaatcagtcatccgcaacatgtgaaattcacattcaacctacccacatcacagcactatgcagtagtaatagtagtagtatgatgtaatgcaaaaattaaagggtttttttatcactactaaactaaactgtcctaacaaaaagaactactaatctcgcaaaactgaagctaaactcaaaaatctaactacggggcaatgccgattgctgacgaagaaacagcccagagatctcgcctttcccccactaaaactacacatccagatccgatccccaccaaaccaagatctaaaatccccgcacacagatcacgccatggcagtggagaaagatcgcccaagatccagcggccatcaaccagcagatcaaaccttaacagagacagatctcactgaggcgaagttaatcgaggggtggaagggggaaagaagctcacgaagcagtcgtcgtcgatggtgtagatgtacttcttcttggagaccatgtagccgaagcagcggcaggcggagtccttgaaggagatgcaggaggccctggggccgaggatccggttgatgtcgtcgcggttgtagagctcgtagtcgaagccctcgggcacccggatcgtcttcttggggtcgcagtcctggacgatgatgaggtggtacgcctgaaagaaggacctccacatctccaggaagtccaggttgcggatcgtcgggatcacgatgtccagctcgtccttcagcagcggcgtcgccgcctgcgcggccgcggcgtcggaggaagccattgccggtggcggaggaggaggtagaggtggaggtggaggtggaggtcggggggagtgaggcgagacaggcgggtataaaagggagggagacgagggggtgggccggatgggccgtggtgggcctcttttttgttgggctttgcgtgtacaggaagggaagggagctgtgtgagtgtgagtgtgagtgtgggtggtccgttgttggagttggtgctttgcttgacttattatcactactactggggcatggactgatttgcatggccatggacatggtgcctaccaacaacatctgggatggttggctcaagaggggaagatatggtaacggctacgggtaaaaagggtcgaaatcggtagaatctcttcggaaacgatgctcgatcagccggtaattgaccatatctatcatttaaactactcagtatcgacattaatacgatgtagaaagaaattagaaaaaacaaaatttaaaaatagccaaaaacggtacagtcggaaactgtaccccttaaacggaaacggcgcccggtcgatcgggaatttccgtccgttttcatccctagtaacggcgatgttcttttcaacttatttatttatcggattaatggaatagattatttgtttcatgttttcaaaaagagtaaattaatacgtagtgtaggaacttggcaggtggatgtgatttagtgtaacaaattgaaaaatatgcagaccggtacatgaacttggcaattaagtgcattttggtcaataacattgttgcgtacgtatgattcaacatttcaacttattttgtttgttctcattataagcataattgctaggttattggtcataagtacgttttgcgttgttcatcaccgcagacaatcaaatatgtttgattagtccgatcactcgggaaactatgttacaacagtttttatgcagttagtttttacaatcattatatttttcggtttcaaatcaagaggttattttattattataaacaaacaaatacaatacatctaggctattattttgagagtcattatacttgttagattgcaatgacaactgcttgcttttacgtggcttaaaaagttagccacgatatatggtcgcatgatcaaatgttagccaagaaaaaaatgctgcaaatttgtgatatactcttccttcaatttttatatcatttcgtttaccctcttggacggacagccagtcgttctaagttctaagttctaacggcccttttgccactctagaatgcgtgctagagacaccaaaaccagtcagaaaaacgtctttgagtacgagctgcgcgcgattacttgaagattacacacgcaaatacgcctttccacatcgtacgccatggaccttagctacagctacacgcacatcaccatactattatttacttaattgtaaagatgaattgaatattttgaaaataaaattaaaatcaatggtctaaataatatacagtagaataaagttttttttaaaaaaaaaagaacataaagtgtgaagcactgaagcaaacaatttgtttcaattaaagctagtgaattttgatgcctgcaatataggagtagatggtgtgatcatctgtcacgctcgtacgaaagaaaggacgtacgtttcagcttatatggatggtctcctctctccatgtgagctgcaaggaaaacaaaaccggtaacatatcaatgcctaacagaaaatgatggctgctagaacgtacgcattagtactagtacatcaactaatcgccttttttgaaaataaagaaagaaaaagatcaatgctgacagagtacttacctgatcaaatcggtaattttagttagtttatatccagggtgagcaatgagcgtctttcattttcagtactacttcttccgtccataaaaaaaaatcaagggcttcatcttttctcgcttatgcttatacttatcagctaaaatttgaattttcaattttaaatttagaggtgattttgaggtttttttatcgaagtttatttttcagactttgcttttatatcgctaagaacacgtatataaaattttattcacaaattacttttcgtttgtaaatatgccatttctcttattccgcgaataagccaaatgatggctccgcaaatcttgactataaatctagataaatgtttgtccagatgcatagtcaggatttaaccctttttgacgaaagtagtggaatattccctctgtctcaaaaaaaagcacaacctagataaggatgcgacatctcctaatacaatgaatctggatatgttatagctgccatttcttcatcccaaggaatgaaaatgaaactttttagagatccaaggtatacagaggagacttttgagtgtttatacagatacaataatgagttgacgagacacacgacattgtgattctctcgagatgctcgtctctttgcctgcctcgcacgtcggccggtgatcgatcgccggtgatttgcctcttgcagtccgcactgtacttacaccggcaaagtattttcttttcacgaacac

SEQ ID NO: 5112 - DNA, 3282 bp, Oryza sativa
tgtaactcgcatgacataagaaaggtatgatctaatgcagaattgcagatgacagtttaaaaagaagaagaaaaatatgacacagccccagattgaatttaacatacatccttgaaataaaattaaagttagtacgcatatgcatttcagagagatgtcatggattagcctatctccttggagattaatattcacagctaaaaacaaacaaattgcttctgaattacagaaaccatcacgaggttcagctctttagcccttcctgtgatggccgctgtcaaaaggaaatgacagcgaatcatcataacacaatctatcaggagtttacagcctcctggatgctaaccacaaaccatgaaaacaatcatcagaactatggtacagctactagcaatctgaaaaccatgctgccttttttcttttccataatctgtacaacaataacaacaacaattattctgtacaccagccaatgctacaatgatcccaatctgtggtcgtcatcgatgccgtcctcctcctcggcgacgagcttgtcgatcaacagctccattgtcctgatgtacttgggcatgtaatgctcccttatcatggatctcgccaagcgaatcttgctgtaaagatgtcgaggtgtctcatacaaggcaacgacctcctcaccttgttcacttgtactgtttggctctgatgatgatggcaatccaaccatgtgcattattcttcctggagggtagagctgggggggatcttgactttggctcgacgatgacggctcgtgtgggttgtcggtcaaggtttctagaagctccacggcctgatcttcgtctgtttcattgagagctggctcattctcccctctgtcggtatcatcgtcattatctgattcttgaaggtcaagttcttccatggaaattgagactagttgtgccgtttcgatgtcagttttctcagctttgacattgacatcagtttgatttgtgatgtcatgagttccatgttttgcagagtcaatggaatgcttatgtgcagcaacacatgaccagcaagctattgcatggcgtttcttcaccacagcatctgaatttgacgaaggcttcacctgatcagcctgccaaataatcatgaatcaactatttaggtgacaagtatgattagcttgttcgaagaactggtgtttgcaacaatctagctgccatacctcagagctgttgggcaccagcatgtcaacatctacaaccttggatcttggatcagagacgaatggcacgtgcgatcggatgaagctcacagagcgattgacaaagcccaagaatctggtctgctgaatttgctcacgaaggtcatgtacccaggatgatgccatgacctgtcatcaatgaccgcgacggtaaatatgttgcaatgattatcttttactagcttccaagaactgtttgcagggaagaattttataaatgatatgctctaaagaactgcatctgcgatacagttcttggttcccgttttgatcgtcatacttaggaatctgctcatgaattcaggtagctgagaggtacctctgtacggagcttggcagcagaaactttgccaaaagatggaactaggtcatttctgttgacaatggttgtgatgaagtctttacccgactcagccaagtcccatgtcatgcaagcagctgaacagaaatagtaggacagggagcattactatctcacatcaagtatttctacatcataattttgtagaatcaaaagaagaacatggagttattctacttattctacagatgtatatgtacatcgcgatcgattggacatgtaatctttgtccaaaaaaaattgaatatgtaaaaatcataagatccttcaaacatttgttcattgctgaatagttaaagctagaatttttttataacaattaattaatagcttttaaattgtaggcgtgcaaatgccattccatgagactatattggtgtgtaaggtgctaatatggccttttagtgaaatatattttcttatgttaagaatgcaattccaaggtccgtgaacaatggtaaactagttgcttgtgctccatgatgcatacctggtccaaatgcaagacatgtggatgatgataacttctcattctcacgcagaatgtatgctaatattgcagcgatgccagcacccattgaatgcccaatgatctaaaatatataacaacagaaatgctgtgatttgagtaagcaaacaaaaatgatcagatgtagtgcacagtgttcatcatcttgtaccacgagaaaacttgattacaatgaatgcaactacattgagattgttaaaaaaaggctacataggtttgtgtagactgcacactttctctaaataaagtataatggtcgtttggataataaataaatacacgatgtatgccaataagcaaaatacgcaataacagttttactagtttgtgaaacaaaattcgtagttattagtctaaattgttgagcttctaagtgctgtttccactttgtccctttgtgctagactactaggcacaacttttagcttacttttggactaactatgctcgcttctgaattgtctttctcagcactagagaatcctaggaagtccataaaatatgcatagtaagagtacttgaaagtctttctcactttgacttcaaggtaaggaataatatcttgtttctaattggttaaaactccatgtttcccatccacttgctttcttgcacatgttttggaaaattttggcgtaacttggataggaaaacatctcccttgaaccatgtttcaagataagcctagaagattactgctaaactatgatttggttttggtggcatatccctgtctaaatgagagtaagaagagaaatgttctataaactgcatcataaaagaatggtccaacttgacaactagtgggtaggctctaattgcaattaacttaaaattgcatctgtaaaggtctgggaaataaattaccttcactccataatctgggaattgcgcaaccgcttcattgaggcaaggaatggcttgatttgcaatccagcgagctgccactaccattccacaatgagcatgtcccagcaccaatttggagacatgaccatcttgtgtcacaacatgatgaaatggaacctctgctccggttgccgccgtcaaccgatccttaacgctgatcgccccccgaataaaaaggaggaagcatttcgcacttctatcgcggacaactgtgaaagaaggcttcataagctgcacaacaataac

SEQ ID NO: 5113 - DNA, 7153 bp, Oryza sativa
ttacatattttcttaattcccatgtcaactttaaaaatatttatattttaaaacaaaagtactaattaggcacgttccatataatattatgccatgtttagatcccaactttttacttcaaacttccaacgttttcgtcacatcgaacttttctacacacacaaatgtcgtatttagttttaaagtttttcttcaaacttccaacttttccatcacatcaaaactttcctacatacataaacttctattttttccgtcacatcgttccaatttcaaccaaactttcaattttggcgtgaactaaacacagccaaactttcaacttttccattacatcattccaatttcttcaaacttccaattttggcgtggatctaaacacagcatcactcgtgtcgtccaaagtttgtcgaaccgaagaccgcaagttgatgttgatatgttctttctttgctactactccctccgtctcattttaagtgcaattgtagtttttcgtatccaacatttaatcgtctatcttgtttaaaaaaatctatgaattttttaaagaagtcacacataaaatactatttatgttttttatctaataacaataaaattattaatcatacaaatgtttcgaataagacagacgatcaaacgttagatatagaaacctgtaactacactaaaaagggacggagggagtagtatctttcctcatgctctggttggtgtaaaaaaaatgtatccgatccgttacaaaatataaccatttctttgcaacatactcccttcatctaaaaataaacaaatttaatatataattactttatcttaaaataaacaaaactagtacgggatcacatcgagctagtaagtagtagtaatatgtgtcaacgtttgatgtcgtgattccggtatttgcatagtatggggatcgttggtactaggatatgtgcgagactgaggtaaaagagatggggacgaggatttttatacaggttcgggcccctgaattgtcaggtaataaccctacatcctgttggccgaagccagtattgatcttattcaccataatcacaccagtacaatatttggggtagcctatctaactgttgtcgacatggcggtctgaaggtctgactcgtagtcgacgacagagtactcttcctcctcgaatctgtgcccgatgagatcagagacaacgctatgtctctcctgacagtatccggagacaccgtaggggactagccgtgcctatctttgaagttgatatctggcgtcttgccttggcgtatgttggcttgtatgttgatcttgtgtcttgatctattgttccgtgttgtccgtatcccctctcctcctagggggtcttgtatttatacctataggtgtccccttgtccaagtagaactaggaaaaccaatatggatacaatccgagtagtccttgtcgttttcatgtagaattctggttgtctttcttatccggaactcctcctatatctgtaggttgtttccgtataggacatagtatgtggtaggtcctgccgagatttagtcaactactattagatatgtggtatccataacctgacaatataattggttgaaggttcacttagatggtgctgtcgagttgatgatcacagcagccaaacactaagctctttcgccttataagatcgttaacaatagttttagaatgtgttattgtttatataacatttttcacgtgagaaacacctagaaatcttttggctagcttcacaagatagtgggctagacaatctggattcgaagcctcaccccttctaattatttgatattaggtcattttctaatatttgcgtttttttaacattttcacgtcatatctcaagttctcaacaacgaataaacaactcacataaacagatggtttatttagttatctcaaatatattcgtgtggtcaatgatttgattccacagatagttttatatatgacattaagttatccattaatcaacggactgcagtattctttcttttttctgctttctctgtatcttcaaaattcctatatgggcattctctctcaaatactggtgttacatcattgtttattctctaacctgtttgaattccttggattaagttactggctttctctgtatccttaaataaaaaacgaatcatatttgtccggttaactaaagtttttactcttgtcttgatcgttgagctatcaaaatgttaattattcgcccctctgattttaaaaatttgcacatttcacatctcttggttcaacttcaaacagaaatggttttaacaaaaaaagtgatgtcgtcactataccatcaataataaaacatgaacaagataaagaaaatattacagcaatttatataagacacatgttctttggtccaagttgcataaataagggatattttgttacttggtatgttttttttatagataatggaatttgttacttggtacgtaaccacaacaattatggcaaacaggtgcttaacaaaaccgcatcactaacaaatttagttatagttttgcacattgaacagtatcaactcgcaagaggaccgaaactggccgattccttttttttatattaaactggcaaattcctgactttttagtttttaggttttttttccttgaaggagatttaattcttgagaattttagctaaggccagcatatcaaagtacacagtttcaatgggctcacggtgggcctattttattcttcgcgcgggcctacgtggcagcgcgtacggcccaatatgcaaaatgcacattcctccattgaccggcccaacacggacgcagcacttaattaattctcgatcggcctctcacgttctgccctgatcgagtatgtgtacagatataaatctattaatttttagatgaaatatgtatgaatgaattagtgcgtattaactatcagtagaaaattatattaaccagttttgactgttcgtaattaagcaccgcaaaaactactggcctgtctctcaaattgtgattccacttcaaagacttactagttgagcggttgaattaagatcccttctggtatttttcttaagagatggtttaatttgggtatcaattctggacttgcctagtatcgaatgtgaggaaatgacccatttgagtgttgtatcaattgtcaagtgcattatttcgctttcgcttatgccatatattagggtccacctggggtctctagggtctcgagtctccactccccatattgtaatcatgggagaccccatgaagatcccactaaaattttctgtcatacgtttattagaagagggggctataattttgtatagtttgtttagaccctcctgttaatctttcctggatccgcctctgggtatgttgggtatgaaggaacttcaaatgaaaatcaaaggatctgaaacccacttattttttttttacatataggactgcttgaaatggaggaatggacccaagaatcctttggaaaactttcctaggcttctctagtctattatttttctagtaaaaatgaatggaaaagaaaaaggagctcaaatctaagggaaaattttcccatggaaaagaaaaggtaatagatgaggttagcttgacctaaaaagaaatctagctaatatctaataccttgttagtttaagcaaagtctaaaattcttgtattgcaaacatccactatatataaagttttgtgtttttcctaattcttcagttttattacatgtgcatttttatgttttcttttcctacatttttatttctctgttttgttttcctcaatctaaacaaggccttatgtttgcttcgtcctctgaataccacccattttctagagtctatgaacctgggcacctgttaaataaataaaaagtaatatgatatgtattaataaaaacgaaatgcatttatgccagtcaccttaaaatcaagaaaaattcagttgatttaaccaccatttgatcctcgtcaagattatggttcagagtaggcagtgcgagaatgggggcaatactgcaagaattaatggccaagctcatgtggtattttttttaaggggtttgcaggttttaaatgattcatggttgcggttgtgtggtagcttgatttgtgggtgacacaagcggcccaggagacactgagacaacggtgatgtagcgcctagcttggccgtaggctcggttggtgttggagcaaggatggcaagcggtcaagaggtcatagtggatctagcaatgtaaacctccggtcagagatgaccagaggaatctaggtaaggttctgtttgggagatttttttttttttggctgcggtagcttctcttagaaactcgagctctcacaattctcacctagattcttataatcggtagtgaattatataattcagaaaataaactagcagttaaaagttaaaaaatccagcctctccaaattctcaaaagctgactaccagcaaactatttcttagaattttaatctatccaaacagatcctaaaatagcaccatagcactatgacaaagaggaggacataggaggatatagtggtggagacatagagaaagggaggcagggagaaagggcagatagaggaaggcaggaaacattgcgaggcatgcactagcgtgggatgttgagggagggaattgtcgaagagaaatacgcttgattagattatcaacgtgaatcttggtataatctagaccataaaaacatctttacacttataattttagcctgcagataattagccatcgatctccagtgtctagtgaaggatgcatgcatgtgagtccatacattcatttaatgtattatgctagaacgatatctatgtactgcctccgtctcattataagtgcaacataagattccgtgcccaaccttaattgttcgtcttatttgaaaattttttataattagtatttttatttttatgagatgacaaaacattagtagtactttatgcgtgacttatgtttttaaatttttttaaaaaaattttaaataagacggacgatcaaaattaaacacggtaaatcatggttgcacttaaaatgggacagagggagtaataactagatctgtatgggattgatcaacaggttatgggcattacaacatgccatcatatagtccattttactgggctgctggcagtagacaaaaaatgagtcaaagcgctggatcgatcctatagctatcacctcctataaatcaaaattcaactaattaatgagtatatctcttgcatcttcgaaaggtaattataagcatatttgcacgccctcctcatctatttgggttcactgattggtttagttattcaattgtcaggacagagctacaattattttggatacgcacctttcagagaaatgcttatggtcttccagctaacttcacaaggtgatgggctagacgacctgggttcgaagcctcaccacttctaattatttaatattaggttcttccctaatatttatgttttttaatacgcattttttacatacaagcagctagcttgtggtcgatcaatattttacgcacgaaattaaaccatggttatcttttccaccgcatattcagtagtggagattccaacagattataactataagtttatgcaactatcttttatctaaaataattaaaacttgacttctacatctaacatagattttttttaaagcgccgactactgtaaaatatatagtagtagaatagatgttgattcccacacaaaattaaagtaacttctaaaacatactatatattggggatcttacaagcacaacaatagaaaaaaaatatagacacatatatgttcgagcagctgatcacaaccctgtagaattattctggctaatcgagagctatatatatggaccaggttagctcataggtttaacttaattaaacagtttatttacatctaccaatgcatcgtttggtgtgtgataaacaagagacaaccttaatcttctaggggttgtttgtttcactacttcactttaccaagccacgccttactcatgtcacagttgtaagttatgtgtttattttgcagctacaattaggtttgccacgcttttttattctttggatccacgagtcattcatttatctttttaaattaccccacacttgtaaccgtagccacacttttatatcatgtcacactttacctacggttagctgtgacaaaattaattcactaaccaaacagccaatgttttaaaaaaaaaacaaacagacaatctgcgtcaggatgcatgcatgcgatcgatggcttacctttgctcatgatcagacgacgtacgacaagatcgatgcaaaataatgagaaaattatgtggagctagtactgtatatccgttgatgcgatagacgtgatagctgacgcgattgcacgagttagggccactctcctctccctcgtggggttcagctgcaatagtgtgcggataaatgcatgcaccgttgctcgatgcaaaaggatctagtgatctcatattatcccaatccaataggggtgtaaagtttcagtgtgtcacatcagatattatatatggtatcgtatggggtgttcggacactaataaaaaaataattacataatccatcagtaaaccgcgagacgaatttattaagcataattaatcggtaattagtaaatattactgtagcaccacattgtcaaatcatggagcaattaattaagcttaaaagatttgtctcgcaaattagtcgcaatttgtgtaattagttatttttttagcctatatttaatactttatgtaagtgttcacacgttcaatgtgacatggtgaaaaattttagggtgggatctaaacaaggccatatagatgatataactggccgctgtgtatttctgcgaagtattaaagtataaatgtcacaactttatataactatgtaggagtaatatttagtcgtaaatttgattgattgaaattaataaggtacataatccaattagtgataaaatgattccggcagtctaggaatattaggtgatcataattaatctgaagtatcaaagcatgcaccatcccaattagctaggttgaagaattcgtgatgatgatgtagccactagtgtgt

SEQ ID NO: 5114 - DNA, 44858 bp, Oryza sativa
ggccgactgcccaagaagaggaaaaaggaggaaaaaggaaaaacaaaaagaagaaaggattttcctgggattaaaaattgcactttggtgatttttaattggtaaaaattatttccaaggctctgaaaattccactaaaaatcctgttagcattatttgacatgtagaatccaagaaaaattccacatgccgattccgattattatttgcatttattaattagggaattagctctaggttaattaagataatttcttcggacgatttatttagccaatttttaaagcaagcaaaggggggaaaacttcagggcgtgacagttcaatcaagaggaatcaacaacagaacaactaatcaaacgtattatgaagggggttaagatgctgatacatagcaagaatattacttcaaccccgatttgtaacggtatttttatttgattaatcaccggaggggagagattcctcacctgaatctttcattgccaaagaaagatagttctgagttacagagattgggctataccagcggcaagccattacagattaaacagaaaaaggggaggagatataaagaatacaaaagagaggccaccaccttcccaaagagacaacaattgatgttaggcacctgcaaaaaacccaaccaaaaaccagagcaacctaaagctatcacctaagctcatcaacaaacattttcttatgcagacttggaaacgccagtactcctcactgaagggcctttctgccacaaggtcagcttggtttaacagcgaccaaaagactgtggaagtcaaaaaccacccgcatcagccatcaagaattcaacttaaacttgttgctgcttggatcagtgcttgctgacgcaatttgtgggaaggaagccccagaagagggagggccactgaaggttgcggccataggccgcccgtatcgagtcttcttcaatccgactataacaattgcttgcaagttccatgacctccaaggtcctttcagggaaggaagcctcaaaggaggaagggccgctgaacaatgtggttgaggacatgccaaggtaaagagaggagacgaacagggagctagacaagagagaagtggcagatggggggaccctacggatggaattccaacaactgcgacagcagggaagtgcttaagatcagatgctaagccagccaaaagagagccatcagttctaacaacaaagacctaagccatcaagcaaggagcatgcctaaaagagatccagagagaggtgaggcacgagcaacacctagatgatggatgaaagcctagctggtcagggcaaggagcagcgcaaggatcggtgactagagagacatcacagttgtcggtgacatgggaccgggagtatcatgactagaggcttgaggcagacacaatcgcccacgtggcctggcaccctcggggggtgtcacgcccagaaatttagcccaaatttccagactattttgtgtattaaatccctgtccaggaccagccagggtacacaaaacgacaagtaataaacagttccaaacgtaaataaagcgtaaaatacttacagaagaggcacttagtcctcacaccgaaacaaaagcagcagcagcggaaaaaggcgatcctagcggggcttcagctccactccacaggcaaaactcaactggggtctgagccttggtcctctaacttcgtcttcagctcagaagcactacgcttctgaaaaagggggaataatagcaagattgagtacaaccaccgtactcagcaagccacaccaacgatgcagacgtgcaaggggatccaaggatggtttgtggctatttgcataaaggcggttgtaaaacattttattgagcaaaacagtaaaactgttgagtaattaaagtaaattagatctccactgatcaacgctacaccacgttgaacaggcccaaccaacccacctgtactacagtgcattgggtcgatttattaggggtgagactaatcacggtgaatctggtcgatcgcccataaccgcgggcacggctattcgaatagttttactctggccagaggtgcacaactgtacccacaagacacaacccaccgacatgtcaccgcgtcatcatgtgcccatgatgcacacgtcaccatgtcgagtgattgtgacgagacccttcgcataaccctcccctaaccatccacaccacgctaaggtttcacccccacccctcaaaaggcagtgggcggtcccctcttgcgccgcggtgaatccggcagctggacaaccggacaccccggccgacccaactccatcacgcccaccctcgccaccggtgcctaggaaagggtcgagctatacttcagatcaagcagttacccattcccgcttgtggcaagcgctgtaagtcttccagggtttcccgtgaaccggtccttaattgccatgggtgcgactcacaaaaccatgcacccacagcccaccattcagtcgcattttagttggataattacgaccataaaacatggccaggtgtttcgagcacgcagctcaacaagatactagaaaggtctaaaactgtaattatcccatcaactgagctagtggtaattaagcatggctaagcatatagttctagctaggtcacataagtaacacaagctagtcgatttatcacccaaggttgacaaaggacagatatcaagtaaacatggcacaagcgagcagataggtaaaccctattcccatgtaattagcaagacatgcatgtttatttgcaaacggtaaaacatttataaattgggatcaacatgctcaaggggaatgtgtgacttgccttgcttcttcacttggatcttctaaactcttttcctcgcgaccgcggacttccgaaacgacggaaactacacgctggcacgcaaaacgaggaaaaactctaataaaaaccaaggaaacagtacataaaaactaaacaaacatgtagagctcaattttagatgaattttgcaagttgaatggctcaattcggagttcgaatgaattagatatgaattttagaagttttgagccatttaaatgaatttctataattaaactcgatttattgcgcaattattaattatttttacaaaggaaaaaggatctcgctgacgtcagcaaggggcagccggcgccgacacgcgggccccacacgtcagcgggtcaaggagctcggtgcaccgtggaccgggaccacaaggacggtccaccgccggtccacgggatggacggcccagatcgggccaagccgatcgggcagctgaggggagtggtggcagggcacgggcacagccagggctggcccgaccgaccacagagggcggcggcgcgcagacggccggacaaccggcggcggcggcggcgcaacgcggcgctggcacgggaggcggccggcaaagaggaaaaggaggagggaggcggctcaccgagaggcgcggcgacggagggagcggccgcggagggaggcggcggcgctccttgggtcgacgacgcggagggacgcacggcggtggatggcgagggcgaggaggcagacgaggtgcaacacacgacgacgaagccgacaaaggtgacggcaagcggcgaccgcggctatggcggtgatgattgccggccggaaacggtgaatggatgtggtggctcgggtgtgtggtgggaaggtggtttcggtggtggcgagggagagaaaaacggtggccgagcttgggcttgtggcgacgaagccggcggtggcgacggagcagtgctgcggcggttctagcgacgggaggcggcagccggcgctcacaaaggcaatggcggctcgggttggcagtggaggtggcagcccggtggtggattgggggagtgtagcggtggacgacgtgcggcgtggagtggtgatgccgacggcatgggttgcgcggcgcggcggtggcgctagcagcgacgaggtgcggctggaggcgacgaatgggtcggcggcctcgggtgcacggtgaagaagtggttccgggggtggaggagggaagggaaacggatgccggggtgaagcgtgggacggcgatgccgatggtggcgacggcgctgcgcggagatggcgagagcggcggctagaggcgaccggagctcgccagagagcggcggcgcgcgggagcggcgtggggagagcgggagaaggcgagggaagcgccggcgaggaggggaaacgagagaagggagcccggggatggattttataagctcggggagggaaaatcgttgccgggcgtggcggatttggggcggcaatgacccgcgacgtgggtgacatcgtgggcgaagtggagctcgatcccggcacaatttttgggggaaacatggggagagtgtagaggaggtggatgggaaccgatttcatgcggtttgggcgcgagggcgcgagcggaagaggccggaatcgtgggcgacgtgggcggcaatggcggcacagcggtttggatgagggaggctggaggtagaggaagggtctgacaagcgggtcccacggccccacttgtcggcctgaggggagggaggaggcgcgcagggacgcaaagcagacttggggaggggaggcgcgctgggccggcggcccgaggagagaaggaaggagggggaggaatttgggccgagcccgaaagggaggaaggggaagaaaggagaattaaatttgttttctttttatttaattggttaaatgatctttgtgactttaaaactatttctcgagctccgaaaattcacggaaaattccggagagtattttagggcacaaagaatattgcaaaatattcccggccaatgatttttaagggaaaattttaattctcccattatttcacttggataaattgatttaacttttatttaatttctagaaaatgcattatttaatgatttttaatcccgaacgaaaatcggggcgttacaaatctaccccccttacaggaatctcgtcccgagattctgggatggctagaaagaaagctggtgctggtcggcggtctgactgatctgcacattgaactgccacatcctgcttcgaactgattgattgactggttgatcaaacctgcacgattgaactggctggattcgacctttctgttcctttgctttgccaaaactggaccgactggttctgcttgaactgacccagactaggactgcggatgctcctgaaacttacttatcttggactgaactgttgaggttggcaattttggtaacctgagaattcaccacgctggctataagaggatgaaaattgaatctggcatttgtaaatcatttaccctatgtccgcttcgactggtcccaattcaaatgacaagtaattccaggaaaacctgcttgacctgcctttcgtctgtactacaactgtcctcgctgttgcttttctaagctaaactgttgacatgcttcacaggtgtaccttagaatcgaacctgtcgacctgagattggggtgactctgctgacaccttgcaactggcttcttcaagtactacccggattgttgcactgggttgaaccttcaactaaaacagcgacgaagtgagccaaaactcatctccgagacctaccccccttacatggagtagtcttactttctcctgactaggaacaattggactattgtccttgaaaaataaccaacacttctcttgcttacaaaggccctcactttgaaaactgaaacttcaccgattcatcaaaatagagtaatgacggcgcactttcatcccagcaagatttggaacttaatcctcagttgctgatgggagattccacataaaagtgactctcatttagctcatgaacacactgactcttgactaactttcccataagttctaactactggcatgactgtcctgcttctatcttgacttcggtgtcgagttgcaaaaactgaactaaccgactctgcattggaactgacacaactcgaggagttggggtgtcgctaacaaagctcttgatgtgatgacgctgacgccttactgtggaacaaccctctgagaggtgccctgtcgtacatcttccatggatagttggacactttgcaaaaactgctcttgaaaaccataaccactataggtagcatatgttactcctgggattggtggtggcttagctgtgctgctttgctgaggacttggtggcgtactatctgaggttgtgggtgcttcctctttgaaaacaaattggctttggctctgatcctaattccagcttgcatctaggcttgtacatgttgttggagacactggtgttgcatctgctgcattggactctacggttgctgtatcaacatctgacacatccatcatctgacattggctaaccaaaatctgcccagagagaggtgctctgatttagcttgtagctggctgccttgaactgatccaatggctctgaccgcaacacactactgctggagttatttccgctacatttgaccaggtgtcgaacctgcatctcccacatcgatacacccatcttctgatcttggacaccaaaagttgatcatgagcagggttcatctggcgttggggcaccttgcagctttcaactaaaccattgatctgtggctttaattgatcttatctctgacactgaccatctgctgctaggacggaagagaggtggaagagaggggtcgctaaagataaggtactaaaccacttgcctactgatctgttgtgactacacttttattgttcaagttgcttaagcaaacaacctagtatggtcgcatccccaccaatgatgcaaaccatacccctacacacaagcaaacaacacacgatctagaaagctaacggaactactcttctgggaaagattgggtttaggtcaacttcgggaaaactccacttgatcttcgcagaacgacgactctgaactgatcttctcgctccttgcacgaagcttgaggctcgaattgacttgacttccgaacagacatgaagctgacagctggtcctctaggtttgacaactaaaagaattggagagattgggaggagaattttgaaaaaccgtttgacaaagaaatgccgaagggcgagaggagacatttttcaaatagggttttcagaaagcttgtccttagggtttgaccgtttggctcaacctacagtcaagttggctctgataccactttgtcacgcccagaaatttagcccaaatttccagactattttgtgtattaaatccctgtccaggaccagccagggtacacaaaacgacaagtaataaacagttccaaacgtaaataaagcgtaaaatacttacagaagaggcacttagtcctcacaccgaaacaaaagcagcagcagcggaaaaaggcgatcctagcggggcttcagctccactccacaggcaaaactcaactggggtctgagccttggtcctctaacttcgtcttcagctcagaagcactacgcttctgaaaaagggggaataatagcaagattgagtacaaccaccgtactcagcaagccacaccaacgatgcagacgtgcaaggggatccaaggatggtttgtggctatttgcataaaggcggttgtaaaacattttattgagcaaaacagtaaaactgttgagtaattaaagtaaattagatctccactgatcaacgctacaccacgttgaacaggcccaaccaacccacctgtactacagtgcattgggtcgatttattaggggtgagactaatcacggtgaatctggtcgatcgcccataaccgcgggcacggctattcgaatagttttactctggccagaggtgcacaactgtacccacaagacacaacccaccgacatgtcaccgcgtcatcatgtgcccatgatgcacacgtcaccatgtcgagtgattgtgacgagacccttcgcataaccctcccctaaccatccacaccacgctaaggtttcacccccacccctcaaaaggcagtgggcggtcccctcttgcgccgcggtgaatccggcagctggacaaccggacaccccggccgacccaactccatcacgcccaccctcgccaccggtgcctaggaaagggtcgagctatacttcagatcaagcagttacccattctcgcttgtggcaagcgctgtaagtcttccagggtttcccgtgaaccggtccttaattgccatgggtgcgactcacaaaaccatgcacccacagcccaccattcagtcgcattttagttggataattacgaccataaaacatggccaggtgtttcgagcacgcagctcaacaagatactagaaaggtctaaaactgtaattatcccatcaactgagctagtggtaattaagcatggctaagcatatagttctagctaggtcacataagtaacacaagctagtcgatttatcacccaaggttgacaaaggacagatatcaagtaaacatggcacaagcgagcagataggtaaaccctattcccatgtaattagcaagacatgcatgtttatttgcaaacggtaaaacatttataaattgggatcaacatgctcaaggggaatgtgtgacttgccttgcttcttcacttggatcttctaaactcttttcctcgcgaccgcggacttccgaaacgacggaaactacacgctggcacgcaaaacgaggaaaaactctaataaaaaccaaggaaacagtacataaaaactaaacaaacatgtagagctcaattttagatgaattttgcaagttgaatggctcaattcggagttcgaatgaattagatatgaattttagaagttttgagccatttaaatgaatttctataattaaactcgatttattgcgcaattattaattatttttacaaaggaaaaaggatctcgctgacgtcagcaaggggcagccggcgccgacacgcgggccccacacgtcagcgggtcaaggagctcggtgcaccgtggaccgggaccacaaggacggtccaccgccggtccacgggatggacggcccagatcgggccaagccgatcgggcagctgaggggagtggtggcagggcacgggcacagccagggctggcccgaccgaccacagagggcggcggcgcgcagacggccggacaaccggcggcggcggcggcgcaacgcggcgctggcacgggaggcggccggcaaagaggaaaaggaggagggaggcggctcaccgagaggcgcggcgacggagggagcggccgcggagggaggcggcggcgctccttgggtcgacgacgcggagggacgcacggcggtggatggcgagggcgaggaggcagacgaggtgcaacacacgacgacgaagccgacaaaggtgacggcaagcggcgaccgcggctatggcggtgatgattgccggccggaaacggtgaatggatgtggtggctcgggtgtgtggtgggaaggtggtttcggtggtggcgagggagagaaaaacggtggccgagcttgggcttgtggcgacgaagccggcggtggcgacggagcagtgctgcggcggttctagcgacgggaggcggcagccggcgctcacaaaggcaatggcggctcgggttggcagtggaggtggcagcccggtggtggattgggggagtgtagcggtggacgacgtgcggcgtggagtggtgatgccgacggcatgggttgcgcggcgcggcggtggcgctagcagcgacgaggtgcggctggaggcgacgaatgggtcggcggcctcgggtgcacggtgaagaagtggttccgggggtggaggagggaagggaaacggatgccggggtgaagcgtgggacggcgatgccgatggtggcgacggcgctgcgcggagatggcgagagcggcggctagaggcgaccggagctcgccagagagcggcggcgcgcgggagcggcgtggggagagcgggagaaggcgagggaagcgccggcgaggaggggaaacgagagaagggagcccggggatggattttataagctcggggagggaaaatcgttgccgggcgtggcggatttggggcggcaatgacccgcgacgtgggtgacatcgtgggcgaagtggagctcgatcccggcacaatttttgggggaaacatggggagagtgtagaggaggtggatgggaaccgatttcatgcggtttgggcgcgagggcgcgagcggaagaggccggaatcgtgggcgacgtgggcggcaatggcggcacagcggtttggatgagggaggctggaggtagaggaagggtctgacaagcgggtcccacggccccacttgtcggcctgaggggagggaggaggcgcgcagggacgcaaagcagacttggggaggggaggcgcgctgggccggcggcccgaggagagaaggaaggagggggaggaatttgggccgagcccgaaagggaggaaggggaagaaaggagaattaaatttgttttctttttatttaattggttaaatgatctttgtgactttaaaactatttctcgagctccgaaaattcacggaaaattccggagagtattttagggcacaaagaatattgcaaaatattcccggccaatgatttttaagggaaaattttaattctcccattatttcacttggataaattgatttaacttttatttaatttctagaaaatgcattatttaatgatttttaatcccgaacgaaaatcggggcgttacagggggcgtcgggcccgagggtgatgtgttcgccctcctctttgtctccccgagggggttgggccgcttccgcctcggccccgagggctggggcgccccgaccccttgtggattttgcgccgcgtgtatgggttaggtacggcgctcacctaaccgcatttattgcggtttggacgagcgcgttacgccgcatgtaacgcagtgcagcgcgctcgtttatccggtctgtgaccagtcacagaccggtcagatcatgggttaggtggcgacaggcggtctgacgcacgcctcgccccatcccgtcaggacgagagcctccaagcactcgtccctagccggagccggcgtgttagctcctggagatggcacgttggttccggtcagatatatgccaggcttcatcctaaccattacaggcaagatattgtatgaagaagggcgaacatgcagattgttaaactgacacgtggtggacaagaatgaccggtctgaccggtctgacaatggtcatgtcatcagcagacagccatgtttccacgtcgcgcctgcttccggcggaagtggaggtaggtatgggccgtcccgtcagaaggtcattcggacgacggcgatgcaaatctccgtccgttaatgaagagaagtcaaattggagggaagagaggatgagtccccacacaaaagaaagagagggagagatggtgcatgtgggatccccttgagatataaaaggaggaccttgcccactgagagaaaaaagaagaaaaaggatccgagcttaatcgggggctggctggcattttgtagcttcttcatacacagatccaccaaaacacaggagtagggtattacgcttctcagcggcccgaacctgtatacatcgcccgtgtcttgtgtgtttccacgatcgcgaacttttcacatacagactaggagcttagaatctcacccagggcccccggccgaactggcaaaggggggcctgcgcggtctcccggtgaggagcctcacgctccgtcaacagttatagagcacctcaaagaggaggaaggacaaaggagggaagatgttgctgggcaaggtcgcaggcaccgaagaccgcattcgtcgaggccacagcccgccgccggcaccacagagctgaccacgagccgctgatcggtgcaccgccagccgggaccagctacggtgcacaagctgtcgaggccaaagcctccaccgccggccgtaggggggtgggtgggtgggggagactaggcccgccgccggacgccatcgtaacctccgccaccgtggcctccgccgctagccttcgccaccgctacctctgctgccagtcaccaccgcgtcttccgtgcgcgccgacctcctgcgccggctgccgccagccgccgagtcgccatacgccgccacctccgcctcacattgtcaccgcacgggagcggctcgctctagccagatccggcgtggaggcgtcggatccacccacgaggaagccagatccggccgcggctgcgtcggatgcgctgcctccaccccacgtcatcggactctccttcgcgcgccggcccgccttccacgcacagagacggggcgccatcgagtcttggcctcgccgccgccatcccggctggccgcacggaactctggtagcacactctggtggcggcgaggggagagagaggaggagaaagtggcggtgggggcgctaggttttcccccgagtcgcccgctccccgagtcgcccgcgcgcgggcgacgtgggggccaacagtttcttcatttgtaacagtattgatagaccagagtctgtcgcgcgggcgacgcgggggccagcagtttcttcatttgtaacggtattgatagactagagtctgtaaccgtgcatgtatagtcagcttccttgcgcaagtggatcaggaaggatgacgactccgtttttacatcactaaagaaattcgcagggaatttttctaaaaaaaatggtgaggaagatacgagaacagaataatctgagaacccaagcaatggccttgcggcttgtttggttattaccctgataagaatttgcctgacctaaaactagcctgacttatcttagtccttgtttggttgccacactgagagctcttctcctcggccttggcctgacggacccgggcaagtgattagcctgagctctacgcacacgcgcgcaacataaattaatgataacccattggagcgagtgttaggaaacgatcggcagataaacgataaaaaacaatagaacgattggcagataaatgataaagaacgatagatcaatcacgaagacacgagatttaacgtggaaaactctcctaaaacaggagagaaaaaaaccacggttgccagtcagcaaagatctttactatattatgtgagattacaatactgaacagcggcttacaggaagtatatatataggtgaaaccctaaaaggataacgttctgtatcgcttcgctccggcccaagcctctagcgacgggcctccgcttcgctccatccgaagttggtgtttatatgtgtgtaaatgaatttgtatcacaactcaccagcgaggacccctgtgcgcagcatgaggcccatagcaccactacaccttcgccgccattgtcgtcatggcgagaaaagcccagacctccgctgtcgtacgtcgccgcgtgaagcccagacgtcccatctgccgctgtcgtcgtttcctgaagctccactgcagtgtcgtcgtcgcgctagatttggccatcgctatcgcaccgaagccaccgactgctgcttgctagattcggcgttgtgcgcgcgaagacgccgcggacgcttagctaggatgttgattcgctgagttccggtcacgcggcctgcctttccgcacgaagcacgcaacaggtcagcaggtattgtcttcgatggaatcagataactttgtacagtctgcagttgtgccactgatatgtgggccccactttagtatggcccacatgtcagtggcataactgcaaactgcacaatattagaggagtctcatccatcttcgatgctgggtgttcccaacccttctccctcatattctgcgtgcacacttttaaactgctaaacggtgtgttttttttgcaaaaagtttatatacgaaagttgcttaaaaaaatcatattgatccattttcgaaaaaaaatacttcctccgtttcacaatataagtcattctagcatttcccacattcatattggtgttaatgaatctgaatagatatatatgtctagattcattaacatcaatataaatatggaaaatgctagaatgacttacattatgaaacggagggagtacctaatacttaattaatcacacgctaatagaccgctctgtttttcgtgcgcaggagatttgttctcaactgcccacaacgaacacagcctttgacatgaagttggagtttaatttgatgcattctcctaattgtttcccctctttagatatgtgatagatttgtcatttgcacatggaaagctaggtagcagatagatttttggtgggccatgcattcttgccaatcccacattgataattgatggtggggaagcacaacttaaaagatagtctcatccattagacaagtcttttgggttgtatagtcttaagacctaaaattgtggcctcagtcgagcctgtggcggagcgagcccaatgtgattcgggtgacccacagtaagtgagccaggttgcgcactctaacaaatattttgcatcttattccgattatcacttgacttagggcctatttagatcctccaaaatggcaaaagttttatcattttggagcactttttaccattttagatctaaacactagtagcaaaagttggcaatttggcatttgtcatttgctagtctagggtagcaaattttgccaaaaatgctctgggaccatgcgcgtgctctctctctctctctctggtactaaaatggtaaaactttaggatgcatctaaacaccaactacatgccaaatcttttcccaccaaaacttttaccatttaccatttgctattccaaatgaatcaaaacggacccttagcaaaaattatgtaccgcctaatcatacttctcaggcggcagctgcaaatcgaacaatcaaatatcccgcctgcctgaccaggcaaaaaagtagggggctgtttggttgctgccctcgcctggagaccattgctcaggcaggtcgatccgaccgcaggcgaccgaaatcggacgcctgagatcgacgcctgagccaggcgcgaatctgagggcagcaagcaaacgcgccctagaactcatctgtcaggcatgaaaaaaaatctcaggtatgctgttcaggataccatggtcaggcggcagctgcaaatcgaacaatcaaatatcccggctgcgcaaaaaataagggggtatttgggagagaggggctaaactctcaaaaacataagtccctcccataggaacttatatttttgtgagagagactaaattgtttagccccactttagtccctccaaccaaacaccaactaaagctcatctgtcaggcatgaagaaaagtgtcaggcatggtgttcactgttcaagtgttcagggtaccatgatcacacaaaaaatagaactcatcggagaactgtcaagcatgaaaataaataccaggcatggtattcaggataccaaccaaacagacccttgatgccagcatgatcgaagcatggaactggcctgttgggcttgctgaaatgggccgagatcaaggcccattaaaacgccacgtggtcacgtggagcgctgctctccctccttggcgggcacgccaagcttagcacgcaccgtaaagtccaaatttgaccagtcaacaagtcaaagaaaggcacaactccaccttatcatctccactatataaaattcattttcgatcgatcgatcgctcactcacccacttgtctcacactctcactgagctcctctgcttctcgcatccatggccgccgccgccacgggccctgtccccttcaaggacgccgacgacgacggcacgctcgccgccgccgaggcgcgctcgcctctcccgaaggaggagttcggcgacctcgtcgcggcgctgccgcggaaggagcagtacctcgacgggcggctctacgaggggttctggctgccggagcactacgcgccggggatcatcgcgttccgccgccgcttcacgccgcgcgccgacgacgtggtccttgccagctaccccaagtgcggcaccacgtggctcaaggcgctggccttcgccgccatgacccgcgccgcctacccggcggacgaacacccgctgctccgcctcaacccgcacgacgtcatcccgttcgtcgaggacgtcttcaccgacggccacgaggccaagctcgacatgctcccctcgccgcgcctcatcaacacgcacacgccgtaccagcttctcccggagtcggtcgtcgccggcgacggcggcggcggatgcaaggtcgtctacatctgcagggaccccaaggacatggtcgtgtcgctgtaccacttcatgcggcgcctccagcccgacctgtcgctcgccggcgtggtggagtccgtcgccgacggcacggtgccgttcgggccgatgtgggaccacatcctcggctactggcgggcgagcgtctcccgcccggaccgggtgctcttactcaggtacgaggacctgctccgcgacggcgccgccggcgagcacgtcagggcgatggcgaggttcatggggcggccgttctcggccgccgaggaggccgccggcgccgtagcgagcgtcgtggagttgtgcagcttcgagaggatgaaggcgctggaggtgaaccggcggggcacggcggggtcgtacaagagcatgccgcgcgacgccttcttcaggaagggcgtcgccggcgactgggcgaaccacatgtcgccggagacggcagcgaggctggacggcatcttccgcgaaaaattccgtggcacagggctcaccattgttccatgacacggatcgagcagttggccagcgacgtcgtcgtcagtcactgacatgtgggccatagcaaagtggaacccacatgtcaatgacccaactgcatgtcagaggatctgcttccgtgtgcttcatttcattgtgattttgctgctgtttcggacatttttgtttggcatcgcttgtttttatttgtgattacccacttttctcggttccaatcatggaacggagatgtgacgaaaggcgcatcgaataaagaaatgagagtgattcgggcttgatcatcatccacttgattttgtgagcatcatgatacaaattattaaatgaaatgatgtattttgtacgaaaaactttaaaatataagataaatctatttctgagtttaaaacaattcaaacttcgagttatgaaattagtttttttattcgtgtccgaaaaccccttccgatatccggtcaaacgtctgatgtgacacccaaaaattttcttttccccaactaaactaaataaggtcttattttgtttgggctatttattgatttgggccgagtttgtttgttcgttttggacttttttgtgtgggccatgtgttctgcatttgcccaagtcaaagccatgaaaagatccaaaagagatggtggttttgatgaaacaagcagagtaagaaaacgagattgatcaaaaaaacaatcacacacaaaaaaagataaatcagaaacacagcatgagcgaaatacactactagaaaaataattttttatggtgttggtcaataattttcgctggcggaaaaataccaaaaccgccagcatggtcgtaacgagggggtgaggggtaccatgttatatcggccgccaacgaagatatgttcattttcactggcggtcacttagatgagccgctaacaaaaatggataatttttgctggcagttgggttaaatagtccggtagcaagttacaattatttttgctggcggcccacttaatcaaccgccagccaaaattgatttacactggcgctcttaaaaaaattcgcacataaaaaaatcaccgcgcgcccatacctttatccacccaccactacagaataaaaatatctccacttctcccctccaaatccagatccacttcctctcctccaaatccaagcaccctcctctcctcttcccctccagatccacatctcctctcaggcggcgactgcggggttctcgggtggcgacagcggctccggcagctatgcgtggtggcgacggcgacgggaggcgggcacgtagctgcgacgggaggccgtcgtcgggggggtgcggcgacagcaacgggaggagccgtcggggggcgcgacgagctcctcctcttcccttccccttccacagtggcttggtgctgcgatggttgcggcgacggctcgttgttgcgggacatggcgagctcccccctcccctcccctcccctccccttcctctccctctccctctcccagatctagccggaggggagggggtggcggcgaccacggcggtaacggaaggcaggcggtggtggatctgacaacggggtcggcggcatgagagcaaccgcgacgacgacgaccgtgaccgcggcgacgacgacgacgatgctgcgcgccggccgggagcacggctctagcggcttcttccctcccctccttctccctttcccagaggagaggtggaagcggtggccgtagcggcgacgacaggtgggcggcggcggcggatctgaccgcggcggccataattattagaaccggaccggaccggcggtccggccaggaaaaaccggaaccagggcaccgcccggtaccgcggcagccatagttattagaaccggaccagaccggcggtctgaccgggaaaaaccggaaccagggcgccggccggttcggttcagatataagatcagcgcgcaatcaaaccggagagaaaccggttgaaccgggcggtttactgcagaaccggagaaaaaccggggtggttcaaccgcttgaacggcgtcacacgtgaggtggcgacgctgtagagtacatgcgtcacatgaattagagaaaataggtaaaaaaaagctgtagaacccaaaacctccatgcttccaccgagaatctctaccagcaggctatgtgatgggttgtgaaacaactataacacacacctatttgaacctctttaaaccgacggtttgaccagtccgaccaataaaccagtgacccaagtgacttaacggttcgatcaccggtctggtcttaataactatggcggcgacgacgacgacgaccgcaatcgtcgaccacaaccgtggcggcgatgacgacgacgccgctatcgacagctctatgcgtgggcggcggttgtgatattgatgtttgcttgttgaaaatgtggtgaaaattgatgtattgttttctgcatgtggatttgaatatggatctgatgccgatttgaattgattttgagtatggattgaaaaaaatccaactgctcaagaggtcgattgctatttttttattggaaaaaaaatcttttcgttggcggtcctcttaaggatccgcctgcagcggttctcttaagggtctgccagcgaaaatctattttcgcaagcggtcctcttaagcgtccgcctgtgaaaatcctattttcgcaagcggatcgcaactgccagcgaaaatcttagatcttcactggcctttgctttgtggcggctccaaataccgttagcgaaaacgcaaaatgaccgccacgaaaaatagttttcctagtagtgataagaggagatcgaataaaataaaataaaaatccagaagtgttttaggtggaacctgaatttggttggttacggaggtaatcttgaccctctcacgcaagatttcgttgattttgcttactctttgtttacttgatctcaaccgcgtcaactttttttttgttcgatttgttctactactcgatgaaacaattgcagctctgtgaaacttcaagagaagcctccattgcttcattgttggcctttttattatcgacgtttaatcattctaccattataaaaaccatttgtcgcacataagaaaatataaaaagaaaattacactaagctccaaatgtacaaaaagttactttggcttcatcacagagtatgacaatatcgatcacaactattactcctctctctgtaaaaaagataaattttataactaagaatatgtgtctagactcatagttaagatgaggcttaggatatgggatatagatcgacgttcagagtcgcaagaaggcctcattcaatacaagaacgagagaactagagaacagaaaattttctgaaatactcctccgtttatatatatattagtttcaaaccattacagagcaacaaggaaacaagcagccatcccgatcgatcgaacgaacatactcgaccatgcaagaaagcatctagcattaataggtagaagtagaaccacaagcaacgatcacaatgcgtgcgtacgtaatgtcgtcgtcgtacgtcgtcacgcggcggcggcggtgcggaggaggtagtagtagagcttggggttggcctcgaaggccacgcgggagatgaggtggccggcggcgcctggacctttcatcatcaccaccggcgccgccaccggccaaagcagcaggctcaccgccgcgccgaccacggccgcggcggccgctccgacgacgaatcccagcgacaccatggctagctctcgatcgatcgcggtctcaacctcccaaggtcgactacttctgaacttcccaagatcgagatgactagtgctagacgtggtatatataggcaatttagtctgcattaatttgcttgttttcctcgggaaggggatgggttggaacttggaagctgatcacaatttgaaggacggtatagatcaaacggctcgtagtaaaatgtgtgaagacgatgggacgatgctttttttttttcgcaaaaactaatcagcgaggcctcttgatattgtcttatcgggcgacgccaaccatagaagccgtggagaagccagcgcacatgcatgcctttttttctattacacatcatgtattgttttcccttcttacaaagttttctctcaaattaattatccgatctataatccgattacaccattgtgttcgttgcaattaaatcttcaaaactagatcttacatgattatactacgatgaaaaaatatttatacttgtaaattacttttgttatatacttaagttacttttatcatatatataaattacttttagatttaattaattactttttatatattcataatgctttaagtcgattatatttattatagtttttagtcaattctataatttatggactttaaatttaatttttagatacaaaatatttttctctcgaatttacttctaatgttgtaacaacttacttctattttgtgctaacttacttctattgcatagctaagttacatctattgcatagctaagttactactacaatttaaataaattacttttaaattaatgaaatgtttgaatatattcaacatggatttttttatctcatattttatgtagagtacaatgatgtaaatagatcatgaaaataatatgtgatttaaaagatataagttattaaagagcttaaatctaaaagtaatttatgtataggacaaaagtagcttacatatataataaaagtaatttacaacatagatatttcgtgtaagatcttgttgtaaagatttaattacaacaaccataatggtgtaatcggattataaatcggataagtaatttaggagaaaattctctaggaagaaaaaaaaggcatgtactgttgagtgtactagtaactgtttaagagaagggcgtcgctggttagcgatatgccgctagcgcgcgcgatctagccgtgtctttttttcccacgcttttttgggactccggccggtaattgatccttcaataaagttctacaattaagtgagaagcagcactgagaggatgcccgtttcgtttacccgagtaattaagggggtgtttgggagacttcagcccctctctcaaaaacataagtttctaggatatggacttatggttttgagtttagcccctctctcccaaacaccccctaaatctgtgagcagacgataaattctagtagtagtgtgctccttcccccaaataaaccatctcatttataaaaaatcttagagcaagtttaatagtatagtccactactagttttaaatcatctatagccaatgtaatagccaattcatacaatagttgcttactatactattaatacctggtcccacctatcatacacacattccgttttggagtccgtgctacagctggctatagacttatagcccgctgctcttctctcttcctttatctatttaaaatatgcttatagctggcttatagcgtgctattgtaattgctcttacatagacgtaggtaatagtatagtaggctagtaacaccctagttttctccatcctaacaaaaagtgaatctagaactctagtacaactaatctatatgtgttacattcaatactagattatttttttatgggatgaaaggattaatttttcataggacggaagaagtggtatgaaactcaacgtagcacaaaaaatctagaacattctcatttataaaaatcctatatagatgtaggtagtagtaggctagtaacaacatagtaacatatgaaactcaacatagcactaaaaatctggaaaggaagcttgtttggttggtttagaatatagtaaaataaaaattaaaaatcaccaacatttgtaactaaatttcactcacactaaataagttgtcactcacatccgtggaccttttaacttctaacgataatatctaacttttaaaaataaaattagatatgcattttttatccagatcgatagatccgttaacattgactcagactcgttcgttcatgatttttataatctatgggcatgtttaaatcaattttctgtggtaaaagttttggtgacaaaaaaaaattagcatttgaagttgaagttttaatagttactgtttagatgcatattctaccatttttctggtagagagagcactcccaacgcacttttcgacaaaatttactactctagattttcaaattttcaaatgacaaatattaaattgataacttttactactagtgtttagattcattttgacaaaatatgcttcaaaacggtaaaaacttttaccattttagaggtttggaagaactaaacaggccctaacttcaccaataaacttcaccaataaattgctcgatcgtgcatccacataatgactttaagttgatttttttatatgaagggattaaagttgatttttataataggttaaagttgatatattttataggatgaagggattaaagtttatttttttaaggatgaactaaaggagtacgcgatgaccaattcgaatggaacatactatttgggcgtgtatccatgcaaagctaggatgcacgatctgttgagattatagacatataatgatttaatttattccataaataaatcatgacattacagatgaaaactagcatgaacgcatcattagatctacatatgtaaactatacagtataacataaacagatcaaatatgcgcaacatattgaacacgtaccgaggtgacagaaagaccggctgcttggtcgaaacttttcgcaggtgtctacgaaggcacgaaacacgcgagcgaagaggaaggcgagccgtcgcgaacgaacagggagcagtcgcgcgaagcgcttcccaaaaaacttattgccgccttctcccggtgcaggacgtcgaaggcaaaggttccggagacctgctctcccgatcgccggtgcacgctggcgagcgggatggagtagtctacgagcgacggcgcagtacagagtaggaggcaaaccctagattgatttcgtgtgtgttgcgtgaagacggcaggtcggtttatatagagaagggtcgcttgatcagggcgcccgcacgatctctactgcgcgtaaccgaaccggataagtcacgcgtaacttatctggactccacgccgtttgcacgcaccggatttttcggaagaatctgaatttgcagcaaaacaaaactgcaaaaagaggctgcatctgcgcaagggtgaggagccaatttttcggaccattcaacgcgtacgtcgtgcacgcgcgccgcctgccctgccctgccctgccaggccaggcgaggcgaggcgagcgagcgtgcgcgtgtgtttcccctcttctctccaccacacatgcttcaagtgactaggagggcatcctcccttttaaggaggtccccctctcctagaataagcaaggtggtactaaactccacatgcatgccatcccatgaggtgggcttttgtgattttccaaagaattaatcttcgagtgggctaaggcccattcattaattccaacaatcccccaccaaatctcaaaatcccactgagatttgccttttccaatatactgtttatataccagcggttcgatggagaccaattaaggttgaacatccacctagaactccaagctacacttactcacaacttgaacaatggactacgccttgaattgcaagtcttgtgcaagcaagtttcactcaaagtcttatctggtactagaccgtctgtagactacccctcgggtggagcgtataagtcatactcctaggtctttagtaagcttcctagaagattcacccaaaatcttcatagactgcgaccaacagtcaagctcacaaaggtgagttctttcaagaatactctgcaggacaacatcttcgctaattaaagccaacagaactcattaaggcatagccaacctgccttgcagctcacgagagtatatgcatcttcacttggagagggtatatatattggtactctcctctagtttattaatggtttgttcttcccaggatctaattcacgggatctccgatcacatagactgggttaccaccatagtataactcacatgggtctcaaacccatctccttcgatgcattgtctatcacatttcgtgatagtcccttcgtgaagggatctgccagatttctcgctgtttggatgtaatccaacgttataactccggagtttcttaatttcctgacagacttcaatcgtcttttcacatgtctagacgatttcatattatccttagaactattcactttgacaattaccgtttgattgtcacagttcataaggatagccggcaccggtttttcaacaacaggcagatccattaatagatcacgcagccattctgcctcaacagtagcagtatccagtgccgttagctctgcttccatggttgacctcgtcaaaatggtctgtttgcaagacctccatgaaacagcaccaccacccagtgtgaaaacatatccactagtggctttgatctcatccacatcagagatccagttagaatcactataaccctccagtaccgcaggatacccagaatagtgaagccccaattccacagtacctttcagatagcgcattactcgctcaagcgcacgccagtgatcatctcccggattagaggtaaatcggctcaacttgcttacagcaaaggagatatcaggcctagttgcactagccaggtacatcaacgagccaatgatttgggagtattccagttgattcctagcaattctcttgttcttgcgaagcaacaagctaggatcataaggtgttggagaaggcttactatcaatgtagccaaagcgattcaagatcttctccacataatgggactgcaagagtgtaatcccattctcacctctaattagcttaatgtttaagataacatcagctactcccaaatccttcatatcaaaattttgagacaagaatgatttaacctcatttatcacctcaagatttgtcccaaatatcagtatgtcgtcaacatacaagcacaaaataactccctcacccccaccatggtgatagtacacacatttatctgcctcattgactgcaaagcctgcagatgtcaatgttttgtcaaatttctcatgccattgcttaggagcttgtttcagaccatacaaagacttcaacaatttgcacactttgccttcttgaccttcaactacaaacccatcaggttgatccatatagatctcctcatccagctctccattaagaaaagctgtcttaacgtccatttgatgaacgagaagaccatgtgaggctgctagggaaagtagcacacgaattgtggtcaatctagcaacaggtgagtaagtatcaaagaaatcttcgccttctttctgagtatagcccttagcaacaagtcgagccttgtacttttcaatagtaccgtcaggcctaagcttcttcttgaacacccacttgcaccccacaggtttacacccatagggtcgctctgttacctcccaagtcccgttagcgataatggaatccatttcactacggacagcctccttccagtagtctgcatcaggagatgcatatgcttctgaaattgacttaggagtgtcatccacgaggtacacagtgaaatcatcaccaaaagacttagccgtcctttgtctcttactccttcgaggagcttcactgacatcctcctcagagacaagttcatgtgtatgttcagtttgttctggtggtgtgattgaactgggaattatttcagagggttggttcgaaccactatgtgtatccttcattgggaaaaagctctcaaagaaggtagcatcacgagactccataattgtaccaacatgcatgtccggtacctcggatttaactattaaaaatctataggcaatgctgtgatgagcatatcccagaaaaacacagtccacagtcttaggtccaagtttgcgcttcttcgttattggtacattgactgtcgccaagcacccccatgtgcgcaaataagaaagtgatggttttctaccaatccatatctcatatggtgttttgtccttatttctgttaggaactctatttaacacatgatttgaggtcaacaatgcctccccccaccatgccttaggcagtcccgcggcgtccaacatggcattcaccaagtcagtcagtgtgcgattcttcctttcagcaatcccattagactcgggagaatagggaggcgtcctctcatgtatgatgccatgttcctcacagaataagtcaaactcgttcgagaaaaactctccaccacgatcagacctaagcctttttatctttctgtcaagttgattttcaacttctgccttataaattttaaaatagtctagagcctcgtctttcgttttcaacaagtacacatagcaaaatctagtagcatcatcaatcaatgtcatgaaatatcgttttccacccttcgtcaacaccccattcatttcacaaagatctgaatgtaggagttctagtggtgccaagtttctctcttcggcagccttgtgaggcttgcgaggttgcttcgattgcacacaactatggcacttagaacctttgacaatggaaaacttaggaattaaacacatgctggaaagccgagacatcaagccaaaattaatatgacataaacgtgaatgccaaacattagcctcatcatccacactgccacaaatatggttcacagacttattgcagaaatcagaaagggaaaagcggaacaggcctccgcactcataacctttaccaataaaatatccatgtttagacacgactactttattagactcaaaaaccaacttaaatccgtctctggtcagacgggagccactaacaagattcctgtcgaaaacaaaaacgaatccgaatttgcagcaaaacaaaactgcaaaaagaggctgcatctgcgcaagggttaggagccaatttttcggaccattcgacgcgtacgtcgtgcacgcgcgccgcctgccctgccctgccaggccaggccaggcgaggcgagcgagcgcgcgcgtgtttcccctcttctctccaccacacatgcttcaagtgactgggagggtatcctcccttttaaggaggtccccctctcctagaataagcaagtggtactaaactccacatgcatgccatcccatgaggtgggcttttgtgattttccaaagaattaatcttcgagtgggctaagacccattcattaattccaacacgatcaaccacactgcttaccctacaacaaaaccagcagctttttcccgtacgtacgtggaggataactatgtactagtgtagctacatagtacttactagctagctatagcctataggtgtgtagtcgtctatccagcagcagcaatagctaacggagtggagtacgtacgtcgccggcgccgtcgcgcgcgtcaggcggcgacagcaaaagcggcggcggccgccttggcgcctgtcacatcctgattttcgtttcaggatttataaattatttaataaattattaatagaatttatattaaatgttctttaatttacaagtgaagttaaatgtgggaaataaaatttccctaatataaagcatggatggatttaatttttattaaattctccatgattaagtcaactctctgaaatcttctcaaatttttcggagctcaattcctaatttttaatcatacaaagaacatttcagtaataatccacatattaaattaatcattaaatggtctggttttaatattgttaaatactttgagtgtccaagtattttcatgatttttcttgaaattatttgagcattggaagtatttttaacaattcaaagatcatttaagtgattattttaattgggaaagtaataaaaatcctcctcctccgcttgggccattttcggcccattccttcctcttctctctcccttgcgcgcgtgctgtgcagcccaagccggcccaagtcaagtgctctgttctgttctcagccaaccgaaaaaagtctagtttgcctccctggcactgttcatcttccagctctggacagagcccgagccagccgagcctgtgcacagtgccgccttcttccaccaaatccggcctcctcgttgctcctctttccaaattagttgaggggaaatattcctcttattctcctcttccttttccccaagaaatccccaaaattttatatggaaatcctttccaatttcgcggatcaaatcctttcctttttccggcgaagataaactttcccgagtttttcccgtcgttttgggcccggacccgagcttccaaggctataaataggaccccctagtcctcctctttcgtttgccccctctcccgagctctctagtgcctcgtagcctcgtcgccgcgcgcgtttagttcgtcgccgccgccggccgagtgcagccgcgccgccgcgccgcttctgccgtcgccgccgcttgccgccgtcgccaagaggtgcgccaaggggtggagaagcccggccgcccgtccttcttcgccgccggccgccgtagctcgccgtcgtcggtaaggtccaagccgccgccgcctcctctcgtcgccggccgtcgtcggacgtcgattgtcgttgtggtgagtaccgttgggttcgcctcgtcgtcctctacgtgtgcatgccctccaaatccgcagccggccgctctatctccggcgaggtcgtatcgtggttcgccggcgccgctccagcagccccgcgccgtcgctgtggtcgtcgccttcggtcgccgctgccgccgttgggttcgcgaggaggagaagaagaccggcctccacttccccgtcgtcgaagaccccgggaagcccgtcgtcaccgtgaagccgatccgttccatcttcagccgcgccgttcgtcgccgtccatcgccgccttcattcaccgtcaccaccctcgggatcgcaggagcgaggtgaagaccgtccgccctcggttgttgcctctcgtcgccggaaagccgtcgccatcgtcaacccaaggtcgccgcctttggagctcgtcgcctgccatctccctcgccgtctgtcgtcgcataagtggtggtaagggtcactttgatcccctctcgctcccggtgccctccgtttgcgtttgtgccgtggttcgccggcaaccgccgctcctttgccgttcacctgtgaggttttccctagggccttaatccgatctaatctaatcttgtttggccctaacgtcatcatcgtctccgtgtgtgtcgtcatcgctgtgtcgtagctgctgcttgccgtgccgctgctgcgcgtgtgccggctgagccgcttagctgcagctgcttgccgctttgccacagccgcagccgtgccggttgcgtttttgctcatagccctgctgttctagccgtgcatggttgctaccggctgtgccgtcaccctaaccctagctttgtgtatccgctgagctgccgcctagccaagccaagtcgccctagtgccgccgtgtcgcagttgtgtgccgcttaaacctagccgctgcttttagtcgagttgtgcagccgtaggtgcaaccctaggttcctaccggtctatcgtttgtcgtaccggggttttaccatgaatcgtttctagtccaccggtttagccgcagccgttgttgagtcgttcgctcgttcgttcgaatgaggtgttccccgtgcttcgttcgttcgtccgtgttgagtcgtcctttagttcagagccgccggttccgttcgccggtttcggttgatcatttgggtgatcccgtgtcacgtagaattgactcgttgagtcggtatctcgtgaggcccgcttgccagatcaatctaagccatccgatcttggtcaactctcggtcaagattaatctcagccgtccaaaatcaatataaattcgttctatcttttcaatggcatattagtcctttttctttttatcatgtcatctaccaatataatctaatcttttccggaggttgctttaatcttctgtctccgttataaatcatttgtaaattgtttaattaatttggaatagtcttttctttaataggtttaattggaatttaatcttgtaaaattcataataaattcatatgaaatcagaatgaggccgttcaagtctcataattcatctaaaattatgatctacatgtttgtttactttttatgtattgtttatttggtttttattagtctttttcttcgttttgcgtgttagcttgtcgtttccgtcgttgcgaaggttcgcgagtgcgccggaagtattcaagaagattaattgaagaccgattattgcaaggcaagtcacacagatcctaaacacaatcctttgagcatgttgatcctatatttaaattctctatttatttcaactgtgcatttattttcgaatgtcactgggtggtgtgaacctattcctttgttatggcctgcttgcattgattactttaatccttgataccttgggttattataatttgactagttgagctttatatattagttcagctagatattagatgtgattgcttagccatgcttagaaacattagcacactattgggataacttatgattcgttattatttaatgatggtttaatggtagctcacgatggtcaaacgtgattggttaattaattacttgccaactaaaacttgataatggtgggttgtgagcacatggttttgagagtcgtgctcatgacaattaaggaccggttcgcgaggtactgttgtgaaacattaaccgtaccaaccacaagccagcgtgggcaacggctttaccttttgtatagcatggttcattgcggagcaccagactgagaagtggcggaaataagcccacgggggtcgctggggagtccatgccttgttttataagggggtgattatgatccaggaatggtgcactgtggtgagttgtgttatgcagagggtattgtcacagcctctattcgggtactttccagtatcgcgacgcatggtagacatgatgttgaggctgtgtcttgtgggtacagtggtacacctctggccagagtaaaactattcgaatagccgtgcccgcggttatgggcgagttgaacaatgtttttcgtgattagtctcacacctctcacaataattatggatgctataactggtaataatttgcttagctcctggtttggagttaaatctgtacagccgggtatggttgttcaggatggttgggcctgtgcagcatgggtgtgctgttcagtgttgattaaaatttttaattaattactctactgttttactactcttaactctttgctaaatgctgcttttgcaaatgagcctatattatgccatcctttggtatccttgtgcacttgcatatttgctgtgtggcttgctgagtatgtcatatgctcaccttgcaataatcaatcaacctcagttgaagaaaaagaatccagaaggagaagacgtttggcttataccccagttgagctgcctgtgggagtggagccggagcttcgctagattttattttccgctgcagttttcttcttggtgaggacttagtgcctcttaagtaagtatttatcgttttagttaatttgatgaatctgtatattaaattgtcagtttgtgtacctcggctgattcctggacgaggattttatgcacaaataagttcggaaattactagtgaatttccgggcgtgacagcgcccaccgtgcgcaggaggtggaagtagacctgcgggttcgccaggaacgccgcgcgggagatgacgtagccggcggcgcccggcgccttcatcatatcatcgccgccgccggcgccgaggccggccacagcaagtacaagaaggcggtcgacccgacgcccacggccacggcagcgatcatcgacggcgccgcaaccatcggcactacaagtttgtaattccagatcgcgcgcgtggagaccaacgaacaatggaggagatcgacgaagagatcaagcagagtgaaaggtgcggccactggtggtaaagctagtggtaactggttttatagaggattgcaaaacacaggaaagacatagaaatgactgtttgattgggccgcaggaaaaacataggaatttgaggagaaataaagactcaaaggattctttccatgaggttctatctcatgtcaaatttcctccaaaacttgcaaaacttgtatggaaaaagataatccataggaatttcataggattttataggatcaattcctttaatttaaagggctatatagaaaaaaaatcctacaggaataaaaccatctaaaatttctatgaattctttttaatcaaagggccctaagttgctggtggttctgttcatggtggctgggttcctccggaagggccgggaaggggcgagggtgcacggacagcgggacaggtggcagaagtgtgggatgcatattgcctggttttttacttttacctggtccgtctactcgacacgcgtacagggatcgagatcggtaggggcggcgctccaaggagcatcacatcggtagagacggtgacgaaggagatcacggcaggctcgtatgttatcatcaatcaaatttgtatgctttacacgtgagatctacgtgttatatatttaaacaaacattattacactataaatgtatgttgtgtgttcttatttatagggatactagcttaattaaagaaaaacagattgagaaaaaaatttataaatgataaaaagaacgttgattggggaccaaatcagagtattccccaagtctatttgaagattactacgtcacttttagttcatagaagataataagatataaagtttttaattcggattcagctctcctaacaccatcaatttcaaacggatctagccgctcatatagaaggaatctcgggggtccatgtcacgccccgaactagtcccgaccggaactagcccgtgacgttccaaattaacctgttaatcgataccagtcccaggaaacagtgctggtatcacagggagacagaatatcatagcatcagaggtctctttattatagagtagaggtacagtcatgttgggctgcggacagatcccgagctcacaactgcattacaaaagggaaacggaagccaggacttggaccaatcaacacaggcgcgacttgggaactaggccgaaaccctaaaactcatcgtagccggcttgctcctggaagaactcctcatcagcagcttccgcttcatcttcttcagcaacttggggggggtcatttatatagagcaagggtgagtacgggagtactcagcaagccatgggaaataagtgtttaatgcaggcttcaaggaaaggctgttgtttttgcaattgtttttatttgaactcttttctaaaacaactaggtgagtgcttctcaaacgacacggatgagacagtgcgtctcgtccggtcggagtatgtgcaatgtatcagtctttagaattgaaacaaggttggcacccggccaacagcttttcaaacggccacccgggccaaccacttttcaaacggccacccgggcctagctgatcccatcacctgcagaattttcaaacatcgaaccccttttcacaacagtaatttcacaagcagtagtcaaacaaaactacgctaggaatcacctcacatccgcccatgaccgtgggcacggctgttcgaacagtttgttaacctctgcagagggggtacactttactcacacgacattactaacccggatcacccagcccgtggggatcagccacgtcgggagacctccaagctttcatgacaaggcatttccaaagccgacacaggtttaccatatgccgacgagaggagtcccagaccaacaacaggttaggtcccagaccatactgtgccaagaagcccaggggtcctccccgacaccaccccggcgaatccacatgtctctcggcatcaaggctcccctgataagctagttactcagccaagggtgtcccattccacccatgtggtcgtacttgtcttatgtttggatgaaattccaaggaaatcggtccttaagtgcgagagcgggaaaccgtacacccggtacgttccccggtccgcggttttggaaattcatttagttcgcaagcaccgacccaggtgtcgggttttccaaatcttttgtaaaacccaagttttacgcaagttgttattcagattttaagtttgaaggcgtccgtcgatactcgcacagggtgcacgaatatcgagacgcaactagatggttacaaggggacatggtataacaattaacaaaagaaggatcaaatacaacaaattagataggtccgccaatctgccttgcagacgggacaaacagattaagtgcgatcctatcaatgcataatatttttcaagcaacataattaaatttcaaatataggctcaagatgttcaaaggtagcttgccttgctcgagatctggagcttgatcctcgaaatcctcgcactgcgggtcttcgggctgtcacgccctgaagttttcccccctttgcttgctttaaaaattggttaaataaatcgtccgaagaaattatcttaattaacctagagctaattccctaattaataaatgcaaataataatcggaatcggcatgtggaatttttcttggattctacatgtcaaataatgctaacaggatttttagtggaattttcagagccttggaaataatttttaccaattaaaaatcaccaaagtgcaatttttaatcccaggaaaatcctttcttctttttgtttttcctttttcctcctttttcctcttcttgggccgtcggcccagtccacccgtcgcccgcgctcggcctccccttgtgggccggcccgttcccctttcccctccccgaagttctccctccctccctctctccttcgggcgccgacaggtggggcccacctgtcggtcgtcttcctcctctagccggttggagccgagccccaaccgccggcgccccacctccccacgccgcccgccttctccgtccctctccgcgcccgcacctcgcgcccacgtcgccgctctcccccccccacatctcccgcgcgcgcgcgcccgcaagtggtgggggatttgaatccctctctctctctctcttcctccccactcccccacatcgccggccaaatcggccacctccccggccacgtccgccccctcccgcacctataaatcgctccccgcgtcttcctctctcgtttttcgcactcgccgcgccctcccgtgcttcctatcgtcgccgcgccgctcgccccttgcgccgccgcctaccgccgtctccggccacgcgccgccgccactatagccaccgccgcgccacgcagtcgccgccgtcgcgctcaccgagcccgcccgcacctcggccgccgcttcattgccgcgaatcaccgccggagcccttttctcctcgcgcgccggtgagaccctctctcccctccgtctccggccggcaattcaagccgccatggtcgccttcccttccctaacccctctatgctctctcctagggtgccgccgccgcccgttcgcgcctcggcatcaccggtcgtcgccgccgttttcttccttcgcgccggccgccgtgttcgccggtgaggaatcccctctcctcctccttccttccctccctcccatgagcgccgccgccctccgcgcgtgtgccgtcatcttcggccgccgccgccgccttcgcactggccgccgccgtctcccgcgccgccggtcaccgccggtgaccgcgcgtgtcgccgccggtcgccatggccgccggtcggctttgaggccgagccgagcccggccggcgcctccctcgcctcccctttgagccaccgcctggtggggcccacctgccagccgccccctccctctccccttgtgccgctgccagtggggcccgcatgtcggcgccgcccccccccccccttggatgacgtcagccctggggcaatattgcgcaataattaattaaggacttttctttattagtaaaaacacagtttatcttctaaaattcataagtaattcatccgagctccgtttaagtccattcaagtctcagtaaatcaagaaaaatgcaaagaatccattaaaaatagttttgtttcctgcttcagtagtcttatagcctgttttgcttgtgtgctttgtttgtcgcgtagatttcggccgtttcgtcgatccgcagtttctcgaagacgttgctgtgatctcatcagtgcgagagcaaggcaagtcatgcaatacgtttgatcatattgtacccaatttacaaatatcccgcatttctattaaatgttgcatccttttacaatgtcatgtgggatgggtcctaatactcagccatttattgtttaccttatgccattgataacttgggtatcaaaatgactagatgttggtttaggaaatgcttagccatgcttagttcaactagcacacaaatggggatcaccttattacatagactttgtctattggtatagctttagattggtgccaccgcaatggtgttagttaattaaaatacactgaatggtgggctgtgggtgcatggttatgctggtcgcacccatggcagttaaggaccggttcacgggaaaccctgggagacttaccgtgcttaccacaagcgggagtgggtaactgcttgatctgaagtatagctcgaccctttcctaggcaccggtggcgagggtgggcgtgatggagttgggtcggccggggtgtccggttgtccagctgccggattcaccgcggcgcaagaggggaccgcccactgccttttgaggggtgggggtgaaaccttagcgtggtgtggatggttaggggagggttatgtggagggtcttgtcacgatttccccctttgcagtatcatggtgatacttcggggcatggcgacatgtgtggaatcgtgtcttgtgggtacagttgtacacctctggccagagtaaaactattcgaatagccgtgcccgcggttatgggcgatcaaccagattcaccgtgattagtctcacccctagtttagcttaatgaactggtgtagttcaggtggttggttgggcctgttgcaacgtggtgtagcgttggacagtgtttggttaatattgattaattactacaactgttttactgccttcaactactgcttttaaatgctagctttatgcaaaagaacctctagcctcctttggttatatcctgcatcatacctcctcttccggtatgacttgctgagtacagtgggtagtactcagtcttgctctcttttcccccacaccagagctgaagatcttcctagttggagctgttttgtcaaagttggtttcgtcgctgccgtcaaggattgcctgtggagtggagtcgcccgctgctgaagtcaagcttcccggtttagctcgcttttatcttttccgctgcatttgtaatcttttctatttttgtaagacgtggatctgtatgtcaacaattgtcgtttgtgtaccctggctggtcctggacagggatttaatgcacattcagcttagaaattctggttcgagaatttctgggcgtgacaagttggtatcagagccgaccttgaccgtaggacaagccaactggaaaccctaagagccctctgaacccctttttcatctgcatatgcctttttgcacctggaattgtttcgggaaaatttggagttttgcctctttggtttgcgggaaaaatcttggtcgttctttcggatcggattttttttttttttaaaaaaaaaaaaattagctcagtctagggctttagaaaaattttagttggagtttattcgacagtcagtcgggaatttattgggggttatgcattaggtcgtgtctatattcgatgggggcaatgttatgcgcatcattttccatgcaactagtctatgcattaatttattgtttagttgcattagtgtctttatttgagttcatgaaaaatgttctatgcataaaaatcatcctgctcggttatttatttgagtcttcttttgctttgtttaatttggatttgagcatgaattggttcctatcccttgtctactttagatgtcagtcctatccctcgtttgcaagcgccgccccgagcttcagagtcgccgcccttagctttatcgccttcttagtctgtttgcttgctagttttcgtgtttaggtttgttgcttgtgggttagtcggcggtcgatatcatgtgtcagtggtatgactgcctcaattaggagttgcgtgcctctttttcagtgttttaatcaagattaagataattgcacttaaattcataagcaagattagtttctgagccccctgtttttcttccttttcccatatttctacctatccccttcagatggagataaggaatggttcacgcgactcgaacaacgccagtggcagcgaagagccgatcaatggagcacgtgccaacggtgcatctgacaacagtccgtccccaccgcccgagaacccaacaattgctcaggtgttggacaatcagactcagataatgacaatgatgatgcaacagatgcagcaacagtaccatcaggtgatgcagcaggtgcagcagcaagcacagctgcagcagcagaacctgcagtttggtcctccacctcctcagtccaaactgttagaatttcttcgtgtcaagccgcccactttctcaagcaccaccaacccaatcgaggcccacgactggcttcatgccattgagaagaagctgaatcttttgcaatgcaacgagcaggagaaggttgcttttgctacacaccagctacaaggtcccgcttctatttggtgggacaactacatggtgacccgtccggctggggcagaggttacttggacagagtttcgtcatagtttcaataaagcacaggttcccgagggaattgtgggacaaaagaagagagagttccgttccctgcaacaaggaaccagaacagttatagagtatttgcatgagttcaaccgcctcgcgcgctacgcccctgaggacgtgcgaaccgatgccgagaagcaggagaagtttatgtctggtcttgatgatgaattgaccaaccagttgatctctagagactatgaggactttgagaagcttgtggacaaggctattcgtcaagaggagcagtgtaacaaaatgaaccgtaagaggaaggcagcccagttcaggactccccaggggaagtgtcagaagcctcgttacacgatgggacgtcacggtggaccttccaccatgattatccgacagcaccgtccctaccacccgggtagcttcaataagacccaccatagtgatagtcacaacaacagtgagcagcacagcctcaaccctactccgagttcactaaagattccagctcaatcagttcagccagctctgccagaacagcccaagaggttgggagaaaaacccgaactctgcttcaattgtaacaaacccggacacacggttggaaagtgcccaaagccaagacgtgctggacccaagttcgttcaggcccgtgttaatcatgcatctgcagaggaggcgcagtcagcaccagaggttatattgggcacattccccgtcaactcgacaccggcagtaatattgtttgattctggtgcaacccattccttcatttccaagcgttttgctggtgcacatgggttatctttagtgaagcttaagataccaatgcgagttcatactcctggaggtggcatgaccacaactcactactgcccatctgtgacagttgaaattcaagggttgatttttccagccaacctcattcttctcgaatccaaggacctagatgtcatacttggaatggattggttggcaaggcacagaggagtgattgattgcgccagccgcaccatcaagttgaccaatgcaaaaggagaggtggtaatcttccagtctccagtgccgcagaagccagggattagtttaaaccaggctgctggtgaagaacaagaggtagcagtggagaaaaccactaagaaactagaggatattcctatagtcagagagtatccagaggtttttccggatgatctgacaacaatgccaccaaaaagggatatcgagttccggatagacttggtaactggaactgcaccgatccacaagaggccttacagaatgggagccagcgagttggcggaagtcaagaagcaagtcgatgaacagttacagaagggatacatccgtccgagcacgtcgccttggggtgctccggttatctttgtggagaagaaagacaaaaccaagaggatgtgcgttgactaccgcgcactcaatgaggtcactattaagaacaagtaccctttgccaaggattgatgatctgttcgatcagctgaaaggagctactgtgttctctaagatagacctgcgatcaggttatcaccagttgaggatccgcgaagaggatattccaaagacagcattcatcactcggtacgggttgttcgaatgcacagttatgtctttcggactcactaatgcacctgccttcttcatgaatttgatgaacaaggtgtttatggaatttctagacaagtttgttgtggttttcatcgatgacatacttatctactccaagtccgaggaagaacatgagcagcatcttcggctggtacttgaaaagttaaaagagcaccagctatatgccaagttcagcaagtgcgacttctggcttaaggaagttcagtttctcggtcacatcgtgaatgctcaaggagtagctgtggatccagcaaatgtggagtcagttaccaaatggaccccaccaaggacagtcactcaggttcggagtttcttaggacttgcgggttattaccgccggttcattgagaacttctctaaaattgctaagccaatgacacagctattgaagaaggaagaaaagtttatctggtctgctgaatgcaataggagttttgaagaactcaaacgacggttggtgtctgcaccagtcttaatcctgcctgatcagacgaaagatttccaggtctattgtgatgcatctcgccaggggctaggatgtgtgttgatgcaggatggcaaagtggtttcttatgcttcacggcagttgcgtccccatgaaggcaactacccgacgcacgatctggaattggccgcagtcgttcatgctttaaagatttggcggcactatctcatcagtaaccgttgtgaggtatatacagatcacaaaagtctaaagtacatcttcacccaacctgatctgaatccccgacagcgaagatggttggagctaattaaagattatgatatgggaatacactatcatcccggcaaggctaatgtggtagcagatgccttgagcaggaagagttactgcaacgtcgcatgggtagaggaactatgctgtgaggtacaacgtgatttggaacatttgaaccttggtatagttgagcacggattcgtggctgccctagaggcacagcccacactggtggagcaggttcgcatagctcaagcaagtgatcctgaaatagcagagctcaaaaagaacatgagagttggaaaagcccgaggttttgttgaggatgaacaaggaacaatctggatgggagaaagattgtgtgtacccgaaaacaaggaattaaaagacctgatactaaccgaggctcatcaaactcaatattccattcatcccggcagtaccaaaatgtaccaagaactcaaagaaaagttctggtgggtcagcatgagaagggaaatagctgaattcgtagcactctgtgacgtctgtcaacgagtaaaggcagaacaccaaaggccagcaggattgctacagccacttcagattccagaatggaagtgggaagaaatcggaatggatttcatcaccggtttgcccaggacgtcatcggggcatgattctatttgggtagtcgttgaccgactcaccaaagtggctcacttcattccggtgcacactacctactcagggaagaaattagcagaactctatctggcaagaattatgtgtttacatggtgtacctaagaagatcgtgtctgatcgaggaagccaattcacttcaaagttctggcagaaattacaagaagaattaggaacccggttgaatttcagcactgcttaccatccacaaacagatggccagactgagcgagtcaatcaaatactagaggatatgttgagagcatgtgcgcttgactttggtggagcatgggacaaaagcttaccgtatgctgagttctcgtacaacaacagttaccaagctagtctgcagatggcaccatttgaagcactgtatggacgaaggtgtcgtactccgctcttctgggatcagacaggggaacgccagttgtttggtacagaagttttaaatgaggcagaagagaaagtcagagctgtcagggaaagattgagaatcgcgcagtctcggcagaaaagctatgcagacaaccgccgaagggagctcgctttcgaaacaggggattatgtgtatcttcgtgtcactccgctcagaggagtacaccgtttccaaaccaaagggaagttggcaccacgctttgtgggaccatacaggatcttggaacgtagaggtgaagttgcttaccagctcgagcttccctccaacatgcttggcatccacaacgtgttccacgtctctcagttgaagaaatgtttgagagttcctgaggaacaggcaagtccggatcaaatcaaaatccaggaagacttgacgtatatggagaagccgactcgtatcctcgaaaccagcgagagaaggaccagaaacaaagtaataagattctgcaaggttcagtggagccaccactcagaggaagaggccacttgggaaagagaagatgagttgaaggccacccacccgcacctcttcgccagctcttccgaatctcggggtcgagattccgtttaaggggggtaggtttgtcacgccctgaagttttcccccctttgcttgctttaaaaattggctaaataaatcgtccgaagaaattatcttaattaacctagagctaattccctaattaataaatgcaaataataatcggaatcggcatgtggaatttttcttggattctacatgtcaaataatgctaacaggatttttagtggaattttcagagccttggaaataatttttaccaattaaaaatcaccaaagtgcaatttttaatcccaggaaaatcctttcttctttttgtttttcctttttcctcctttttcctcttcttgggccgtcggcccagtccacccgtcgcccgcgctcggcctccccttgtgggccggcccgttcccctttcccctccccgaagttctccctccctccctctatccttcgggcgccgacaggtggggcccacctgtcggtcgtcttcctcctctagccggttggagccgagccccaaccgccggcgccccacctccccacgccgaccgccttttccgtccctctccgcgcccgcacctcgcgcccacgtcgccgctctcccccccccacatatcccgcgcgcgcgcgcccgcaagtggtgggggatttgaatccctctctctctctctcttcctccccactcccccacatcgccggccaaatcggccacctccccgggcacgtccgccccctcccgcacctataaatcgctccccgcgtcttcctctctcgtttttcgcactcgccgcgccctcccgtgcttcctattgtcgccgcgccgctcgccccttgcgccgccgcctaccgccgtctccggccacgcgccgccgccactatagccaccgccgcgccacgcagtcgccgctgtcgcgctcaccgagcccgcccgcacctcggccgccgcttcattgccgcgaatcaccgccggagcccttttctcctcgcgcgccggtgagaccctctctcccctccgtctccggccggcaattcaagccgccatggtcgccttcccttccctaacccctctatgctctctcctagggtgccgccgccgcccgttcgcgcctcggcatcaccggtc

SEQ ID NO: 5115 - DNA, 1847 bp, Oryza sativa
tcaccggtaccctaactgaagaacaaattcagagtaaatgactctgtctcagcctctcaggatgaacagttaactgatctagccacagagagcaatcaattcttggctctgttcttagctagatctcgtgaaatccaggacttggggagttcagggtaaagaaaacggcagatgttttttcagcaatttcagctgaagcagagtagaagcagcagctagtataccttgggcggaggagggattggttggcgtgggagtaggcgaggtggccaaggtcgccgagctgcagggacacggccggctcggcggcggcgaggaagcggccgaccagctccgacgcccgcgtcttgggcgacggcgtccggctgccggcggccaccagctccgccggcacctccaccaccgcgccgctgaacacagccaacatcctctactctactgtactgtctgtctaatcaaagctaattaagatcactacacacaaactatgaaactactccaatttaatccaatcctactgctaaaactctcctctgctaatgatcagattagcatagataaaaaaaaaatacgtgtggcgttccacactccttggatggatagatggatggagcaagaaacggagctcacactggatggatggagaaatggaggaggagaagctgctttatatagccacaaacccaagcaatggagctctgtttacgtgggggccgcactgacgttttcttgtgtgttaacctccgattaatcttctttaattgtttttctcctgactaaaacaaaacgtctcgtgcacatgggcgtgtcaaaaacaccagcttatgtctgtacttttaatggagtgtaagttttaattagtcaattatatcaaaatcgtagaactacgctgagaacactttggacgtctccatagttagatgcataacgtcaaaacatacggcatacttacaaataaattttataatcaaagaaggtacaaagaatgttaacaatagactatatgttgtgtttaagatgagaggagaagatcgagaagaatacgcaaaacaatgtaaatattactacatgattattgagtattaactattttaaatttaaaaaaaataaattaatatgattatttaaaataacttttctatataaatattttatgaaaaacgtaccatttaactgcttgggaagcatgcacgcacacaacgaaagagtttttcttctaatccacagctgccgaacccagactaaatcatcaacgtttctgggtaaaatactccctaaccctctgctccaaaggttaacacagccataaagagtccatgaagagtcattgagtgcaaatgttggacacgagatgttacaactttgataccttttcttcctagcaagaaaaatatataaatgatttttttttctgaaacaaagttttaaactctgttactaatctggacaatcaacaattgggccgtcaggaaaaaatggatgcgagaatggaagaaacggaaccgagatatttctagagaatcatatcacattgactaattcgttcaaagaaaaaaagaactctgaagccagtagctgctaatttgattaggtgaagcatggtgaagaagttgataggtgaagcgagggaagcaaacaaggacgaaggagatgaggtgaggatggtgatggaatatattggatgcatcttgcacgatttcttgtgagtgacacttgttgtgatgtgtgctttgtttccatgtgggaatctaatgcggccacagaaacggccaccggcattttggcctaccggagcagatattgcgtggcacgcttgatgatgcagtacttatttcaagaccaggaaa

SEQ ID NO: 5116 - DNA, 3704 bp, Oryza sativa
attttcaaaattttgataatttcggtaaccctggcataaaattcaatttcgaaattttaaaccctgcccgtggaacgggcacgggcgaggtgtctttggatgcccaaagcgtctccatgaaatacgtcgtcggaattccatatctttagtttcaactcggagaataatatttgcagtagaaatataaatgggttaattcatgaataatttactattaaaagtttgatatctgtattatttacgactttagaagttaatataaaaaataaactgcaatataaaacctcaaaatcaactttaattcataataaattgaggcgaaaaggacctcaaaagcagctgataaagtcataatttcttttgaaataatacaactttaatgaaaaattgtaaaaagtatatggtgattgtttgaaatcacaaatttaacaccatatcgaacaaatcgttgttcaatagggtttaaacaaatcgagaacttgggatgtgcgtacatgcatgtgagtgggttgtggggcctatcgaactttgggagtttgataggccaccccatatgcttgctatttttttttaatcaagtcaactatactgtcgaacggccgttgttcgacacgtatatctgtaaaattttacaatggttgtttgataggtatcttatcaaattacggttgttcaacacggtgctaaatttgggatttatatcgatcaatatctattttcacaattttcattaaagttgtattattttttttgaaaaaacattcgataaagtcaacaggtaaataatgaaatgcttctaatatcccgtaggctcgtagcaaaagagatgtcggagaattttacctcatcgtctttctatcgtggcgaatttacagtggattttgttgagtttactaccttattatgaaaatcttgataatgtaaaaactccaaatgtttctattacaaatatatttaacaaaatatacatgctgtttaaaaccggattcttccgccctctccggtctccaccccatgtcgcatctaggtcgcacgaagagcaaccaccagctcccaaaaagaccagaaaaagagcagttcactagaaaaaaaaatgtatatatggactcgtatagcctatcctcgatcgtatgagcccgttgcaaggtttgacggcaagtcaacacattgatccggaaatatattttttcttttaggcaaaccagaaatttcattactcatgatccgagatatcctcagcgacctaaagactgatacaaactcgggggctgttcagattatagccaaaataaacttatcaaattttgacattagtaagttgacaatattgcaagttttggcagaatagccactattgtatagttgcctaattccttatgtatttaccaaagttgggtaaaaaactaaatgtacacacatctttgacaactttataaaaaaaagagtatgatttgaaatagcattaatctagacaacccctgactatgctatgtaaagtgccaatactttggtatggctttcaaaccaaaaactccatacaaaccaacttcacaaatatgacgcagatgtcaaccacaataatgcagagaatgcaagcaaacaaaaaagaaagccaatagacgatcgggcgctatacatttttgtttggaatatcagaaaaattgtttcaggtattcagtaggaatttattttcttccagatggggtttgaccgataaatacatttgtgtttacttaaaagaagacaagcacatttctgagacgttagagatctacgatgggcctgttcactttgttgccaaaaaaaaccttaccaaaattttggcaagatttcttatatagttatcaaaatttggtagcaaactaaatgtagccacttttttagcaacattactaaaatttggtaagtttgaaaatggcatcaaagtgaacaagcccgataaacagagcaaccgatcaagaatgacgctagcactatataggatagtaggactataggtggtagtagaacaggcttcaaaagctccaaatcttccaaggaacacacataatgcaaaagtacaagagccagcaacagcgagaatgaaatctgaatcacaaaccagatgtcccaacacaatgacatatcctaacaattagatgagggcaactgcaactaatagactatcacattctgtcagattctgctaaattgtccttagtcttgcctagtttctccccccaaaattaaaccgcagacctaatggattagaatagagcccataatttgtcatcgcacatggcaaagattaacagccatgccctacaaaatgtgtcagggatgggggtgacaaaagatgatagctcaatagctgatgctactcctgaggagttaagcagacattgatgtcaggtgaaggcctgtgccccatggactgtgagctgactggccacccaaccatggtgaaacctgtggagcttgagctgttaaggttcatggcgccactggctgttgcactgtgctccattacaccggtgtgggcttgcggatgcatagatgagacctgcggcgcatggcaaccattagttccaggagctgcctgagagataggcattgcagctgtgagcacaggaggtggagccataggcggtggtagtgccggggcagcagatgttgctgttgtaggcccatcctcctctgatgctgctttaggctgttgggcaggaagctccccacaatcacctgtccaagaggtttgtgttagtgaacagggaaaaatggtatttgcgtttaacaatggcaatgagacaagaggagatcaatgttttatgtcttgttgagttaattgttgagtgtattggttgatttggtagaagatgcccagttctctttttacctgaatagggcttgcggcacgcagcatcccagctactacaccaccaacgacacggccatcaggaccggcaagcgatacactgagcccaccagttctcctccgaccaccttcttccgccattgtaaaggagccagtcagttgcagaatctcaaaccgaccctgacaatcagataaacgagatgatttagtcttaagagtttgaaaatgagcaccgtaaatacaaactcatatgcaggatatatgacgacttctcttaaattgttatcctacactcatacggccatccaaatgaaactttttgtctcttatgcttgcagttatatatatggagttatggtcttatggatgggacaccttaacccttagcacacatcccatgctagttgctgactgtttccaggatgatgttcctgagcctcatgtacaactttcagtcatgcataatatgcgataacacaaactgcccaaaatcaatgtgagctatcatggatggagcgaaaaatggtaaagtcatttaagcagagtattaccgacttttagtgacgaaaccttcaagagcatcttacatgaggtagctaagacttaagactcagataattgagatgaaacagatgaaatgtcaaaatataccccctcatagaacatttaggcaagaaaaccatttgtcgtatttactccgttatttattacagtggtgatatgggacctaaaagacttggtagagaagaccccaaactaaatagaccaaaatggttcagcttattcaggactttgtacatacccatcaaaagttaacaaaagcgggtaccgagctcgaattcgccctata

SEQ ID NO: 5117 - DNA, 4211 bp, Oryza sativa
ttcaggtgtgctccgctaaatgttctgctataaattatttaattcttgaatgtttatcaaagcaagactttttcacaacttgcttgtgtattgttatattgatgtgcatgcaatgcacttttgatcccgacaaatttatttaatgttgtgagacattgagtttgtttttaggatcaactcaagtacttgatattattgttcagtgcaaaacatgaattaaacataatattttgtttaatcattttccataatctccaggaaatttgcaaggaactacaagattcttcacctgcgaaaggtttttgcaaagatgaacatccttcaaagaatgattgcatttctgagctgcttagcagtgccatacaggatcatttgaagaattttgataggcaataccgtttaacagttaagaaatcatctctctccgggagcaaataattaagcgcaaacctaagaggggcatttggataaataacaaacctaaaaatggtaaatagttaaattcctccctattaatgccaaagtatacctctaccttccacaaaccgaaaattattcctcactcaaaccgcaaaaatgattcaaataatctaggggcaacagcaaatttaccacgatttgaatcgtcattaggaaattatgaccggaattgtcattcgaatggcattcttgtaaaataaaaaaaaagatcaaaaaatttgcaaattccccaataatctatgcagcatctcatgaccagatctgctgattgagcaatcgcaaaataagcggaggagaatccacctccacaagctgataagtggacagcatgaactacgacactgttgtagtgttgtagagaaaacgactgacgtagcaccccaaattcgtccacaccattaaacatccctttagttcgtaatgatctgtcttaaaattgacttgcactaaaacatctaattccccattcccgtcgggtacgctcaattatgcacaaaaagaatttgcaagaaacgaaatgatatttttttggtcactcagggaatcaagaatccagcaccatacatgtcgctttggtacgttagagaagaaaacaagtggataatcaattaactcagttagatgattaattggatgacaaagggatgagtcatcgactcatcgttaattacgtcttcagagaataatattttcctctgagcggacgagaaaagtcgagtatctgctctgagccgagccaattttgttgaatttaggacttaatttcataaagtcaccagcccatgcattacacagattatctaggttgtgatagcacgatccacctaatcaacaattaattctttctggttaacacataagctctttcagagtgtctaattaatataggtgtagatagatttagaggtcttattaattaatgtaagcttttttttcagtcttagcccaatgaatttcttaaccaaacataattcgagaaacgcctaggggttttctggctagctacacaagatagtgagctagataatctgggttcgaagcataacttcatctaattatttgatattaggtcattccttaatattcatgtcttttaaccatacataattcttccggaaaataatgtatgcagtcttcttgttgccaaactgatctgcattgtatagtgcttgttcttcgttaccaaaaattaccattcctcgagcgtgtacaaaatttaaatatcaaaaatgtttatatttgggaatggaaagagtagctaagttgaactaattttcattttaggtacattattgattaacctacatactatgttacacctttcattaaaccattttgaatatccaatccaaatataaaaagaacataaagataatagaagttttagaactttccaccggacatgctacgtttgtattttattcagtttatttgtctgtatgcacaaaagcaacactccattattttggactcaagttaatagtctaattcgaattatgtgcattaaaatatcgaacttacgcaagccatgacatatgttgatagtcccatgtataaacaagtaaaagaataaaagaaaacccagtttgctatatcgtgtgacaccctacgtagtacacaatacaccatatgctcattgctaaaaaagaagaatatcctagagtccaaggagtaaggaatcattggcaagtcactctccttgcaatacaaaatggaaaggaaaacaaaacgaacacaagtggctaacatttttgcgaagagcttgacatggtgacacaataggaggagaacgatgaagcatttgacaaattgttttgctaaaaccatttgacgtttcagtttgttttacacaaatacaagaaaataaaatgaaactcacatttatactaaatcagtcctttcatataggctgattttttaaaaaaaactttttagagacataaaaaaccctcatatacaaaaatgagccttgtggggctgtggcacagctaaaactctgacattgattgctcagcagggcaaaaccttgttgtgcaattatgccaattaacaatgtcgtcttaaaggaaaacaaaaacaaaaaagaaaaggaggaagaaagataaaaagttgtacgcaatttattgtcaaatcgatattatggaaataagactgaggtggtgtttggatccagggatttaactttagtctctgtatttagacactaatttagagtattaaatatagactacttacaaaactaattacataaatgaaagctaatttgcgagacaaaatttttaagcctaattaatatataattagagaatgtttactgtagcattataaaggctaatcatggattaattaggctcaatagattcgtctcgtgaattagtccaagattatttatgggttttattaatagtctacgtttaatatttataattagtgacaaatatccgatgtgataaggacttaaaagttttagtcccatctaaacagggtctcagtgagtcagtattagtctatgtaaatgcacattagttgtgcagtcagcttctgcagtagcaagctgggtggctgcaacttcaacctcatctttgaattgaatggaacggcttaattatcatggtcccggataaggttcatctgtaaaatatgaaaaaataagtcattcttttgcattctatttatctcttcggtcttgttgcaaacccttaccttttgttttgatcttttttttatatatagttgtgtgtggcttagttgaatccgttccgagtagtgaagtactgaccaaaatatccttgtttaattgttgcaaaaccaatgggcgcccacaggattagataagacttaagacccacggatttgctgatttttctgcacgacctgtggactgcagagagaatctagccatgtgattcagtgctaatgggattcttctttagttcttccaaattgtgttccaagagtttaatttgtggtatggatacattgtaaagggatcaaatggggacttgtcaactttagttaaaattctgattaaaagtggctggcctttgcatctccaacatggtcagcacaagtctgctgttcttctcctctaggatattttttatcagaccttgtgtttatcacatccttttctgtatattttttcttctaaatatgttatgctagtactactagtagtaatttgtgaaaaggaatcaaacattattgttttcaccctttccctttcatgagaatgacagccactgaaattatcctacaactaattaatacaacatcagtttatctaagctaaaattatgcaaacatagcagctgcaagttggcaagaggcatacctaaagttactgcactacattatttcaatggccatcgcctcgaaagcgattgcctggatcaggggaagcacaaagaattactactagaaaagcaagcaagcaagcaaagaatcttggctttgtaatttgccaacccacacggtgccaatgaatctagtacacttttcagcgtgtcaattcatcaaataatccaagttgcagtattgctttgggcatataattataccaattcatgttaatgtgaatctttggtttcgttcttaatacgaattggaagcatctcgaaggaacagttcaggaatggtttgtgcccacagtttcgaaaccaaagtctccccaaccagacaaggtttcagctggtaaatttcttcagagcatttctaattggataccacca

SEQ ID NO: 5118 - DNA, 992 bp, Oryza sativa
aacagcagcactcgatgatttgggactcaaggacatagtctaattcgaattatgtgcacacaaatggagaacttacactagccatgacatacgtaagctagtcctatgtataaacacgtatagactagaagataacccaggctgctatatcgcgtgacaccctacgtaggacacaatacaccatatgcgtcatcgctcgaaaagaagaatatcctatagtccaacgaacaaggaatcataggcaagtcactctccttgcgatacaaagaggacaggaaaacaaagctaacagcagtggctaacattttagcgaagagcttgacatggtgacacaataggaggagaacgatgaagcatgtgacaaatcgttttgctaaaaccatttgacgtttcagtttgttttacacaaatccaagaaaataaaatgaaactcccgtttatactaaatcagtcctttcatataggctgattttttaaaaaaaactttttagagacataaaaacccctcatatacaaaaatgagccttgtggggctgtggcacagctaaaactctgacattgattgctcagcagggcaaaaccttgttgtgcaattatgccaattaacaatgtcgtcttaaaggaaacccaatacaaaaaagaaaaggaggaagaaagatataaagttgtacgcaatttattgtcaaatcgatattatggaaataagactgaggtggtgtttggatccagggatttaactttagtctctgtatttagacactaatttagagtattaaatatagactacgtacagaactaattacatcaatgacagctgatttgcgagacaaaatttttaagcctaattaatatataattagagaatgtctactgtagcattataaaggctaatcatggattaattaggctcaatagattcgtctcgtgaattagtccaagattatttatgggttttattaatagtatacgtttaacattgatcattagtgaca

SEQ ID NO: 5119 - DNA, 4395 bp, Oryza sativa
gtgaagtttacacatggtcagaccagatggaacgctatcgtcaactacgaacagtggctagtgaagcttttttccgatgttccatgacagaagaaagtacactgaaggtgatgaaaatgctagataatttgatgcttgaagatgactgtagtgcaaattgtgacaactttgagattcagtttggtcatgtggttcgtcaaagtatgcgcactgacattgaaagtagtgagaaagtgcttgatccagaactagttgtccctaaaggagctcctacaaagagaatgagaggtttcttggagaaacgcaagaggaaatgtgggttttgtcgtttgacgggacatacaataagaacttgccctgtttacctaaggcaagttgtcctatttgttattaacctcttcataaagctaatattgttttattcactgaaattgtaatgttactttgaacatagtactttcagtccacgaagacataagacgtcttgagtctgaacatggcaaactacatgaagcgtctacatctcaagttaccaataggatttagggacttatattgcaacactgtgtctacatctcaatttttctttccaaccatgtctttgaatctatcggttctgattgtcccaactgtatgaactattttgacaatttcaatctatcaccaccgatttattgggggaaatatataatacccatacaatgaataaaaaaccacaaaaagcaaccaattaacacacaccttatggatcagttttctccctcactctgcatgttgtgccacgcatcgaggccgctgcccgcagtggccgacgattcaccgtcgccgccgacgatgcagccccggccgcccgccgtcaccgacgaatcatagcttcaaccattgccgggctcccgccgacgaatcgccgccgccaacgatgcagcgccgcctacgcatcgaggccgctgcccgcagtcggcgacgattcgccgccgccaccgccgatgcagcgccgccgttgcatccagaaaagtcgcgtccgctgtcgccgacgaatcaccaccgccaccgatccagcgccgccgacgccggccgtagccgtcgaatcgccaaggcttcccgatttgggccgccatcgctcgcccttggcatttagggtttgtttgtctcctgctcctgcccgacgaatacgaggctctattctctcgcgatacagagaaggaaacagataacgcgaaagtacaaaactaccctcccacacacggtactgttgtgatacgtacgtgcggtacgacgaggtaccatcgattttggaccgtccgatgaggccagatcaatggtcaggatttggtaaggatgggaaagatgctcttataattgagggtcgaaaactaaattaaaccaatccccaaaaaaaaaggtgccatctaatcctcagcaaccacaattctagctggagatcggttaagttcagttgcaatttttggacgccgaagccaattcaaccagagttaactgctaaatggcattcccaattgtgagaaaaatattatactgctagtttccatcacacgatgaatgggagattctccagagtatcactcgcatccgccactaataattctctaccaaattacagacaacgggagatacatttcagaaagggcgatagaatttacttacgcgtgggcgcgcgcggcggtatcctgctcagggaagtggtcctcgatggcagccgtagccggtgagctcgagctcggacggcggcgccggcgatgggagtccttgacgtttgtgcccaagttgccaacccacgtagaagatcacttccccttagatcaatacaggggtagctccggcggagactgcaggcggcggaggcggcggtgatggaacgggccggactgggtcaactgataccagtagtttaatcgaagcccaacatggccacgtgcgtgattacaggctactggcccagaacatattgggcttcaagcccagtacacgttggtgtctttctaggataaaagaagtaaagaaggaataagtttatttgtcatccctcaactttacgtcgagtttgattgacatccctcagcggtgattttgcttcacatgttcttccgaagcaccgcaaatgtccccaaatactgcaatacattgctaccctgcataggacatcgcaaagcagggcattgcaaagtaaacttacatctacaaatattcctcagtaaaacggcattgtatttgtagatgtaagactaggctaaaaacaatggcaagactaggttaaaagaaaaaaaaaactcctgtcttttgatcgggaaacaatagggtggtaagcactgaaaacctgatcactgatcatgatgccctctgtgaccctgttcgttcgtccatcttgctcccgacagctttgtattaaaactgtaaccctgtgtcgttcgtcctttgttcttcttttccatggcgcgtcgcatgatcaccgtagctgcatttggctttagcttacccagctagcatctgttacaactttctctgaatatataccatatcctctttgcctctttgcagcatatgctctgcttcatcatctttttccgctgtaattaacctgaagaaacgtggctggagatgatgcagacacgctggtttcatctagaagtacgcacccagccagaaacgaaatctgaacaaacagcagctgccagtctgccactgcacggtagcagtgtgtgacagtgtgatggatactgtcgtgcatactgatgcggtgcaaagcgaaatgcaggattccatttagcaatgatcgccactgcattgctcctctcgccatattctgtcgcccggttgccggacacccacaactgtactcactccgttaaaaaaaaacgaatataatattagatatgacatattatcatagtaaaataaatctaaacatgttatatctggttctagattgattttatagaacgaaggggtacgtatcagtagcatttttttattaagatatagagtacatattttatcttagtttctattaacatgcttttaacatgttaaacgatgtttttttataaaaaactttttatatagaaattacttaaaaaatatcaaatctattttttaaatttataataattaaacctcaattaattactctcttcgtctcaatatataaatatttttagcatagtgtcaagttaaacatttttaactttgactattaatagaaaaaaaataaaaagatcaatcatttaaaattgatgttacatgatttatcattaaacaaactatgataatatgcaactcttttaatttaaaacatcttatttttacaggtattgttggtcaaagtactatctcgaagactatattgaagtctaaaaatacttctattttaggatggaggaagtatatgtcaatgaatttctcgttttgaatgtgctgtctttatcttcattttaacatatctcaaagatagcatctctgaactagcatcatctcattactcttcctataaattggttgccaaaactcaaatttagagttgatgtttgggagttcttattttccatgtggcttacttttcggtgttaactcaattttaaactacgaataacacaggttaaaactttttatttgtttgttcatatgtcattttacagtttatctgttgtagactgaagaatatttttaagttttatccacaaattattattattttattgcttatatgcagttttacggcctgtcagcggtagaccggaagaacaaatcttactagtaaaaagaattcataaatacaactcaccactgagcaacatgtttcaaagttcataggaattttgcggggttacatgctcgaaaagtccaaatgggcctaaaatatttgtatatactagtatagcactatggagatactcgttaataagttcttttttggtgagacagtcaccaaccaggcaagtgaccacgttcagacaaagtcagatacgcgcagcaataatttactcccgtccggggggacacgcacccggcaactatttggcgcgacagcgcggcgcccgcgtgcgcgccatgccagttcggttcgccgccgtcccgcgtcccccaccacgtgcgccggcaatggcggcttcctccctagctttgcacgttcatccatggcagcttcctccattgggatagcctgtcttgtcttgtctagtagtactccacgggtgtgccggggcagctgtcgtcgtcgtatgacatgtcagcgttcgcggcggcggcgttcgcggcggtggcggtggcaactctgaacggcgggggaacgtacggaggcgtggcgcaacggaggagcgcccagttgacgccgctgaagaaggggtgccgcttgatcaccgcggcgccgacggtggcgcc

SEQ ID NO: 5120 - DNA, 9236 bp, Oryza sativa
  unsure (1)..(9236): unsure at all n locations
gcaccggtggttgcaccgcgacctcgccgccgtcgaccgcgccaggccggcgttcgtggtggcgctggtgcacgcgccgtggtacaccagcaacgaagcgcaccggggcgagggcgacgccatgcgcgccgccatggaggagctcctccgcggcgcgcgcgtgaacgcggtgttcgccgggcacgtccacgcgtacgagaggttcgcgcgggtgtacggcgggaaggaggacccgtgcggcgcggtgcacgtgacgatcggcgacggagggaaccgggaggggctcgccgggagctacgtcgacccgcagccggcggcgtcggcgttccgggaggcgagcttcgggcacgggaggctggaggtggtgaacgcgacgcacgcgctgtggacgtggcaccggaacgacgacgacgaggcggtggtcgccgaccaggcctggatcaccagcctcgcctccaacccggcttgcaacaagtgaccccatcaatccatcagaaattcagaatgtagcagaaacagatttatgaattatataattatataagttaatttattgcattgatatcgataattagaaatttagcattagtacttctacagttctatgtatgttagaagatactctatctgtcacataacttagaacgagatgtgagcctctcatactgatttgtttttcttatgatagaaacccaaacacgagttaaatcattagcgtatgatcaattaagcattagaaaaaaacaaaaatagattaatataacttttcaaagtaactttccttgagaaaattcttacaaaaatcacagtgcttaacaatttgagaagggtgcacgtaaaaaataagagagtatggttaagagagaggagtatagaacacactatccttatataaaaagttttgaaaatctaatagcgacaggcgcaaacactttttcctaactactctactttcttcaattctataattcttgacgttttagacaagattaaagtcaatgtttatgactttgatcatcaatatatttaataatatttaatttaaagataatataacaacatatacaaatttatctatcttacggagtactataattaaaaataaaaataaattatttattacatatatgataattaaaaaatatagtcaaaatatattttgaaaattatattaatacccaaaacgtcaaataattatggaacttgaggaagtaacaccgtaaaatgctgataattaaattacttgttgcaatctctctctgtaacgttcattccgagacgaacggagatggttaatgatctcgggggcgatcattgagaaatggcaaaatactcgctataataacgaaactggtaaaccagatcgaggctcgcaaccggcaaaccctaaccctctcttatccctgccgccgccgccgccatcttctctcatccatcgccatggctgctgcagcccgtaattaccttaatctggattttgacgtttccgatacgaaacctctccctgactactgcttctcagaggcttcggaggtgtggagagctcattctgatcgatcggatgaggaaagggaacaggaacaggctgttttgagggtaattaattaaggatatcgaagcctccaagaagctttaatttgattttctttgctttgattgtgcctgcatatatacacgcacgtatcttccatcctccgattctttaattgcatatattacttcgtatgaatacatgatttttaattgtactgcatttctttctgatcatttttgtgttccattctgttacgcaattggtatatatgcatgatctttcttaagatgcttgtagttctacgaagagaaggaaaaagagctggaggcaattgacgattgttctgaagccctaggcgacgtggattgtgatgatgaggaggaggaggaagatgaaggaacatgtgaggtgatgatatctactgtgtgacagtctccatttgcagcacagtttgagattgatcactattcatcattataataattaattcttggcttaattggttgcatctgttcatcatctgcagctatgcatgaatgaagggttggcaccaagcccgagaaaccatggcgagcacttgtgcccagtgtacctggagatggtaaatcagcaaattctggaggaaataaaggatcaagaccttcacaatgtaagtattcatgattagttcgttaagtttgctttgtcattttttttcttctgattttagtggctagttcagtgtcacacgttattcatattgacagaaacgatgacattagattcttctgtttctacgatatactccctctgtcccaaaataatctatgaacttattaaaggaataaaaaaaagtagcctccacattcgctctcacggcttagaaattcccacattaatcggagaaaaagaaaaacatagtccatatagaaatacaatttataaatagttaaaattcagaattaaaaaataatgaatattggaagaggagactagagtccatatagaaatacaattaagaaacaatagaaattcgaaattaaaaataaggaatattaggagtagagtatagagtacatatagaaatataattaagaaataatagaaattcagaataaaaaataaggaatattagaagtagagtaaagaatccatataaaaatataattaagaaataatagatattcagaattaaaaataaggaattttagaagtagagtatagagtcaatataagaatttaaaactaactaaaattcggaataaacataataaaattaaaagtagagtttagagttcgtataaaaatacaattaacaaataactaaaattcgaaatttaaaaaaacatgggaagaagagtctaaagtcaatataagaatacaatttagaagtaactaaaattcgaaattaaaaattgaagaatagtgaaagatgagtttagagtcgtccacatagaaatacaattagaaataataaaaattcataattgaaaataaataatatcggaagaagagcctggagtccatataggaatataatttacaaataactaaaatttgatattaaaaataattaataattaacacgtatataaaatacaatatgaatattatacattagtagtttcgtaaagggagtacaaaatttaaaattatgttgttattttattaatatatttgaataaataattgagaaaacatatatgttattatatgacaggaaatataatgatgctagccgcgtaatctgtgcgagccaccatactagtttaatctaaaataagatggtgacgtacgcattctaatgaagttggtttgaaaatcaaattaattattggtatatggtatattgtacatttttgtgcttttgtgcaaaggaggacaacaatatttttgaacgttttggagtcatggttgactgggaggatgaggacgaggacgatgatggtgaggaatttgaagaaatcaacaaggtaatttgatttttgtgtccagccagtgtaattaaacaacagcatatcagtattgtgatttaaattagtcgttaacataatagattactaactaatatctgtaataatgttagaagtttattcagcttctgggtcatggaaatgaacttgctcgtgaaataatggatggcgcccccgctgcttgaggcgcttgccactggcggctgcagccgataattgggctttgagttattgggcctaactagccaaggcccaaggagcggaatgcatgggcttcgatgggaccggcccactttcgatcccctgctttatgctccagtttcgagcaattcgtgtgttaaaacaacggttaatgtgttcaacggtgtattgcttgcttgtcgcctgcttgtaggtctttgcttctggtggtacaatttcgtcgatttatgtgctacattatatgcaactttatatgaaacaatccaattcttgcacaaaagatttccagcacatcagagcctcaatttattgaggccacctttggaagagaggatatatatcattaagagtaatttcacataaattaaattagttttaagcctcatttgaaacaaatgaaaaaccatagaaatttcagaggattttatcccatagaaatcttatggaaccatttgaaacaaataattgtttcctaccaattccttcaaaatttcaatgaaatgaaacattctagaataatatttggagaaaaataagtataaggaccatctcatgtttttctcttgtgtttataattcctgttttttcatttgtgctaacgttttaaaacttttcttcatttcaaaatcctatagaaatccaatgagtatgacattcttctttattcctattttttttcctttatctgtgtttctcaatcccgtgttccaaaagcctttaattaaagaacttgctactactaaaattcatttactactacagtgcatgagggtaggtttggcacacaggttaggtcagacatgatgatagtcgaaactgcagcccgctagagtactgatgctgagctcacattctctgctcccaatgtcctgcaccaaaattgacattcctaactgccccagctcactcatcacggtgagagcaagttcaatagtatagtcaactactagcttcaatttatctataaccaatttaatagctcattcatacaataattacatattacactattaatatctagtcccacctattatagacacactgcgtcttagagtctgtgctacagctggctattaatttgtagcccactgctcttctctctcctgatttatcttcttaaaatatgtttgtagctgacttatagcctgctattgtacctggcttactgacactgcaacactgtgcaagcttagctgtgtttgcaggacaaccatttccaaggcttgttccatcctgtccctgttcatgttgctgtcacaaaaatggagctgctcctacactggagtagtaggcatgatcatttcctgtttaccaaatgcatgccttttcagaggaagatcacggcaactcacactccagtttcgctctgtccgtccgtcctcctgaccggagttgtacacactgtcactgtgcccatacggatgcaggatcacttccaaaagtcaacacgtcagatcagacttgaagaatccaaatcttgaagccaggattattctgcaggttgctgccaatctctcctgtaggagtatcttcgttttaactgcagtgcaagatgcaggggctgtgtttaggccggtcannnnnnnnnnnnnnnnnnnnnagtttggagaaagttgaaagtttggaaaaaagttgaaagtttatgtgtgtaggaaagttttggatgtgatagaaagttgaaaatttggggtagttgggggtgaactaaatacggccagggtgtgtttagttttacatcaaaattggaagtttgaagaaaaaattggaaatttacgtgtatagaaaagttatgatgtgatggaaaagtttaaagtttgaagaaaaagttagaaactaaaccatcatgaaaacggcgagaagaactgaaaattcaggtgatccaggaggaggaggaggatcacaagtcaaaatacacaggaggaatacaggagccaaaaagatttcattgtatcatggcctcacgaaagacacaaagtttgtaaaggactgtgagtcaaaaacctgagtcaaacacagcctaaatgacaggttgaaaattttaggcatcttaaagaacagtaaacagaaggccatgatgcaatgtttcacatcagatcttggttccgaggagatgtgccatgatggtcgttgctgctgttactactcctactccatactagggtcattgacgaacagaagacatgcacttgaatgctgcctcatcatttgttgatgccttgggacagtaagagatctgttgcaaagatcagcaaagagcatttcgagttggaactaaaactcaacagtgtgttaaatgttctgctttctgttttgccgtcaagctagctgctacagtactacccataggctataaaagcagatacaatagcaggctataagccagctataaatatattttaaaaagataaaaaaaagagagagaagagcagcgggctacagatttgtagccagctgcagcatggactttaagacgtaatgtgtgtatgacagatagtaccaggtattaatagtatagtaagtgactattgtacgaattggctattacattggctatagatgatttggagctaatagttggctatactgttgaacttgctcttagctgcctgtggtttcatcattgaacagtaaataggagtattaactgttaggatgggcattgttcagcctctagtcaaacttgatttgaaagcagtttcaatttcacggtaggatttgtttcactagtgcaggagtggtgctgtgtcctgcattgttcatcggcaagctgctcctagagtagtttgccactgatgaagtattgatgttttggccataaaatgaggaactcactgctaataccagagtgctagtatctgcataatgagggtttccgatatgtatgtgaataaaatcatactactgtatatatgaagcatgattgatagactattcaaaacaaaatcacagcaagttcagaaatcaagagttgtgaaacctgcattgttcatcagcaagctgctcctagacagaaattcaacacatctcacatcaagttattgctggtactagtactcatgatcagagagagtaaaggcaatctaggatgtggaagaagaagaagaagaatttccaagaagaagaatttccatcgattgcgtatctttggacggaacgtgaactgcgtcatcaattcatcaccatcatgaccacattttcttgacagctagctactcctccctcctttaccacagagatcgagttaaggccttgtcccttgtgcagttcagttgtgcctgcatttctgctgttcttctgcaggaaagaggaatactgacgttactctcctccgatccatgcctataaatacaggcacccccattcaaacccaaactccacagcacaaagaagccaagaacaagttccgtttcaagttctctctcgctactcttcagagattagagattttagaggtgatacttacaagcatcatagttctagctagtattagcatgcaaacatcttttctgaaatgatcgaaattcattctgactataaatgtttttgtctgaatttcatttgttgatcgatgctgcagcagaagggaaggaagaggatcgatggatcgggtgacgaacctgtacctggagaacctgtgcataatgcaggagaacgagcggctgaggaagaaggcgcagctgctggacaaggagaacaaggcgctcctcgccaagctcaagctcaagaacaacccctccaccgccgccgccgccgccgccgcctcctcgccgtcgtcccagcagcagccagacgccggcgcctcggcggccgccagcgtcgtcaaggccggcgcggcggcgccgtcgtcgtcctatggcgggaagaagaccaagtgatgcagctagctagctcgagcatgcatggagatgatgacgtggatcttttgtaattagttgcactagcttaagtacattagcatatttgatgttactagcatgcaatgcatcatggagcattaacgatcgagtgttagatgatcaccaggtagccagagcagcgtcgttttggactaattaagctagctattagctaagcttgcagtgttttgtgccagtatttgctatcttcctgctgcaagtatcatgagatggtcaatgtgctaactccagctctagcacttccagtctagtatactgcgtgctttgcaccttatggaagtgaaaacctttatacgtacttattgttcttcaaatgatggataacctacagaaatggtgtaactctacttttagatttaacacaaaatgcggtcttaatgatctatatgcggcattctcagccaaatgtttcagcgagtgagacctgaaaactgcaagctagctataagtacttctacatgtgcataacaaacaggccatatgctctctttctcaaaaaaaaagaaaagaaaaaagaaggccatatgctcgctaatgctaactccagaacttcctttgatttgtgcaccaatgttgtgtgatcgactgatcgtaagcaggagtactgacacctgatcgactagctttgagagagagagagacctttttattaaaaaggaaattacggatacctacaccattggcactgtagggcttgtttattttaatgtcatttttaaccatgctatttttagtaaagttaaaaaaaatattgtttactttgttgttaaatttggtaaatacataagaaatcctgctaaaattttagcaatattgctatcttgctaaaaatttagtattgccaaaacttaataaggtttattttggctataatctgaacagctcttaaaccctcggatcttacacaaatgttgatctgtgtgcaacgtttctcacacccatgcaatgtttcatagagtgagagacctgcagaaaaccgcaaggtgcaagctagttttggccatataggagtagttcattatcacttcgtcctaaaaattaactgaaaaggatgaattctcattaccgtttttgcaagaaaaaatgctactcgatcagagctataaaacaagacattacttaactgtcgagattattttggtattagagccacggtcctgtagcaattttggtcgcaagagataatactccatcgttagagcatctccaacagcatggctatctcactcttcaaactaaaatttagcaattttaaattaaaaaaagactccaacaaattagctatctcacttttcaagctatatgactggccaaactgagttccttgctggccaaacttggccagtcaaaatcggctggccaaccgcggggcccacaccgtttctcttccccgtctctctgtacactccgacgccgccccagccccttccactgacgagccggcgtctcctctccccgcctcccctatcgtcccccttccgccatcgcccgtcggagcggaaacaacaacgataacgaagatgatgcccctctgtgcagcggtggcgacacatcccagctccggtatagcccttccagtgttgccgcccgtcatcttcggcaacgagacgttgaggatcggagatcgcaagc

SEQ ID NO: 5121 - DNA, 1087 bp, Oryza sativa
aaggactgattacatacttcaaatgcgccagtgaaactccacctcagttggtttgttttcagacgaggaatgacaacagatagaacaggcatggtgggcctgtacttggcaattagtctgcagacattacagataccagatgaaatatgaaattagttttgattaaactacaccattatcctgtttatattcacatctttctaccttgcagcgcgtccagatgatgtgaagcaaataatgacagaagccttcactttgatagcagctcgcacctgcaaaataggcaagaaacaatttcagactaagaaacccttgtttcatataaagactttgtgaagcaaaaaacaatggaatagtcaaaaatattttatatgtgcacaataaacgttaagaaattttgggaacaagagaagaaacacaccgcagaagaagcgatagactccaagtgggtcatgggctccccaacatatttcacagtccgcttgaagtataaatcttggttgaataccttctctgcctgtgaaacaatggacaaacaaatatgactaaatcatgttactaacagactgatatagacagaaaaacaagaagtgaattttcattgtacttgttgaaaattgtaaagaaaaaacataaaagtagaaagaaaattcacctcagcgcaaattttgcccacaattgagatagtctcaactgggtacagaccacggagagtctcagcaccaaggagaatggcatcactccctgaacaaaaaatatatggttcagatttttcagaaggcaattaacatcatcaacaactcaaacaactcaccgtcaagtacagcatttgccacatcagtagcctccgcacgagtaggcctgaggttgtcagtcatactgtccacaacacgagtaacaacagcaggctttccagccatgttgcacttgtgcagagcagacttttgaaacaaaaacacctacagtaccagaagttaaagatcagtaagcaaattacatatcaaattgaaaacagagcaattcttgctaaagaacttgaggactctgccactaaaagcttcatagccaaataaaaagaagcagagta

SEQ ID NO: 5122 - DNA, 4329 bp, Oryza sativa
gattatgtgcttggattagtttgagctcccgagcacgcaggcagaattcaaatcgttttgcagtttccaccttgatacaagtaccccaaatgatgctcaaatcaaatgctaaattgtactggtagacctaatagtgaaattaattatgacatggcatccctttctccctttgttttgatgaatccggagaaacaagttcaagtataaatcgatttctgaatttgcttcaactgtatagaacgatacagttgatttctgtataggtctacaggaacaatcagtaaccatatggattatgtctattgtcctttttttctctggcctgctttaaaacaattcacttccaacagaaatctggaaaagaaaacccctgcatgcctggaggctggagtcctaagaggagcttaaatggttcggcgtgctacatgatagtggatactagacagcgaaaaatgtagctcacgttgtccctttccttctaatcaacaaacacgcactattggaaactgaacattggatatagtacttcgaccctacattacaacatgaccagtatagaaccagaatttgtattaaaatagggagtactttattaaacatgcttcaatttccctttgttcttaacccgtatcctggtttttcaggttcaagtgataatgagataactgtagaggaagcttcttttgtgcatactgaacctccgcaagatggctctgtcccacctgtggtttcctctaatatggaggtccttcatgacaaagttaaaaaacaagtcatcaaagaaggccatggcaagaaaccatcaaagttcgcgacgtgcttttgtatgtcataaatggtttgatcattccctatatttatcctggtgatttatagaatgaggctaatatattccaccttcattagcatttgtcttatcatcacatttcatctcgttgttgtttctatggaagttccataataagagaacttattctctgtgtatcaggggctcagaacatacatttgtaaagttacatgtactaggggctcagtatttatgctctgttgtactatctcctagctctctgtttcttttttgtacacttctttttaactaaattgccagtactggaactttctgtggaaagagcttcttattcagataccagaaatcatgaaatacttaacagtattttaggatgaacaattcgatgtacgcacagccttctctaacaccacaggcttactaataactagtgtggcacatagcagcaccaaactcataacaacttagagcaaatgatatttaaaactagtcatgcacttgtgctttgctatgaatcatcagctttgagcacttcttaccaagtggcacgtccatcatttgtataagcatgtcaacgtctgtctattacagatcaatcttccattctcagaccatgtatatacttattcagaaggagagcatctgcataatgtttgtttctgttttttctgttacagtgcactatagagcttgggttcaaggctctctgcataaattcgaggatacttggcaagaacagcatcccattgaactagtaattggaaaaggtgaaaataatgatacttcattttatccctagttcttctacactgcatgcatgccttctatagatgatacacatcaaatagcttactcttatgccattctgatcttatagtgccacaaataatctatgattctaataagggttttgaaaatcagttgatcgatcagcaactttcaacttgctattgatattctagttttttttttgggtgtgtgtgtgtgtgtgtgagggcgattgacaacttgcaaggacataaagactaaatagttatatttttattactaatatatttccccccctgttttctgatggttcactaaatatacaatacaggtacagggtaactatataactttcctacaaatatcttttggacactcttgagcatgtagagtatacctgggatttatcagtgattatcacatatggaataaaagcctttttctctttttaccgacagagaaaaaacaaatgtctggtttaggcattggtgttggtaacatgagaagtggggagcgtgcactgttgcatgttggctgggagctaggctatgggaaagaagggagcttttcattcccaaatgtccctccaatggcagatcttttatatgaagttgaacttattgggtttgatgatgtcaaagaggtagggaaacatccttcttaccatctccacccaacataatgcttatccttattatttctgatagtaatctgagactattgttggttggtttcattttatttatggttttcaaggtgatttggatgttctaaggaaccttacaaattgtgtacaactgcaggggaaagcccgaagtgacatgacagtagaggaaaggattgaagcagcggacaggaggaagattgagggcaatgagtatttcaaagaaaagaagtttgaggaggccatgcagcaatatgaaatggttagttgtccttcttcaactgttgtgagatgattctctaatcgtaatcctctagctcctcctctttacaggcgattgcatacatgggagatgacttcatgtttcaattgttcgggaaatacagagatatggccttggctgtgaaaaatccatgtcatctcaacatggccgcatgcctaatcaaactgaagagattcgatgaagctatcgcacagtgtagtattgtaagttttttttgtttgcataaagttcaatctattaaaactcatgctgtcacactcacaccagtcggtttgtgtatagcttcagatgaattaggattttgatttgactttcagacaataaagacatacaacatgatattattatggtaactagacgcttggaccaaaaagtgaagaatatagtgcagttgcctatattttcctcaacttatttttgtaagacaaccctcactaatttcatgacgtaactgacctggcaattcatcaagtgaagaatttttccccctttttccgaaaccgaataattattgactggatgatgaactcataatcctattcttcaggtgttggcagaggatgaaaacaatgtgaaagcattgttcagacgaggaaaagcaagagctgaacttggtcagacagaatcagcgagggaggacttcctgaaagccaagaaacattccccagaagacaaggagatccagcgtgagcttcggtctctcgcggaacaggataaagctctgtaccaaaaacagaaggagctgtacaaaggcctctttggtccaaggcccgaacccaaaccgaaggcgtcaaattccatcgttcgcttctggcagtggctcgtgtccttgattggttatctcataaaactgttcaaacccaagaatgaatgaataggaacggatagtgcagaactgacgatttgacgaccaaaacatggactcattgtactgtaggctgggaattctactacaagtagttgggagtgttgaactgcacgcaatcggtgtcaaattctacaatctctcggcatttttgtgccttcagtccttcactgcattgtgacttgagctttgggagctaaaagttcagacatttttcctatgaacaatacattgcctttatggtgtcaatgatttggtatgttatgcggtgctgaatagttgaatgatttgttacgattattttgatggtataaatgaattaattaaatattataaagttaaaaataaattgaaaaccacttttctaaggaaactcatatatacaaaaagtattttacgtaaatcgcaaaaaattgattataagtcaacgcttattagaaaaaaaaaacttacaagtaatattttggcttaaaatctaattatgtaaaacaaactacaataaaaaaaaataaaaatcacctctaaaaccaagttttaattcaaagtttagctacggctaataagctgaaagaacaaacgatagaaccatataaatttgagaaacatgcatattcttatttcgacctggtttagttcccaactttttcttcaaacttttaacttttccatcacatcaaaactttcctacacacacaaacttctaacttttccgtcacatcgttccaatttccattaaactttcaattttggtgtgtttattgccaatgtttgaaatagcacatctgtctctcaaagttggcatttcaacatttcaggtgccagcaataggccaacctagcaaagccaatgaaagaaatcaaagaaattattttcctaaaaaaggaaaataagaaaaaaaaacacattctctttgctggcgctgacgatggaatacagcttgg

SEQ ID NO: 5123 - DNA, 6008 bp, Oryza sativa
tactatgagaccttctttgatcacagatcttacaatgtagtttgcgcatatagcggaactccatacctttatacttattgggtagtaaaacttaaagttaaatggcatggattctacagtgataaatagaaataaccacacaaataattaacaaccaggattctgaggaaaaattatctgagcctcatgggaagacagtttggtacgtcccttggatgagaacatcacaggtaattttcgtaccccattttgcattaattactagtaaattgtttgccagtggcattactgatcaataaaagctgcatcacagtcctcatcctcattatgttacttgtagactaatattttaacatgaagtcagtctgaaagtaggaagtatatgcattggtgccactgaaatatttagttataggctgagtgcttcaccatgaactttggtggtatggtaggaggtaaaacttgtgctttcactgcgaaacatatgaaaagccacaagtattttctgcacattgcactgaacaaatatatattctgccttatgtagttatgtacatctcaaaacaataccatcttcagtttattttctagggattgtgtttgaactgaagtagcaaatcactccaggcccagtttctgtcataaactgggtcaattccttttcttcttaatataaaacaggaacccctgtcctcctcctcgaggtttaccttggggcaaaaaaaaaaccctgaagtgtcgtaagttcaagcatgataatgggtcctgttgttttagtgatgagatatatagaatatgtaatactctataagttcattcatcaatacccatgctcaagtaaatcctatttgtttgaatgataaaaaagttcacggtttagttcaagctctttattataagtgtggcaagagcaagagtgcaagaccttggtcatgatggaaaaggtgaaaaaagaactgaaatcgtcaagctgacacagttcatcacaaatggttgcaggatttacctgtacttaacttgaatttgtcatagaagattgctcttatctatcatcgtctgcagaaattttgagttaggttatcgcgaccggtgtttgatttcagagctcttcattaacactttaactctgtaacttgtattggagtaatggactgaaaactgccaatgcccagttctgtcgattcaaaatcgatcaactgggttttccttcttgattcactgattcattcacacgattcattaagaaggtgaaggtatgcgactcctgatatttaagcacagaatatttcacttaagagttactaacatccaacaactaatgaaagcacattgttgacaattgacaggacatgaaactctttttttttttcctttttccattgttccccgacctcagccaagttgggcagctacttgccttggaagggtgctcgaaggccatgtgcaaggttagattaaacaccatattattttgcagcctactataggaaaaggttctctaggtctgatttctctgtttgttttcactttaattatcatctggcagctttataattttggttcctgttttgctttcacctcttttgcatattaaaaggtgtaaagaacagaggtgtgtgagcttctcccgccactttgttgtttttatattacatgaagcttgcaaaaacgtttcgtatcagaatccccactttctttggctaattacacaatactaccatcacgtctctttaatcaaagcttattggtaatcgcctctattatattaaaccttgggaggcgagttttggcttcttgtgagtactcttgaagcaagtacagctatccattaatccataccccaactgtcaatatctcaacaaaactttccttatattttcctttcttgttatggcctaacaatcagaaatgtgttctttggttcctgattgttaaccgtttagtttagcagtctaacataaaaaccaataggtatgtctaattacactagtatcagtacatgtttgccattagagggagaatccttgttaatgcatgtttcagtatctgaaatgcaataaatgcaatatcttttacttacagtgtactacattgcgtatccaaccattgatccgcagctcacatatctccccatcttttgcactcgccactgcacaaattttgctccagctagctgttgtactgcttcacagagttacagcgttagcactgtaagcttttgtttccaaggaaagggatactgaaactccctctcacccgctcaagttgttactactctgtagtctgcacaactaatttctctgcaatttgttgagtagtattttacacttgatactccactgtttttgtttctgcttctcttgtagtctggtgctccttaagttcttttaccaccagtaggagtttctttctcattgtcattggggataaaaaaaagggtatggatgggatagcaccggaggccttgtttattcatacccatctatttgttttataacaacgaggatttggagcttttacagttacagcgcatcatggatttgactgggctttttttatttttcaactttgaattaactccagctactacactgatttcccgaaaggcagagctttactcctttcagtcttatcccctcagcgccagttggacagctgttcaggctgttttttttttaacgaatggctgattaaaagaaatacagaattggtttttcatggaaaggtatgcagacctccctcatttgctgtttctggagtacgttgggctagtgtttggagactgaccaataatactaggaaaatgggttatgtgggatttttttatagttttttttacaagaactgaactaactcatgaatattcttgcattccaaataaatcctaattagttctattgtctttttacactatttggaactgtcaaagattgagacaccgttctatcttcttccatgttttttatatgagcatgaaattcaaaacacgagaaagatagggaatcatttctttcttatttttaactatgtaacgaccatttttttagaataaccgatgctgtttattttactatataaaatttgaccatggataggaagattagggaacactttaattttttttgttaatactatgtaacggcctttttttccggaataaccggtgttgtttattttactatataaagtttggccatggatagaaagattgggaaacactttagtcttgtttaaactatgtaacggccttttttttttggaataaccgatgttatttattttactacataaaatttgaccagttatagatttaaaattgttcaacgagtgaattaatgttgttgtaaaatgattcaccgagtgaattaatgttgtattgtattaattctagattttccatgcaaattaaaacttttaagtttttataaaaatctgttactaaaaatagtggccaaagttttactgtaaacacaatgatttcagttatttaaaaaggatggagggataacttgctgtacaatagctattgcccaaagtactgaactgcagggcacatcctccaatgtgattgcttttttcttgctgactttatgatataaacaacaaagtgtgaaggaaaaaacaggggaaggaaagacatactggtaaagaagaattagacaaatatacagtggtacaaatttagaataaaagaatcttacttggacatttttatagggtttgcatagcagatacttcctccattcttgaataattgttactgttaactacaaccgtctcattctaaacagaaattacttttcaattattacattatgatggatcggagttattcgcttatatttatgatggcatatacttcgataatatcacatatttttaagtattttttttacgaaaagacaaactgccaagtttaaatttgaatagtgtaagggtcaattttattcgagaatggaggaagtaactagattcaataagattacagcatatgacaaaaaatattggccttaaaatgtgccttatgctgtcatgtagtcatgctaacaaaaaaaatgcagactagggttaaatattatttttgcatttagaaataattatattggtattaatctgaagttttaatttgttcctacatcagatacatttcgcatctttatttttctcaccattttttctgaagacatcgtgcatcgcattggttatgtctactgttcaataaaatggaggtacgtactcgtatgctgtactacgtactccagtacactttttttgcagtccaaccaatcagccaagttggtcaaaggagagagagcgaaagagagcaggaaccccgccattcctgtgcagtttctgccccaaaaatctcatttttaatcatcccatttttttcccctgtctttaaaaatcttcctccatgagacttcggtaacaacagctactactggtgcctggtagtaaccagacacagagggaaagcaaaacaagagtgggtgtctcctgttgtctgtcttcctcctcgtttgagctccaagcaagcttagccaagaaacaccataaagaagagagtgagagagagtgtgtgtgtgagaggaggtgagcttctctcacatgcacatggagggaggggagggcattgctgtagcaggtgcaggtggtggccatgaagccggcttcggtttgttcagagcggccgatgtgaccatgacagaggcgcaagaagcagccaaggagtaccagtcttctccctcctcgccgtcgacgtctcctactccttccccgccgccggttgctgcctccggccatggaggggaggccgctgcaacgccgaccatgtggagtttgggcggcgagaagatgccgagtgaggctgcaggggacaacggcatgcagatgtcaggccacagtgagcatgctagcttgagctccggacggcgtaggggccggccaaaagggtccgggagacgccagatcctagccactctaggtcagtatctcccttccaaaatcccaagtttattatacatttttttgtgtgtttggaatatactcatttttccatttttgctggttattttcttgctatattcgccatcgtttgtggatttttctgtttcattgccttggatggggtccagtcagggtgatgtgtaagctcccttttgtgctgaaggaaggctagctagtcaataaccgttagttagcacagtcctgttctgctgttcttgtatcgcattcgtcccctatttttgttcaagtgattatttttgttttcccccctttcttctcagttggtactaaccttacttttgaagattttgtctaatttctgtagattattataatgcaattaaggttttgtttcacatggtcttgtagtctggttattcagaaaatgcgcatttgcttgactgattggtattctgcaatgcttgtaaaggggaatggtatgcgctatcagctggagggagcttcacccctcatgtcatcatcgtaggcacaggggaggtaaaccctctatgttattattcctttttcacaggtcatgactagcttggcattgtgatctggtagcgagagaatgaacactgactgttcttgtgcaatccgttggtacttggtaggatgtggcggggcgcataatgtccttctctcagaagggtccacgctcgatttgcatcctctctgccaatgggaccatctccaatgtggcattgagccagcctggctcgtccggtagcaccttcacctacgaggtatggaatggagttgcatcttatgatggttctatgatacttggcaaagttgtgatctttgacctgctagcttttgttaacttttgatgggtatgtacaaagtcctgaataagctgaaccattttggtctatttagtttggggtcttctctaccaagtcttttaggtcccatatcaccactgtaataaataacggagtaaatacgacaaatggttttcttgcctaaatgttctatcagggggtatatttcca

SEQ ID NO: 5124 - DNA, 5645 bp, Oryza sativa
cccagatgaaaaagtacggccaaaagatttttctatgttatgttaataataaataaagaagtatttattggtaaaacttgttaatattgttataaaaatgtattgaagttggttgttgcgcaatttcatatgttaagtgaggtattatttgtaccttattcgacgtattagtactcggataatttatataggcctatcgcagtctgggtcgtagaaacattatatggacttaaacaaggagaattatgtaacatgaagaaatagtagtacaatttgaacatgatacaactatttgcattgcggttacatagatgatattagattcgaactaggagggaggtagtgcaatagttgaacacaacgacgatgtagtaatgggacaaggaagcatgacagtagaaatttcaatatgccaagttgtccgataatagctaacccctacgtgaggatccctctcctctctcaaaccgcgtttagtaaccctgtattgctttggtagttcaagctgcacaacacggctaggtggagttagaacccttctgatgtctatccattctctgtattgacatctccttggtggttcctgggaggaaagaatagatgtaaagcaagcaaagttagtaaatgttgtgagaaaataaggattcatgtaatcaaaatattcttaccatgaaatcgtcgtcaagaatatttggacaaacaaagaaccttcgacccaatgttgtaggatttatggaacgaagaacctgacaacgatcaccacacctgcatcttggatgggcttcccatggagggagtgccgtagttagcacccgccagtcgctctgttgttcacgacattgtcgttcataagccgcttttctctgtaagtattgctcagtactttcggatgcgaaataccagcgaccttcttgtaaacaagtggttaggtcgagaacgggattttctgtatcgacccactcgatgtatgcacaagccgtagtgcgggtctgccgaatagagtagtgttacgaagaataaagcgattgcccatacggaatgaataagcatatgcagataataaaatacctcacggtcatagttagggcacctaaaaaagcgccttcctcgaatatcaggattcctcgaagccattagttggcatcgatcaccgcataggcagagaggacgctggcaccaaggtggtagtaggtatacacaaggatcgctacgccagtttggatcctcaacacctcggcgtctagccattgacgaaagccggtcggatttgtaatgaagcaagtggggaagagagtactgaatgtgactgagttctgaaagattgtgaggcctcactcgttaaggcgacttatataggcgcaaaaaatcgagtgatacccctgacatgtgaacgtggtggggtatggtgggtacgcctgattggcgccgaaagatacatgcatgatcggcgccgaaagttacattggtcgtatgcgccaaatggcgggcaaatactcgtatcacacgtgaataaaggaggctgcatcggtgcggcagaaagtagtcgtgcatgcgccgaaaggtatcgtgcacatataacaacaacgtagtcattacacaagcatacagtactggaaagtgaagcaagtaaacaaagagaagactgctctactggccctgccccgcgccacgaccacgcttggtcctccgggcctgtgctcgcacgtggttctgggagtaggtgaaacgatccggtggcacagcacgggtagcacgagtgtcccgcggaggagtggcctgcgcctggtcctgcgtctgcaccggcagtgtgcctcccagctgtgaggggtcgatgacgtcctctgtcgagcctgaagcgacgtcgaagtcagtgatgccgaagaggaaggtggaaggcaacaagtggtccgacgaggtcccagcatggtccagtggtggaccctgactcgacgtgccggctgcctgtgacgaagtcccggtgtactgccagaactgcgctgagtgcgaggtcgacacagctgcctgagacgctaaccctgcagcctgggagaagtgggcggcctgcgtcatagcgaactgggcgaaacctacacatcgacaacgggacccttgtaagctaagacataaaatgtatgtaaattgattgtcgaagtaatgttgtttttttaagtacctgtggggggcacaacagaaggcctagccgaggaaggcggggtgctgaacggtgcacgaaaccctgaagcaatcggcaagtgaaacggctcacttatatgtgcgaggcatgtacagaaatagtaataaaaatacttacctccgtgcggagggggagtcggcctaggaacgtgcgcagctggacggggaccagtcggtacggggggccgatgtacagctgcgtctgcccgagcaacgtcgtctgcacgacaggtgagaactcggagaatcgagcgcatcgactccaccatccgcgtgtacgtcgtcaggtgctcctctacgggtaccggaatccccgcgcctaaacgttggatcgtcgttgaaccgtcaacgacgacccggttgatgtcgtcgacctgcatggttaatttgttcgtaaatattcgtaaaatttgacgaagagaaagacatgaaaacataaaggaatggtgcgatgcagggtactcacagcacgagcgaagtcctggttgcagtgtctggcatagaggtctctagtgctcgcaacgtggggctgttgctccaagggagcgaaggtgaccctagtacgggtgcgtggctggtaccagcgtaggtaggccttgtacgactcctcagtgtgtggctctccctcgtggtccacgacctcctcggttgcgagcaaccagtcctcaacaaaagtcgccaacttggcgggccagtcgccagctgactgctgacccttgcgcgagtacctgcgaattaatgtgtaatattagtgtgaaacgacagatgttacaaattattgtgaacaggcagattttaatgcaacaacggaaggcgtagtgcaagatcttaccggtgaacagcagctgggacggtggtcggaaacggtactggaaagggcagacggaagccgaactgccgcatcacgcggaaaggggcgtgaggctcaacgcagatgtcgaagaccatcggaaccgtggtcatccagtacgcctggtccctggtgcagagtgtggacagacccaacggcgcacgagcctgggtagccgtggcactgtagggctcccacacgacgtcagtcggcagaaggcggtcgaactccataacaaactcaggatacgaccgcctaacctggacgtgagcccatcggcgctgcaatacgagacgatcgatgtgatgtacaatgaacttagcaattaacttaacaatacgataagatcgatgcaacgtacctgacgtcggcaccacagagtacccatcgtagggtagtcgacctctggtcgctcctcatacagtgactcctcgtacgcgtgctggtccacctcagggcggccgatcgcaatcctatcagctgcccagatagaaagaaagagagggcacccaccaaaggtcgcgctgggatccgtcttcgtgcaagactcacaaagtgcacggtacagagccgccaacaacgcggaaccccagctccactgaggcacctcgcctaccgtggcgtcggcgatgctcctggcgtagtgcacgagtcccttgtcgaccgcgtgcccgtgaccgcaacagaacatcacccagccaaaaagccagagcaagtacgcctccaaacatcggctgtaggagtactcgtcggcctccgcctgtagctgctcaacctgcaagccgtcgataaaatgttaggcaccttaatgcggactaaatatgtaatacgattgtcatttcggtacaaaaacactcacggtgaactgaagcagccacctcttcgtaggtccggtgttgcggtggtgtgccaacagctcgagcgggaggtgcggtgcgccctgtactagtgcgaaacgtgccgtcagatcgtcctgccagtccacagccgtggtcactggcccaacggcgtctcccgcgagcggtagccccaacaagtacgatacgtcctgtagggtaggggctacctcaccgcacggcaagtgaaaagtgtgcgtctctggcctcgatcgatcgaccaaagctgctaggagggacctgtccatagtccatcgtctggccgggtctgcgtcgccggccgcagcctccaccagccgacacatcggtaggaggccggcctcacgtagcctgcaataacaaattaatatgtcattataaaaaatattacagtgcaactaacttatagtaaaacactgttcgtacctctcgacaaaggagtcgtgaaccgtgagtagctcaccgcacgtccgtgcccagaacgtcccaagctgagccccctgcaccacagtaaggtgagaccggtgtcggtgatctatcgccgggtccaacaactgaggtgtatcctgacgtgccatctctgaaaaatatagtgtttcgtgttagaacaattcaaaaaatagtactgtaaaacaaaagataacttgcaaaattatgaaatagtaataaaatcatgagattaattatgtacaacaagagtacaggctatttaaatatagcaaacgttactaatggtacataacgatgacgtgcaatttaacatatatgtagagttcaataatataacataacattacgtgtcgaagtccgacatacatcagcatacctaaagacgttaggcgccttagtccgacgttacatcacgagacctaaagacatgacatgccgaagtctgacattacacgacgaaacataaacacatcgataagttcgaaacgaattacaagcaaatccacatgccgacatagaacataagaactacaccacgtagccagacgtggcacgacgacgcctaggacatggtcgagtggaggtagtgccttcacccgtagggcgagctccatctgctgctgatcctgatagtcctgcctccgccgcacttggtttctccttgtctttaggacaatgcttgtaggtgtgcccatgttcatcgcatttgctgcaacgcttcaccctgccagcctccgactcgtccatatcgttgcggatgcgacgagtcctcctccttccagccttgcctcggagcttcgatgggtcaggaatattgagtacttcatcgttagtctctgtgaactccccagctatgccgaacccataaatctcgccgctccatgtatgatatattgcttgcttactgaagtactgtgacacatatactgcatctggtatgccacactccgctgcggcagcaatgacatgggtgcatggcctgtggagcagcttcggctttgcacaagagcaatgacatgtgccgtcggctttgagaacacactcctgcttcactctcttgcggtagatacccctgcctgccttattttgacatagtatctcaaacctgtgctgttgggtaccttgcactagagctcgatgtttcatggcctttttacgcaactcctctagctttttctgcatgaaagctccaaacaaaatgctgttgttcggcatagagggaagaactgcttggaaccgatccctaaaatacctgcatgtcccatgtaaaatgaact

SEQ ID NO: 5125 - DNA, 17778 bp, Oryza sativa
ctactttcaatgtcagagcgcatactttgacgaaccacatgaccaaactgaatctcaaagttgtcacaatttgcactacagtcatcttcaagcatcaaattatctagcattttcatcaccttcagtgtactttcttctgtcatggaacatcggaaaaaagcttcactagccactgttcgtagttgacgatagcgttccatctggtctgaccatgtgtaaacttcaccatacctatctgaaggaaatgcagattttgcttgcattgtccaccgtcgtgctatgcagaagcttggtatggcctctaactgtaaataactcaaaactgcaaatatgtgatgacatggtatgtactgacactccattttccggcaaggacaggccatgctacacagtaatgcttcctcaaacatgcaggtcacaatgacaattttatcttttccaatcaaatgcaatacataccttacacattggtcctcttcgatggtatctattacctctcaattgatgcccatgtatatctcaaccttcacctttttgaaaattttaggcgtgaacacacgtgctgcatccttctcaattagtgtagcttcattagcagtaaatggtacctgattgtgaagcctttgcatccaactctgcctcttggtgatggatacgcgacaaacaatgttcataatgctccaccaaaataactaggctcatcttacgatccaacaacctatgaagttttgagttcaagctttcactgcgttgattgctcttcatgctgagaaaaaccctccctttagtgtatgttgctgcccactttttccttaaattatacatcctcttcaaccacttattgtcgtccgataccttatgcttaatcttaaactctacccactttctttcaaactcatcttcatcaaactcactatgcacaagtgttctaaaatctgaaagcatggctggactaaggttccgtgccatattttgctcaatatgccaggtgcacaacctatggtcagaattgggaaacacatgtaggattgcccgacgcattgcattgtctccatcagtgatcacagacttgggatgtttctgacacatacaagttaaaaactggcgtaggacccattcatatgtctcaaccctttcatctgaaactacagcacatgcaaatatcacagttgacccatggtgattgaccccaacaaaaggaatgaaggggagattgtatttgtttacacgatatgtgctatcaaacacaacaacatcaccaaatgcatcataatctatccttgattgcgggtccgaccaaaatagcctcttcaagcatcctgcttggtctatctcgtaatcataatagaactccatatcatccttctgccgtgcttgcatgtacttaagaacatggtcagcatctccacctttaatccgtttctttttcagcttcacaaaaaaattgtacatatccctagaagtaaaaccagtaccctcataaccaccatggtctctctccattatatccatcacttgatgctgatgcaaacctacatctctcaattctaccatcttagcctgttctgcaggagttattctacgatgtgagcggagaaatggcacttgatcacctttacacaacggatggttatgcttcgacacaaacctaacgacataccagttaccttctttctgatatagtttaatctcaaactgagctttgcaaccacaacgagttagtgcctgtggctccctacttctgttggaaacatccatatataactcctttctaaatccttcccttgagcatgtgaatctacgatgaattattatcccactaaaacgatcacgcctgcagtaatccttccttacactaaaacctctctctctagcatacttattgtagaactgaaaaccatgcaactcactaggaaatttcatgcctattatcgtagcatactcttcctgctcctcaatactgctaccaccgccttccattgcacacaacacagtaaacctgccaataagtatgaccactttcgtgactacttcatgcattgcttcaactagaaaatgaactacaaacaacaatacaaatgttgcacatatcatttttagtgcttgctaattacctgcggttgagggcgtactgacagctagggcggcggcgtcaatgttccacagttgtcccagcgatgctggcgtcttccggttggatgcgacagcaatggggctgggtggaggcgacggccgatgtgccgtgctagaggcggcgagttgtatgcgacgccgggtggcggcggcgacggccggaaccctcgatgcgacggcggccgcggcggctcgatgcgacggccggaaccctcgatgcgacggcggccgcgggggctcgatgcgatggccggaaccctcgatgcgccggcggccgcggcggctctctgcgatggcgggtgagggaagacagcgacggcagccactacggtctcgatctacttgcgacagcggcagatgcgaacgaagagaaaaaacagaagcagaaggaagagaccaagtgattggttagcagggcggtgattagcggcagggctcaaacccgatcttacgatcttacccctgctaaattaacggctagattagattggtacctcgtacctcatggcacctgctcaaggacagtaaaaatgctcaaatgctccaattataaaccctgatggataggataagagtggaacaacttttgcaacagtttatataatttagttcattcatttggctctttcgcctaattattctgctctccagattgtcgtaatcaaatatcttatcacatcaaatgcaaaaaggtaatggcctgattttttttagagacaaaatggcctagctaattggtggagagggaatattggtgctgaagctgtttctgcgtgcatcagtgtcagtcagcacacaaaagcacaagcgaagagttattaaaaacattcgatcataaatggatccacataacatagtaccagaaatgaaccagtaaattacatgaatcaattaagtgtcttccactcagataccagtatagatgtaccaagtatagtgatactcgtgcacgctggttaattagatactcgttgccggttctaacttagttggggcagccatctgggttgttgtaaactcaggaggtgttggtaagttgggtgagagtgataggcttgcctgtagcctccttgagattgaaggagctgaagccctcggtgagaggttcaccatctccagtgcctgcatcctgagctgcattggatagtccttcacacatccaatccttggaccagccccagtgctccatttcagggacaacttgtggccaagctgataggatcttgattccctcttggatttcaccctctcaagaatcgctttccgcgggacgtcgatggtggctctagggctttgtagcccacctgataaggttctttggtaggttggctttgcttgctctgtggcagcattgtcgccttcggcaccttcaacttgtgaagatgacccagatgccttgttttctagtaccatgttttgtgggagaatcaattgtggaggattggattcaatgatggcagtgatagggctctgaactttattaggaactggttcttcatactaagcatcatcgtcggatgggcgcacctgaatatatacacaaataagaactcattgattgaaaccatgcatttgatatatttcataaatacttagcctgaaatatggtgtaccacgttgttgagatcaactccattctcctctaggaagttcatgaagttgctgaggttctctgcacttggtttgtagtgaccactataggcccagatggactgaaatcagaatagatcatcagagatagaaaaaagtgctgattaatgcacccaaggaacagaatcatgaacaagtcatatgaaaattatcaaaatgttctcttataatgtgcttgcgaccagaagattagataatccattctgatgtccttgtaagtcgtaactaagtaaattgatcaaagaaaaaaaaatctgaagaatcttgtgggagttatattgggaaaatgcgataatgtaagtagatattttgatttagcaacgataaaagataggtaaatttaaatgaccagtttgatccactatacaaatttcaaccacttacgcgaaaatatttataaaatccatccaggcattgtctaatatttgtcacaaaaggatatgcatgctaaactgtcatatcaggaaagtaaaatgcagtgcacaaacaataatgaaccttgataactccattttctgctgtaaacctcccagcagctatggtagcacctcctgctaaaaagctcgagtgctggaacacacctttctctttctgcatgaataaatcagcttatatatatgagtaaatatttatagagatgctaattaagctaccagcttatatgagtaaatcagcactaacgaacacaaaatccttatggcacggagaaaattaaaccaccttgccagcataaagtctcttcgttgtgctcataacaaaaatccactttgacccttggcttgtatcaaggggttcttcagagtacttatggataatctttccttttgtaatgatgtattcatattgctcacgctcttgctgcaaaacatgcatcagatatatataattgttagaaccatctgtaggtaggaagcaaaaatatagatctcactaacaatattttcatgttacaattttgtaggttgctgaatttaatggtttgtttcagttgtcaaggattatatatgcagcaactatagaaatgatcttaccggaccaagatattttatgcattgcttcttcagctgagctcttggacactcaggaaggtcaacatcttttccctccccaatatcaagcctacatttgcaaaaagaacattactgaaatcactgcacaatcaaaccacttactgaaatttatgtgattcagtgcaacactgaacttaatgcattctatttgcaaattaatctctttttgtcagacacatccaaccagtttaattattccaatgacatggagtagtttgcaaatgcaagcacacaaatcacagtcaacttctcaccagtagaaaaaaggctggccggcctggctttggcaccagacatcatagtagcactgcagattgtgaccatatctatgccgtgggtcaatctatacaacgaatgataattgctgtcataattgcatatgtgcatcaaaagtttcacataatgaacgaaaaaaagcagaagcagaagcttccatcacgccatcatgataagctgtgaagctttctcatgagcgatgatgtattcatgctcacacctgacgaactacaagtccaattaagtcaactgatagcagcctcttttcacgtgtatatatataataaaacaataaaacaaataccattaatttctgaaccataaaggtactagtaatacactaatacctgatcaagtaaagaacactggtaaaaaaaaaacactagtagatttgtactgttgtacttacagcctcgatccagtgctggaatgccagcttccgagccttggcgtctcttgataaaccctgacccacctgcatcaaagctcagattttttacagcaatttcgacacaaacagaagattaatcaaggagatgcagaccagacaaaccaaaagaatgcctcctttttttcttaaccaaaagaatgccttctttttttcttgtggaattttgtggtaggctgcaggtagcagcaactgagaaacggaaggaagtaggagaccttggaagcaatgatgctgacacggctccagcgggaggcgacggtctccgggttagggtcgtggaaggagatggtgctgtagctcagccgcgcgtagtccagcgcttgccaccttcaaacaatccaacccacaaacttaatttctcggttaaaaaatttgattacttttagatttctattttctctacacaaattaaacagtttgaaactttgaatggatgcaggatgctcatgccataatctcaaagtccggaggctaagttccaaacagattattgagcaaatagttgtcaccgattatctacttgattattaagataaattagatatttttgatatataaacttaatagataacttaaaaacaatgagtaaaacgcataaaacggtccttaaatttgtagggttgtgacatctaggttcctaaactcacaaaatacagatttaggtctcagaacttgtcaaagtgtatcatttaggtcccaaatcgacacaatccctatatgatcctatgtggcgctgatgtggcatgccatatggacgtgacgtgtccttttcttcttttttcctaactttttcttctttttcttttttgttttcttctcattcttattttttcccctctcttctattcgggtcacagagaaaggagaaggaaacaaaagagaagatggagaaaaagataagaaaataagaaaaaagaaaaggtaaaatttgttcgtgtggcatgccacatcagtgccacgtaggatcctataggagctgtggcgatttgggacctagatgacacactatgacaagttccggaaattcgatatgcattttgagagtttagtgacctagatgacacatccctataagtttaaggaccgcctatacactttactctaaaaacaagtggtccaagtaatataggtaagtaatataaataatataaaatgcattattcaaagcgtagagtaaatattcacttcatcttaatttgatcatcccataaacgaagaccacgaaaaccaagaacaccaaaacatctaccattctaaaattaggtactccattgtttcgtgtccaacaaaaaaaattaattcactttaaatgttgcgcacatagtatttcaggatgtacatttactctttgcataaataaacaaaagaaacactttgttaattagatgatgattattttggaaaaacctaaaaaatcttaggtgataatccaataaataatctgaaaagaacaactaagtgcacaaagttcgacttaataacttaaaccgatgagcaaagatattccacatgaaggttggtgaagaatccggttaattaatcatcaccagagctcctcgacgacgacggctgtgtcggcgagcttgcgccgggtccggtagctccggtacatcttctgcagcttggtcgccgccccatcctcgccgccgccaccgccgccgcttccggccaccggagaggaaacctccgcgtcgagcctggaagagcccgcgtgatccagcccggccgccgccgtcgccaccgccattctcgtggtctaagaggaagacgcaatagtgcagcaaaatctaccactcccttcaccaaatggagacgacgatcgagagagaaacagaggcaatggcggtgctagctagccttgtcgagaggagagggaacgcgaggaatttaagcagagagtttgtgtcgctgtatgtgacacgtgaaatggagaagaagaataactaaaatttgaggagaataattaaaagatgttttattctgttatatatatattctgttcgcgccaaaaaaaattccaagtagcctagcctacacgaagtcgaaaagtatcgtgctggaagcctggaatgtgtgtaacggtattacagtgatgactcaacgactggctgcatgctcttactgttcaggcccacaatcccacatggttactgcacaaacagtgaaacaatcgaacaaaatttaccaaaaatttaaaattttaaaaacttggttatgttactaatctcttatcgttacttcaccccaatggtaaacccgtcgacacttaaccgtgcggtaagggaaacttgtatgtgtgtgtatatatatttctgtaaaagagggtaaaaattttggctcgtagtattgatagagcagagtgaggaaaatccgttttcacttgcacataaatacacgatgagcccttttttttaaaaaaaaataaagaagttaatttggttcatatttatcctcagttgcctactatatatagtcccctttttttttaacaactatagctgtgattcgtaaatcgtcttcaattctgccttttaacatctcaactactccaaagtgctaccactaccatagttatatacaatacaatactccagtagaccagtacactgtaaaagctctattatatttttaggtcctgcagtcagcacagtgtttaaatcttttttcaaaaaatctattatattgttaaaggaatagaaaaatgagcctctactttcgctctcatggcctagaaattctcacattaatcggagaaaaagaaaaaacagagtccatatagaaatactccctccgtcccacaatataagagattttgggtttttacttgtaacgtttgaccactgtcttattcaaatttttttttgcaaatataaaaaatgaaaagttatgcttaaagtactgtagataataaagtaagtcacaaataaaataaataataatttcaaaaaattttgaataagacgagtcgtcaaatgttacaagcaaaaattcaaaatcccttatattataggacggagggagtacaatttagaaacagctgaaattcggaattaaaaaataaggaatattagaagagaagactagagtccatatagaaatacaattaggaaatagttgaaattcggaattaaaaataaagaatattagaagtagagtatatagtccatatagaaatacaattaggaaataactgaaattcggaattaaaaataaggaatattagaagtagagtatagagtccatatagaaatacaattaggaaataatagaaattcggaattaaaaatagggaatattagaagtagagtataaagtccatatagaaatacaattaggaaataatagagattcggaattaaaaataaggaatattagaagtagagtatagagtccatatagaaatttaaaactaactaaaattcggaataaacataataaaattaaaagtaaaagtagagtttagaattcgtataaaaatacaatttacaaataactaaaattcgaaattaaaaagaaacatgggtagaagagtctaaagttaatataaaaatacaatttagaaataggtgaaatcgaaattaaaaattaatgaatattgaaagatgagtttagagttcacatagaaatacaattagaaataataaaaattaagaattaaaaataaataatattggaagaagagcctagagtctatatagaaatacaatttacagataatggaaattcggaattaaaaaaaagaaatattgaaagacgagtctagagtccatataggaatataatttttaaaaaactaaaatttaatattaaaaataactaataactaaaacgtatataaaatacaatatgaatattacacattagtagttttgtaaagttagtacaaaatttaaaattatgttgttattttaatatatttgaataatacattgaaaaaatatatatgttattatatgagagaaaatataatgatgttagccgtgcagagtcaccatgctagttaaaataatatcaagcaccaaatccaagcaagagatgtaagttcatcagagacagggagctcttctgcgttggattgggtctctgagtcggatcgacggtgccaatgggccaagcaggccggcttgggcctgtaagctgagtggcaacagggaaacctttgctaattagattatgatcattttggaaaatctaaataattttaggtgatgattaaattggaatagtgataataattagttttgacaatctaataaataatctgaaaagaacaaataagagcacaaagtacataaatatgggcttattcctactacgactataatctacacttcgaaatacagagattttgcacaggcaacagggagaaaggaaattgtgaaaagagctcagattcaagagtcctctaaaacaaaagggatcagctaacaatcactggactccaaaattcaccttcttctgctgagacaagttcactgaattagattttccacaaaaataagatgggcattatattttggatgtgtgtaggagcaccatcggttacccaagtgatgattatatgccaaatgggttattagaaaaatcaatttatgggtaatttttttatgtgttcacttaaaaaaacataaaaaaaaagaaactacgttcgaaataccttaaaatcaaatctaaaatttagttttaaaattcaatttttagcagcgacgtgttgttcatgaatgggttgcaggaatgatctggggggcattggtagattgaaagtgggatggcaatcacatgttcatacgataagagtaatgtgcaacgaatgagcggaagatacgcgagggagacttgagctgaaggaggagaatggtctgtggtgacaaaggagattgagcgatggagatggggtgggttatacttgaggatacatttggtgttaaaagatgatgggcttcactggcatttgctaggtgaggatggtggtgtagtggggtaggattgctgattagcgcgtctgtgtcacgatcttacacttctagctcataagacgcatgttccgccctttcctttttcctttcattttagttgaaggttttgcaaatagaagttttttaacaaattttgctacaggatactacgattttgtggttttagccataagacactgcccgaactcacttttagggaagacacttcataaacgtgataatttaccgatggacaccgcgccgattagaataatattttccggttgaggaggagagagaaatcgcgtgaaatgtcaaaaatacccttaggtccagtcagctcttctatcttttctctctcccccctccttcgtctgatgcgcggcggcggaggacgagaccgacgctgcgatggatgtcgagcccgactccacccgcgtcgcggtggcgccacgaccacctgccggtgcgcgtactccagcaccagctccgtattcccggcgcccggcttctacttccgcgtcaccaagagcgagcatctccctcagctcgaggagaagctcaagaggatctgtaagcacgcacgcacatcgaccgtatacgttttgccatttcaaccttttttttttgccatcctattcttattaggaacgtaataacacaactaaagcatgattttcgtggacccatggcattcttttccgtccatgaacgccggctcgccgccgaacacctctacctcgaccagatgcatcggtctcttcccgaacaggtcggcctcaagatcgagcagctcgctctccctcccgacgaagccctcgttgcgggtgaagggaagctccgggcgcaccgccaccgccgcgtgccatgatcggacggcgtccgccaccgcgtgccgcccaagcctcgactcaacgatcttgaggagatcgatcaagcggtgcctctggctcgcagcgtccacctccacggccgattccgcacgggacagcgcgcccacggcctccctccagtcccacttgccgccgtcgtacaccttccacaggtggccgccgaacctcctctacagatcgccatacttctccacgatgtcctccgcgcggcagtcgcccttcccgagcccgacgaacaacggcatctggtcgcgtggaacgggctgctcgtggaacgcccgcacggcggcgacggcggaggcgacggtgccgtgctcgcgggacgtcgtggttggtgacatgaaagaagcagcacgagcgtgcggcggcgcggacgagcgggacggtggccgagcgcgggagggagagctcaacggtcgggaaggagatggccaggctgccgtcgtcgggcagagagagagagagagaggattggagagaggggagagagtgagacgagcgacggaggaagaagatgacgtggagggggatgaggagctgacagccgggcccgggtgacagatgggccctagtgcaagggcatttcggtcactccgcgtaaaatattaggccccctagcgcctcgtcagcacggatttattattttaaaaggcgcggtgtccgctggcaaattgccacagttatagagtgtctttccccaaaactgagtttgtgcggtgtcctacagctaaaacaacgaaatgacgatatactgtagcaaaatttgccaagttttttagattgaagttttaaaatgtatgtttttaaagaaaagaaattgtgcactcaaacatagctgcgctaaatagcaatctcggagagagtttgttcgaagccagcccagtccaaccaatccatcacaggcggcctggtcctccattttgtctcaaaacctgaaaaaaaaactggccgactcgaaatatgcctagggttggcctgtctttggacctgaatgtttctttttgttaggctcgggtcggcaaatttttgctggagcctagggcctgtttagtttccctagcaagttttttcaccctgtcacatcgaatgtttagacacatgcatgaatcattaaatatagataaaataaaaactaattacatagattgcgtgtaaatcacaagacgaatcttttaagtctaattgctccatgattttgacaatgtggtactacagtaaatatttgctaatgatggattaattaggtttaataaattcatctcacagcttacaagcggattctataatttgttttgttattagactacatttaatactttaaatatgtgtccaaatatccaatgtgacacggcaataatttttacccctgaatctaaacacagccctagttacaggatgaatttgacgtgggagttgtgtgggattatctatatcatcgatctgcaatcctatggcctctaattgagtaacctctcaaacttctttcagaacgtcaccttgtgaaagtatttaaaaaatgctcaaattaatatgttcattgcgtagctaaggctttagtttgctctgggctggccgacatgcggctcacgcacatatgttcagtacgtcatagagaataaaaattactttaaaaattactttactggtcaagatccttgtgtagtagtagtagtatgtttagtagtaagtcctaaaatatacagttcaactgcaagctcatcacagatcagttacagcaattgtcaacgctactccatcccctgcatccttttcgatcttcgcaagcaaacagctaacatctgaggatcatgcatccgtttgaccttaatttgagcgaattattctttttcaatccgagttttgttacagactagaataaactcattggatatatttgaagaaattctgaccattggttgaaatggtctgtaaattgcgaacagttattataactgaacgtagaaaaatgataattaaaacaaaaatatgtgatgatagggcatgaatttgccaatagaagtgttggtttatttctacgcccgatattagtaggataatattatacaagagtagctagctagccacgggatcttatactttgtggaaatgtacttaatcacagccggtgactgacacgttgggtcgcttcattccatagttaggctgctaaagcacatgtatctttccttgacggattggttacacactaaacgtggaattaactagtaattaggcatgcaacgacaaaattagccaatacaatgtcctgcgatcctgacctgtaaaaacgctgttgtaccagctgacctaattatcgatcgatcgatcgagctgacccggaaatcctgcgatgacacttcgaataagtggaaagggttgcatgcatgtataagcaaaaataattttgccgctgcaagcatacatgcaaagctattacatagtcatattttatcttgacacatagaccaaggataattaattctacttatcacccatttaaacatgctactagtaattcctcgtaaacaagcgattcattaatatttacatttctcgatgcccatgtagctaatcttgtgtggaagaatggaaagtcatgcattaaattcgagaaagtcattaagaagatagattattggattgaaatatgcctatcaaaaatagaattttcagatttagaaatatgactatcaaaatagatggagggagtattaagctaatcacgtgctgggaaagcatggtatattgcatgtggacatgtacaaccttggaagcaagcaactccatcgatcgcctataaattccatcgcaaccatgcatgcaatcacaccagcaactaaacacatcactagctacttaattagcagcagctacaatctgagtgtaattaacagtgtcgtgatggcgcctaggctgagcgccgttgcattggcggcgttcctgctgctcgccgtcgtcgtcgccgccgccgcccagcctaagcctaagccggccggaaaaggcggcaagccggagaagggagagacgccagggaaaggtaagccggaggagagggagacgccgccggggaaaggtaagccggaggagaaagagaagccggagaagaagaagataaaggtgaagtgccaggagagccgtaagctctacccctactgctccgccaagatgatggagtgccccgacacgtgtcccacctcctgcttcgtcgactgcgacgcctgcaagcccgtctgcggtgagcagccgccgctaccattgttaccaatcgggattaatctttagttctaagtatttaaattagagataaagatatcttagattcttagattcgtatttctggttgaaaaaccgggattacacaggaggttaccaactggaagtacgaagcatttctccgccagtggttgcacctccatcttgtctctgacgtatactctctgttgttgtgcagtgtgcaacgtgccgggggcgtgcggcgacccgaggttcatcggcggcgacggcaacgccttctacttccatggccggagggacgccgacttctgcgtcgtctccgaccgcgacctccacatcaacgcgcacttcatcggcaagcgcggcgccgacggcatgtcgcgcgacttcacctggatccaggccattgccgtcctcttcgacgacggcggcgcccaccgcctctacgtcggcgccaggaagaccgccgcctgggacgacgacgtcgaccgcctcgaggtcatcgtcgacggcgagccggtgctcctcccggaggacgccggcgccacctggacctccgccgccgtgccggcgctgaccgtgacgcgcaccaaggcggcgaacggcgtgctcgtggcgctcgacgggcggttcaagttgagggccaacgccgtgcccatcaccgccgaggactcgagggtgcaccggtacggcgtcaccggcgacgactgcctcgcccacctcgacctggcgttcaagttcgacgcgctcaccggcgacgtgcacggcgtcgtcggtcagacgtaccgctccgactacgtcaacaagttcgacgtcagggcgtccatgcccacgctggggggcgaccacagcttcgccacctccggcctgttcgccgccgactgcgccgtgtcgcgcttcggacatggcggccgcgccgccgccgtcgccatggccgcgtagctcgctgcactgcgtataccgacttaaatcatcatgccctcttgagtctgatgctatgatgggtatgagtgttaattgttctgttcattggccatggctgcacgcctgcactgcatgatcgtcaaagtgcgaagtaataatcttgtgttcgtgttgattagttgatgtgttgatattcgcatcagctgcactgtagtattgaactctgcaaagaaataaatttcatgatttttcgtaaatatttgggtatgttcagaaatggatgcatggtaaaccaattcagaatgatgttaagaatacaccgtaacactttgtcattgcttcgaaagagtgatcgatactggctcaaagcaaacaaaatacggtttttcaactttacaaagttatttttcgtacaaatcattgagtagaaactatagtctaattcagtcttgtatctacggtacaaggatttgcagacatgtctagagtttaatggcacttccattttcaagtgatctgaagacactatcatcgtgtctttatagaaaaatgtaatcttttttccacataaaagcaacagcacacttggtgattactaagaagacaataattagtagtagcaaccactcaatgcaacagaaaatggcctttggtataaacgtactaaaataatactagaatcgatgttacttgcagttacagaataaggctctgcttttatagcatttccctttttgtaatatacgaaaagagacttgcagaacgaacataacaggcaagacataataattctgttttgctaacctttgggttatggcaaaaaggtgtaatcacctgaaaccaatgcgtcaggattcatgtaaattcaaaaaaaaaagaaacttagcaaaaaaaaaactttattctgaacaaccaaaattcagcagcaagcattactcatgcatcagcttgcaaagggtgcgggtcacattcactttgatgcctaggcctgccccaatgctttcccaaacgcaaaagccagaaatccccaaatgaaggaaaacataagaaaggaaaacgagagcacctcagactacatattccccaatgcttttcttcactggtaacctcatagtgcaaggatgagtacggatgtaacatcactggtgctctcggactcaagaaaatgaaaacagaacattgggtcatcgggttaatcttcagtggcacaatcaacccagggacatttaaatccacaaacaacgcaataatctaactgaggagggaacagagcatctcagacaaaatattcccccaatagtttcttcaccggttgactcatagtgcaaggatgagttaagatggatgtaacatcaccgatgctctcggaaaataaaaccagaacatggaggaatcagctgccaaatgcctcatcagctacaatctacgtgactctgaacagggccttagtacaacacaacggcataaccattcatgtgccctgtattagcagtccacggtagcaaaacagcctaatattttactgtctagttataacagaaatgtagtggctaatcctacatagatatgcttgacacattacagctaacggcggtaacagcatcagtcgcctgagtccttacagatagtagaagaaccatccattctagctggcatcttcagttacaaatcaggtattatacatgaaaatggtgcatcgggttcaaatgcattcagagaagaaaagacaacttcaatgcttcaacttatacaccaaagaaacatcagcagcattacttatgtaatgcagccaactgatcaaacaagactaaacttaaaattattctgtgatctttttcatgaatcttgtatgagcactgagcagcagaatattcctcatacacaaccacaagcccaatatttttctaagactaacagaaatagaatggtcaattggtcatttctgcatagatgcttgaagcattacaactactggccataacagcatgagtcctcactgatagaagaactggagctggtcgattctagctgcctaaatggtgacgcattgccacaacaggaggcatgattacaacaaaaaatgagaccattcagcatgagatttgaacgttcactaaagcatgagcaataaaacatgtcatgagttcagttcttgatctatcaaaatccaaggcatcagactagatccacat

SEQ ID NO: 5126 - DNA, 53738 bp, Oryza sativa
  unsure (1)..(53738): unsure at all n locations
gtggttcccctgcgtcaccatccatggccgcgcgctcgccagcggctccacgaggcggccgtacgtgtcccacctcggctggtacaggtcggcgtacgacaggtcgccggggagcagcagcatgtcgtagtcgtcgccgccgatgtgccggagcgtcgactccgtccatcccgtctgcccaagatcacctggaacgtccgccatgagagacatgtcagtgctgtgtctagatttcaacttttccgtcacatcaaatgtttagacacaggtatgaacatcaaatgtggacaaaaaaagaaaaactaattgcacagttcaactgtaaatcgccagacgaatcttttaagcctaattacgtcatgattagctgtaagtgctacagtaacccacatatgctaatgacagattaattaggctcaaaagattcgtctcacagtttacaatcggaatttgtaatttgttttgttattagtctacgtttaaacttaaaatgtatatccatatacgtcaatattttcttttgacaatgaactaaacacgatgtcacgaagctcacacaagcattcgaacacatgcagtgcagctaagcttaccggcgacgacgaacttgaaggggaggctcgccggcggcgtacggaaggagagctcgcgggaggtgtcgttgctgcagcggtagaagtaggtggtgctgggttgcagtgggccgatgacgacgtcgtggatgttgccggagtggtagaggacgtaggagtaggtgttggtgcttccggtcgccgagaacgggtactggccggaggtcgtgccgtactccacggtggccggcgcgtcgccgccggtgatccatgtcactctcatcttgtcagagcctactgctgatatgtgcacctgaaaatttccatccaaaataggaagtttcttcagagaggtcgtcaagcatttcagttatctgaagaacatttcagtggaattctggtccaattcagtgagaatctgaactgtacaccgagttcaggctacctttcgaattaattagcacattttacttgtcatatattttttttactatcttgctgaaatgatattcatggattgcattctactgacatgactgtattttttgacaagatgagagtgacatggatatatccatgtaacttgatgatgcctgtattgtcagtagatgagagtgacatggatcaaaaaatacaggcatcttgctgaaatgagattcatggattgcattctactgataagttgtattcatccatgcaacttgatgatgcctgtattttttgaaaatttgatgatccatgaacaagacagtaacctatattgtaatttaagatatccatgtttgattaaatcataggtgtacatctgtctaaacatgaagtaatatgtgtacatcaataaggaccactgttttaataaattattgtactgactaaatcatgaacagaatgataaattgaggtgaataaataggagcacatagtttcgtgttgacttttgttcactgactcaacattggacagaacattggtccaaccttgatttgttctcttctctgtcagtactaagccatgtcatacagtactgacagtgactaaacttgggaagcatatttttgcttcttgcttcatgcaactgcgtaacagaaacatctagcatttcttcaccagatcgactaaaaccggaccagccacctcactatattaacaggttgttgaagagtttgaaacataaactcccaaggcaaaaacgaacaagaaacgttattgagtgttagatttggagtgtttggttaggccacctttaccatttatggcttgaagaaaaaaagagcaaaattaaagtcagcatcatgactgaacatatcgtctgtctcttcttgacatatctgaattttgcaattgctgcctgcaactgtctacaggatatactaccaatgactttctttcttcagcttctatattgttgcagtgtttttattccttttcataaatactttctcttttcttatctcgagaataaatactttctttctttcctacaaccataacttgcacaaacacaaaagaacccttatctaatctctaatgcaaacatgagtatttttaagagtgcctcctgatagtgtcatgagctgtcccatggcagtacagtggagtagtatgtttgcaataattgtttccacgaggaccatactgaaatctgacacgtacgcgggcggcaggccaattgaatactcctactaatggtttaatttgctggaaaaagaagaagaaaaaagatatggagaatgcatggctcaagagtttgaagccgtgtcaatggtgattaattgcagtatcagcaacactaaccaccgaaaggggctcgtgatcatggagcaggaaacagccaagcactagataacacctcggccgaaccagcatgccgacatggccagaaatgataaacaacaagacgagtgggaaagcaagaaacccaaaggagcttcttgttccttgtgtgtggtcgccttatcgatcgaggtgagatttagactaaacagatgccgattaattagttggcaaattaatcggtttcttgttccaggatatactccaagttggtaaatttaaaccatgaagcataatccgttcctactttgcactttcctaggttaatataatccataatcacgagggactccaggctgtgtcacatgaatctcaggttttccttaaaaaaaagaacaggttgctcaacatgagactatggttgggtggactcttgcaccaaagatgaccaaaccatttctttcactcaacactgaatcttgagttagatggccaacaaagagcaaagccacataaccatgcaaatttgagaaatattaagaaattgaactgacgcatgaaaattatttgaagatttcaaactcactacggccaaatccgtcatcaaaaacataaaaaactcagtacctgctccggcttccggccgtcgtcgtcgtccttgagcagagacagcgtggccctcggcttggggcgcacgtacggcgacgtgacggcgagcgacggcggcggcagcgagaggagggatgcggcggcgacgaggaggaagaaagccaatgctgtgttcgtcatcgccatcgccatggctggtctcgccaaatctgaaatggggcactggggatagatatgaaatgaaaaagggcggttatggctagcatggaagggtggcgtcgtgtatatataggacagccttgccaacgcaagcagctaattaatgattaatgatgattgataatgtgccgtggaggaatccagtttcggatgcatctgatttcaggtgcgaatctggggatttggatatgtggtttagtcaactttaggtgactaaggcctatttagttggtgaaataaaaattcttagatgtcacatcgaaagttgataggatgtcggaaggggtttttggatacgaataaaaaacactaattttataactcgtttgttttaaagattcgaaatgatgtttttggtaaaagaaaattttgaggaactaaacggtgcctggttttactgcactctgttccagcctctccagtctgaactctagaagaaagaaacagagagagagagagaggttgcgcgttgttcggcaggcggttcggttttgcgcgtgaggaacgaaccgcacgcatgctcagttgatcgacacgtaccaatgcaacggcggtggtggctgcctggctctcatcagtcatcacctcgcctggcccccacatctgctagccacgggccactgacagggcccacctccccctgggttccattttggcataataacggattgcttttctttttttttttggtccgtgaaaattggtgtacgtcttcgtctctgatctgttctgttcccttcgttccaagtcctggctggctgcgcaatcgactggtttctcgagttacaggcttacagcagtccatgcgtgacttcgtccagtggcggagcagaagaaaatctaaatcccggataaatatagctgcattttctcatggaaatggagtccgacaggaacgtattcctccggttcggcgtaccatgccatcttcataggaaggaaccgtttccaagaggcgccaacttgaaagtttctggcccctcctcgctttctcactttcttttggttggtcacaatgaataggtgttagactgctgatcgtcttcgtcgtcgtgggctgccccactccgtccgatgtgttctatgcgattaacaggatgagagtatagatcacatcttggttggctgccctgaatcccgtcaactcgatctggtggtgggcatcaggggtggagctagaacgaaatggaggaatgtgcctcttgcttaatttactccatctaaaatcaagtttaagttgatacgtgtgcctaagcttgtattgaggggatacaaacatgatgaaaatctgtgagttaaaaaatttacttgaccgggtttctgggcaccccccctcccatactctacctccgcccccggtgggcactctcagtgaccggattgcctcccctgcaagaggcttccttccatcagtggctctgccttagcaggaagaaagtcttgaaggatcggcgtcggggattcggcaccattgcgaccttggtagaatggacgatctgtaaagagaggaacaatcgggtgttcaatctccagcagcgacctgttaacgaccaaatttggtaatatcagtatcggagacgaagattagatcgaagtggaattaaaaacgaagatcgttgtggaaacagagtaagaatcggctggagtccaaattggctacaatcgggatcggctaagtccgagtcagactgggttagacgatacagccgattccgacaatacgacttggtatacgtcatcgggttgagttgatatgcttcaagatgattgccatgcatagatagagtcctgagaaggcaattgtatctattaattagaataatttatgtaatttccttagagatatgtttgggtaaaagtctgccgcaaagacttatggtatcttagagtttgttagagataagagtcgtgtccgatatggacatattgtgtaattctcgggtataaatagaccccgagccccatgtaataaaattaacacacgttcaatacaatctcggcgcatcgccaccctttttgctttcgttttatttcgacgagttcttgctttcgggttgagctgcatcggtttcgatcttcaacaagaggtaaaacttgttatggcggcttgcgttctcgggattagtgcttccatctttatgatactctaattttgtttatgtaattcgtcgagttatcatatatcttatataatctatggcaatatcgtcatctaacctacaatcggctaacatctgctagtagagggcaaccgattaggttaaatatcgacgttggtttagattatatatgatatctaccactctataaaactttcaatggcttgattgtctagatatcgtccttcttttcatacttatagctgcatcagttgtttgatcttatgagtcgtgattagaatcttaatctctagcctgcttcttggttgccgattagggtagtatcggagtttcagccgatcttacctgatttacctaccttttatcttatgtgcttcgctgatatattgaatctatcctttatgttaagatcttgttgcatttaagtatattagtcttttgtttgatatattctatttgctttgatatcttagtatagagcggtatcggagtattagccgatacatgctagatctatctgatcagctatgctatgaacatatataatcttattattaatatatatttcgatctaagtgatttatactgtctcggcatggcgaccgacctatcccaatcacttgatttaagtatatatcgatataagaattatatatcgttaatatctacagccgatcgagtagatttagttctgttttatttattaatgcttgccgatcgatgcatatatgacatcggctcaaagataaatgatatgtcattggcacctagccgatcggctatcgtttatggatttaaccgcggtttctttgtctttgtttcttgttgattgcatgatcaaatcaaccggcacgctagcatacccgaaggcgagttttggacctgcactggagttaagcagatctcccaggcctcgtgtttttacatcaacatgaccctgggcggaaattgcaagagctataaccgcggaggcggagctgtggcgcctagcaaaggcgacagttttggcgcttggtctctagtttctagggtcgctaggtcgttcaatttggttgtgagattgtactcttaagtccctgttgcattctagtaccctgttctctttaatcttgtatctcttgtaaataacttttatttctcttaataaagatacacttctagtgtattcccaaaaaaaaatctagctgcattgggtcatgctttgctaccaaaataatattacttcccatgttttatattatacaagttattttgattttttttctaagtaaaacttatttaagtcatccaacactaaattagttttattaaatataacactaaatatatttttaataatattttcgttttatgataaaaatattttatatttcttcaataaatttgatcaaagagatttatcaagataaaacggaggaagtcattcaaactttatgctgttatacaaagtaataaacatggttgttgtggacacatacccaatcctagaacagggaaaggttcgtactgacaaacgcctaactacattgcactactatgataacgttggtatatacctcttcgatcgtgatgcctccaaactccaaagctagcagcttgccatgttcaccactctttcaaaaatacaccagaagacctcggtggtgaactattagaattctcgaagaaaagagttgagcatttgtcgatataactttttttttcaccgggccgtatttttataactttttttcaccggtccagtaaaagcggacgaaaattcattaagatggaaggaataaaagggtaacaaagcaacatgcagggctgttgaagaaaacacagtaaacacttctcctgacactagaagggaacttaaaaaatatggagggagtatatatttacaccgtcatcctcatcaacctagcttcgccaattccttaactatttcataatcctatcaacgtcggcctacaacggataactcctcggcaccactgctaccaacttcaataacctaatttagaaagcctggacaccacgtaagtgcaaaacttcaccgggatgataatccaaaatagagtttggacctccgacaggttggtgattagcaaattatattttaggacggaggaagtattaaagaggttaaaaaaagacacactctataaaatcttttaagttagagcattgctcccatccagcaggtaccacggtaccagcaggtaccaaatctcagccattcattcagctcgattggacgatggaaattatctgatatctgcaggtacaaatttgtccatgaagcggtggggtctgcatctagtgggtggtggcggcggctccgcttcccgtcccggcggcggcagcggctccatttcccgtccgcaacggcggcccattgcagcggcatctccccatgcccgccgcaacggcggctgctccggttctcgtcgcggcggcggcccatcgcagcggtgtctcccctgcccattgcagcggcggctgctccgcttctcggcgcggtggcggcccatcacagcggcggctcccctgcccatcgcagcggcggtggttccgcttcccgtcgtcgcagcggctcatcgcagcggcgtctccccttcccgtcactgttgtggagcaccttcatcccgttcccgtcgcagctgcggctccacatccgctcagcaacaacgaactccccggtgacagaattcccgagctctggccccaacccattgccgaggagcatccatatatccttgaggaagtcaagtcacggtaccagcgagcagagcgccttctttcctgcctgaatcaattgatgcaatgtcattatctggtttgctagagctgaagcatgcatgaaggcaaagaaccaccatctgcttctgctcttgacattgcatgcggggcgagcgcgccgtgaggtattctccagtactgtggccaccgacagtagatgatggggatcaaatcggccggcgggaaaactgctccgtttctgcgctcgtagggaggaacagatgagaaagaagcgatgcggggagggaggaaagaaagagcgcagggaggaaagcggcggcgcgactccggaattgttccgcttctcttgctctttctgtttccaatcgtatcctttcaagatggatggccagatttgatcttctacctcccgatactagttacctgccggtacatgctgccagacgagagtaaatctctttaagttaaatgagaatttatactggataagacaaacaagctaccagtatctccagtgatcatccaagctccatacctgcatagaacccacatccgttcagacacggcacgcataaaaaacgtacgtgcacgcattctgccatgggcgagcatcgggcgttcactttgttgcaggttttgctgctttccttttcagttacatccggtaaatcatgacaaacgcatgtattagccatttcagttatccggtaaatcatgtgttcaacaataaattagcaaagcacacgtttcatgatcaagatggcttaataatatactactactattgcttccaaacttagattttctcagccacccaaaacagcatctgataatattccgttcacccatcaaaggttcaaaagcccgtaaccacatccctgtcagatgcacctagaaggctgacgtgtccactgccaacttcacaaaaccgtgacaacccctttcatcacaaatcgatataggcactgttcttttttttttattttttaattaagatacaaattttatctttattttcgttaaaacatttttcataccgttaacgatgtattttgtacgaaaactttctgtatataaattcttttaaactataagataaatctaatttttagatttgtaataattaaaatttaattaattatgttaatggtttcttattttcccgtatcttataactttattaaaaacgaaacactacctatagaaggagaaaaaacagagacaccacacacacaaagtgcaaaaattcctgcatcacgcagcaaaatgccaaccccagcctacctatttctttctttcttcttcccaccttcaccaccaccaccaccgcacacggcgggctccttcttcttttcggcaaccaccggcgacgatgtcgtccacgccacatgccaggtgcacgcacgcacgcacgacagcaagagagagagcggcaagaaacaccatggcatatctccgaggatatgccctaatccaaagtcttcctaattgttattaaaatcctaatgacgtgcaattatgctctcctctcccaggtcgtctcctcctccgggctcagcccaggctggccaccgatgatgatggcgacggccgcgatggcggcgagctcgtgcgatcgaggcgacacgcgtaagaagctgcagataactgtagttttcctcgtccgcacgctactgctcgcgtgtataatagcccgcggggtgctcgcgctgatacgggttgcgttccgcgtcgccgtggttgctccggcgagaagcctcgtcgccgtcgcgggcgccgccttctccgccgtgaacgcgcggtgcgcgtggtgcctggaacaggcggcgctcgggcggagctgcacggggacggtcctcggcgacgcggtggtgggcgccatggcgagctcgtggaggctgctgctgcaggggatcacgtcgctggtgttcctgtgcgcgcgtggcgccgacgagtacgtccggccgccaccgagcccgctggtgctcacggcgcacggcaagccggcgtcgcatcctcagcaggtgcgggttcatctctgggtgttgcagacttgcagtgtgcagagtctgacagagtttggcacttggagttttcttgttctgaatgcttcattgcttttcccgtcttttttcaataaaaagttcatccatgatccatcccaagattgatcagtggcaaacgaattctgtttgtctcatgatttcatcatcattctttgcagagttcttttatgcttgaactctgcttcttttttttttcttcagaatcagaggcaaagagtgtcctttgtttacagtaacatattttcaaactttcataatcagacacaaatacaaattgacacctaatacagtagtacagaagatttaattccacgtttcctatcaacctgtcaacgttacaatgtgaagtacagacaacaaaattacattgcagtatgacatagtagctgggagctttacataagttttaatcaaagagaatttgcagctgaaattattatccagcataattctgattcctaatgtttcggtaataactttgacatggttgccaatgataatcaggtgcacatttcgatggtgggggagaagaacatgaggatttcatgggtgaccgacgacctgaacgcgccgtccgtggtggagtacgggacgtcgccggggaagtacacggcgtcggcgaccggcgaccacaccacgtaccgctacttcctctacaagtccggcgcgatccaccacgccaccatcggcccgctcgaggcgagcacgacgtaccactaccggtgcggcaaggccggcgacgagttcaccctcaggacgcctccggcgaggctgcctgtggagttcgtcgtggtcggcgacctcgggcagacgaagtggacggcgtcgacgctgtcccacatcggcggcggcggcggcgactacgacgtgctgctgctccccggcgacctgtcgtacgccgacacgcagcagccgctgtgggacacgttcgggcggctggtgcagccgctggcgagcgcgcggccgtggatggtgacggaggggaaccacgagatcgaggcgctgccggtggtggggatcgcgccgttcgcggcgtacaacgcgcggtggcggatgccgcgggaggagagcggctcgccgtcgaacctctactactcgttcaacgcggcgggcggcgcggcgcacgtggtgatgctgggatcctacgcggagttcgaggaagggtccccgcagcgggcgtggctggagcgggacctcgccggcgtcgaccggcggcggacgccgtggctgctggcgctggtgcacgcgccgtggtacaacacgaacgaggcgcaccagggcgagggcgagcggatgcgccgcgccatggagagcctcctctacgaggcccgcgtcgacgtcgtcttcgccggccacgtccacgcctacgagcgcttcgtaagtcttaacacttgcatgatgttaattaatggtgaagttgagctcttaatcatggtgattaatgatttaattagacgaggatctacgacaacgaggctgacagccggggcccaatgtacatcaccattggcgacgggggcaacagggaaggccttgctctcaagtaagcttcacgatctcatcatatgtcggaaaggggtttttggacacgaatgaaaaaactaatttcataactcgtctgaaaaccatgagacgaatttttgagcctaattaaccattattagcacatgtgggttactgtaatacttatggctaatcatggactaattaggctcaaaagattcgtctcgcgatttcccctctaaccatgtgttcaaagattcgatgtgatgtttttaggaaaaaaatttgggaactaactatgccttaactatttatatctgcgtagttgataacgttaattatatgtgtgattagcttagttaattgaactttgattaattaaatttgatgaaggttcatcaaggggcacaagtcggcgcacctgtcggagttcagggaggcgagcttcgggcacgggcggctgagggtcctgaacgagacgagcgccgtctggacgtggcaccgcaacgacgaccagttcgccaccgtccgcgacgaggtctggctgcacagcttggccgccggcgagccagctgctacagtagcctccgccgccggcggcggcggcggccatccggccgacgagctgtaggctatatatatctcacactgttaagaatgaatggaagaaaaggaaacttcaccacatttagcattgtcttttattttttttctttttcatcagccataaacattgtccatttgtccttgtaaatcaatcgtgatatcgtgtgtttcagctagtgtacagtgtttttcttgtgttagacacgtggtgaaatagaatttcagtgtacaaggccaacactgatgggctcatcttttcgcttatactatttatacttatcatccaaaatttgaagtttcagctttcaatttggagttgattttgggtcttttcatcaaagtttattttttagcttttgtttttatatcgctaagaacatgtgtataaaaaattatttataaattatgtttcatctgtaaatatgacatttcacataagcgaaatgatgggccgtgatactgtaattaccactgtgtattttgttttgtttgtgtaacttttctcctcatccgtccgatcgagaaagaacggtccagatccaaacacgtcacaatataccatcactgcggccgccggggcgcaccctctccggcttccgccgccgagcagggctgcgccgccgtcgtgctgcttccgccgcaatcccggtgtccggtgagcatccatccccgtttatgcgcatcctcttcctcatctctctctacccacgcatgcgcttttttccccctcgaattcgcgttaaaccctagcctctcttctagatctggaccccaatgtcgcaagtcagatccgcccctgagctggacagccgtcgccggaggcgggactctgacgacgagagcggcgagcgcgacctcgacacccggcgccaccgccgccggagccccagctcagagtcgtgttcgtcctccggcgatgatgaccgtagccgtcggcaccgccatgacgagagctccaggaggcggcagagagaccagagccaccgccgggacaggggtggtcatgatgagcggcgccggaggagccctcagaggaggaaggagccgactccgccgccgccgcttctaccggagatgataccagggcgcacaggagggatctacatcccgcctttccgcatggcgcagatgatgagggaggtggaggacaagtcgagcgccgagtaccagcgcctcagctgggacgcgctcaagaagagcatcaatggcctggtgaacaaggtgaatgctaccaacgtaaagaatattgtgccggagctgttcgccgagaacctggttcgtgggcgggggcttttctgccaatcgtgcatcaagtcgcagatggcttcacctggcttcaccgacgtgtttgctgcgctcgtcgccattgtgaataccaagttccctgagattggtcgcctgcttcttgttcgcgtcgtgcttcagctcaagagagcatataagcgaaacgacaaggtgaccttcctcaattctccttttcagcttgacatgtaaaatactgctattgcctcaagtacaactagtatcatttggaaaatacttggttaatttttcaccatgttagagtaatgcatgtttgtttacctatttgtcttgttgattgcagccacaactgcttgcagcaaccaagttcatagcacacttggttaaccaggcaggtcattgctcatgagctcgtggcactggagcttcttactgtactgcttgagaacccaactgatgatagtgttgaggtgcatatcttgtttcttatgtccttttatgttgatcatgtcttcatttatgcaatatctgaagcatatggatatgtttcttatctggtaggtagcggtgggttttgttaaagaatgtggggcaatgcttcaggacttgtctccacaagggcttcatggtaagtttttcagatcagctgttaccataagtgcttattatgacttttgagtgaatgacttgttaaaccttttgactagctcatctgtattcacgacatatttttggacttaggcggtttcatttcatctgtggaatattggatgtgtgaaccttagtgcaggtctagacccttttttttacactagtattatgtttagctttacctggatgatctggattttgtctgaaattcaatacactttctttgggatacaattttctggggatatctttttgttctatatttgtctgtctgcttaaactgtgatatttgaacacgttttctgtttctaaatgtagctttttatttgtttcaaagttaactaacatgaaccattggttatttgtttgatctccttatgacttctctatttttcttattttgttccattttcattctcaatggattcgccttcttaatctatacagctatttttgaaagatttcgaggcattcttcaggaaggtgaaatagacaagcgtgtgcagtttctgatcgaaggcctttttgcaattcgaaaggctaaatttcaggtaaattcatatttttcctaattctttaccttttctatgcattcctataacaaattctgacaatatgatatcatatctgtgaagggattccctgctatacgtccagagttggatcttgtggagcaggaagatcaatttactcatgagatatcccttgaggatgagctagaccctgagactaatctaagtagggttttatttcatatgcaaacatttttcagtttactatatttatgacataaaagcctcagttattttgaaatgttggtattttaatggaattttaaacaccagttcagttcccataggaatctggaaattttcttgcatttactatgtatcttaacacttccgtgttgtgttgcacttacctttaccaacctgcagatgttttcaggggaaatccaaattttgctgaagatgagaaggcatatgagaacctaaaaagaagcatccttggagcagaatcttctgatgatgaagaagggtctgatgattcttctgatgaggatgctgaagaagaatccgatgatgaagaggacgaagagcagatggagattagggatcaaactgagaccaatctcattaaccttcgaagaaccatttactcgacaatcatgtcaagtgttgattttgaagaagctggtcacaagcttctaaaaattaaacttgagcctggtcaagaggtaagtactgtaggttgactctttttctgtattataatattgtttttcaatttctatggtatttttaaatttccttatttttgtgttttattttgctttcttgtacacaacaccttctgtgagcattacggtttgttagaatctattttccaatctttcaattcatgaacaaactagaacaaatttttgtgataatgcacggaatgttgtgtctcaacagcgcagtcacttgccattcggatagttctggtgctggtttgtatatcaagaatattgtgcaccaagttattagattaacaaaaggcaccaatgggtagttattagttaatgcatctgttttacgaatggtctataattaccgttttctttattgtgctcctttcatgtgacttagcttcatgtgtacaagtagcgacttagactactgttatatgtactacatggtcatttgtcatgtatctttcaggttcagttactaaactgattaaaattatctgctagttttcacatattgcattgataaaacctaattggtagttcagttgctaaacttatttgttagttctttgaatttctgaagtcactgaaattgcacaagctattttgagcttctagaaatttttgaagtgaagcaaaattacttacctcattctagatcctattactgaacgacatgcaatacaaaaaatgatggtgaagaaacattcttatgctaagacaggcacatgttttgcacaacacaatactcgatttcaaacagtccctcttcaattcatataatctgattgatttctttggcccttcagttctgagtttgcaaaatatagtgatttttagcaaagctaactgtttatttcatttaacagatggaattgtgcatcatgctgcttgagtgctgcagccaagagagaacatacctgcgatattatggattgctagggcagcgattttgcatgattaacaaagtttaccaagataactttgagaaatgtttcgtgcaacaatattccatgatacatcgtctggaaacaaacaaactgagaaatgttgctaaattttttgcgcatttgttgggcaccgacgcgcttccttggcatgttttagcttacatccgtttgacagaggaggacaccacgtcatcttctagaattttcataaaaatactcttccaggtatgctgttaaaattatgccttttctttactacatatgtcgattcatctttaccaaagcaagcaattgaaggttttgtttcttgttatgcaggaattatcagagcatcttggtattcgtctactcaatgaaagactaaatgatcctaacatgcaagattctttcgattcgatcttcccaaaggatcatccgaagaataccaggttttccataaatttcttcacttccattggactgggtggtatcacagagactctgagagagtatttgaagaacatgccacggctaataatgcaaaaacagaagcctgcctcgtctgaatcagactcaagtgattcagggtctggttcagacagctacagctcagaatcggaatcaagttctgatgagagtgacaggaagcgaaacaagaggcggaagaagtaagaggtggaagaagattttcatgtaaattctaccatggttctgggattctcctgtatttttatctacgtgcagtatctgatctagctgttggtgcttactaaattgagaacccaatcatattaaccgagatattggttcctacttcctaccttcagatcatgtgagagaccgaagtatgttgttaatagtgcaacttcactatgttaattcatccttaacaaaatcagacaattgaagtattttttttcgtgctatgcaggagttatcagagcatattggtattggtccaactctaagagattggatgagcctaacatgcaagattacttcttttctatcttcccaagggatcatccaaagaacacaagtttttctacaaatttcttcacttcaattggtcttggttgtatcactatgaccatgagcgagattacctgaagagcattcctcgccatctaatgcaacagaaacctgcctcatgtattggtatccatgtgttctgatcctaactgttttgtttttgttggatctccatgtgcaatataatcagatcttagatgctgttcagagggcttgttgaattcaggacccaatcataattagaatccccaaatagggttttataagatatcagcagagtaccagctggtaggaacgtattcatgtgcaataattaatggtgaatcctttgctcagttgaactttttcatccaaattcaaagtggttcatttgggactggagattggaaggggagaaaagcggccgggcgaaagcgatttatgcaagttgaaagtattccttgtcaaattggggggaaaactgcaatatttcctgaattgcaagttgaatatattggtttgaaatggtccccacaaattgaatgaaaaaggtcaattgaaggttgaggatgagacgtggaaattaattacttcctccgttttatattataagactctcttgtattgtccatattcatatatatatatgttaatgaatctagacacagatgtgtacctagattcattaacatctatatgaatacgggcaatgctagaaagtcttataatctaaaacggagggagtaagctggaaggggcagcagtggtgaagatggctgatggaaggtgatgggggcaattacatagtctgcatcatagacatcacacacccatgtttcttacattttgtaacgtcatccatgttgctgtgaacaaatatatacactacagaaaaacctaaatatcctagaaaacattaaaaaggaccaaatgtataatctttaaatggaaaaagggcaaagatacataacaacaagttgaaaatcttgtcgcccaatcacttttgtgtgaaggcaataataatataatgttgctttacagcaaaagcaatgtgcttttgtgtttattagctgcaggtggtttttatcattgaccaaacgctacaaacaaaagcataataaccataggttgaatatataatcaatcctggccaaaacaatcggattaatctgccttttgggcggtcggcacttgctaaacaatggaaatcatcaacaaaagcactcaaacaggacagtgacatgctctaattatatttgaagctggacctcacgaatcatgctgctcttggccaataaaaccaacagattaattaggaagataaacagggagcagttactggattaggagacactttgttgaggtgcaggtgcagaagaggaggagacaaggtgaacatggaggagaaggtaggaggagatgtgagggttctgaagccactgatgcacctgctgcttggactggtcatgtactgggtcgccgaggagatgacggtgcctgtgctcgtcgacgtcaccacccgagcactctgccccggcgccgacatcgcctgcccggaggccatctacctcaccggcctccatcaaacggtcagctctcatttgatcatctccctcttatgcagtggtgtccctcctttcctgtaagacattattgttgttcagtgatatacatcgtagctatgcagaggtcgggagtattatcggaacaattgtaccaccttggtgtaattaactgagttcgctaaagttttcattatctgaaaaatgaaatcacatgatgatgcctaaattcagtttctttcttttgctagtttcagaagaaactttgactcgatgcattagggattatattactactggttgccaatgcttatgctatatgattgatgcataacattttcattgatgaaaatggagttgaccattttcttgattttatctgaaagaatcagtctgcaagtgacaactgaaagtgaacaattgattggaaactcttgtgttaatgcaggtgggagggattttcagggctgtaggatacactttgatggggcagctagctgatgaatatggccggaagcctctcctcctactcactgcctcaacttccatcatcccttatggtagctatacctgttctatcttattttggaagcttatatcagttaagtgttagtctctctgcttgcaggaatttgacattagaatgtcaaggttttcatgagtttcacaggatattaatcatatgtctttaattggtgtcatattgtttattcctgcaggtgttcttgcctgcaacaaatccaagattgctgtgtatatcttccttattctgcgtactttgtcattcatgataggccaaggaaccataaccagcctcgcagtgacatacacggtgagagcaatcacagatgctaactcttggtttcactttatccaagtcgtataattctctccttgagcctggaaacttaaaccaaattggacaaacggcaaattgacagcgtttcttgttattgcatagctatgcacaatgcggtttgagaacaagtagtcatgcacgttgcatgctggacagttaaaattcccttttctgctaatttaattaggccgatgtggttgatccatcaaagagagcatttgcatttggctgcataactgggatactatctgcttcgcatgctctgggcaatggcttctctaggtttctgcccgagcggtggattttccaggtattatatcatgaagatttcttacagttcatcaacaatgttatttttcaatttttatgctaattaatgtcattcttacaagtatgaaaccacgcattatcaggtctcggttgctttgttgatctcttctgtcatctacatgaaaatatctctggttgagacacttcaaagagcttcttctggttcgtttgagcatatgtcgttctcatctttggttgtcaggttaccactgcggcgctgggagtctatcaaggagaatattaacataatcaggagaaggtaatgttcctcaccagactcctttatggtctaagtaatttaatggtgtaacgattcatgtcaaagcacaaagaaaattaataagtatcggattcacggataataattctggaaaagaaagcctgatgagacttctgtatttacacttgaccaacatttgaaaattgcaaatgcaaattttgttgatgtcaagagatacctactaatgcaaattttgatcttctctatcttcatgttttgttagtgaaacacttagcagaatcacatacatttccttcttctacgagttgggcatgatcggcattagtgatgtcctaatggtaaccatatgctcagatttattttacgacattgcgttcaaaagagtactggttatttcattcttcgcccctttatttgcagtactatctgaagtcagtatttggttttgacaagaaccagttctctgaaattcttatggtagtaggcattggttcaatcttttcgcaggtagtacttagtctataataacctttgcttgatgttatattcgaaaaaacaatcatcctttaagtgccttgcctgattaacaaaaaaaaattgtaaaattgtagattttggtactccctgttattatcaatacagttggtgagaagggagtcctatgcgttgggatacttgcatctgttgcctacgtgagtgtatcacatctctttttgctaatatttttgttatcacttttactgatatcagatgcagaactaaaacctttttttttcctctaggctgtcctgtatggtttggcatggagttactgggtatgtatttgggcgcatagttcagtaataaattttaagtccaaaaaatgctgcagtgactaatgtcgttactgaacatttttgtttgttttgtttgacactgattatgcaggttccttatcttacttcctcattgggtgtcatctatgttctggtcaaaccagctgtaagtgatcaccatgtctatatacctgtaacttttaagatctgtgatatatgagatatctgagtatattaactacaaaataaaacgccaaatgtacaatgtttgcatcattaaaatcaggaatcatgttttgtgttttgtgtgcatttaagtaacaattatacacttgaaaaatctttgaatacacttcaaaattgttgaacatgtgcagacttatgcaatcatctctggggaagtggactcatctgaccaggtaaactcaggaagggaaaaaaatatttcttgatttgtaaatccaatcttgatatcccttagctttatttactcagttactgatcaaagtttggcataaaattgactttacttttgcagggaaaggcacaaggattcatttcaactgtgaaatccacagctgtactgttggcaccattgttcatgagccccctgacctgtaaacaagcaatttttttttgtttcatcttacaaatgttgcattgccatgtcgccaactccatgtagtattctgaatgtttgatttctcccttttctgcaactctgtttcagcttacttcatttcagaacaagcccccttcaactgcaaaggtttcagtttcctcgttgccggtttcttcttggtcagtcctattaattcttccatgtgtgttcatgaatctaaatagtgcctataactgcatgacttgactgaatacttctgcaggcaatatctttgggcatttctttcatgcttaagccagaagccaaatgcacaagagttgcagttccagatcagcttgatcatgaagcagtgcaagcaccactattagctcaaccatgaacaaattggcaaggaactgaactttgtacctgtacataccattctacctggcaaacatctgaagtttgaagattgcattggttgtaacgccacaatcttgaaactcatgttgccaaagctgatattgggtttatagcaaagatattaattgtacatatagcggatgttaatgttatgtctagtactaattagttacgttttagattcaatagtagccaagtgaagtttgtgtaagaaggtaaagttgcaggtaactttatctccgacttaagttaggtgactttaatatcactggcatatgggtccacagcaatggcacggtattacaaaagtgtgcctgcactttatagttgcaactgactgaaccaaggctgttctcgtgaaattaatatatatagcacttgataatataagtacattttatgagacaatattgagtttttcagttgaagtgattatctgaacttgtcacttcatacaatactagaactctaaaaccgaaatatataaaaaaacgagatttggcgggagaaatgtccctccaaacatttttaaagaaagaattatgaaagtgccggggattgaacacgagaccttggggttgaaatcacacacctcttaccattgcacgatcaatattcagttttgaaacaggtgagctgttcatagtgttcgtatggctattatccactgcctgtttcgtcagtcgcaactcggtcatcgcttacgcaagtttgatgcttcaacaaacagttttatatcggcatctttctccgacagataatcaagtcactgatggagctagagagacatgatagggaagcaagtcaatatttaaacacaatagtcgacaacttgttgctcataacgtgcgcaagcgcaatcgtcttgattatgtattattggtggtcacaagaatgggaagaaattttggggccaacatgtggcacacaaacagttcgacataaatggattggagaacatcaactctgaacacgcccaaagaaagtgacattttatataggcctaatttaaaatagattattcatcaaattattatcacgaaaaatatacttgattatatggatgaattaattattttaagaaataaacttaacaaatatctcagaacaaatggtctaagcaatgaattagataaaagtatcttaaaaaataattttagaggtatggagtcccataaaaaccctacctagaattgggatgtaattaatcccatacaacgaatctggacaggagcaatctaaatttgttgtactagattatatttcatcacacttctaggttagtttttttagacggagggagcatgtgacaataatctggcgaagaaggttcatgacgtgagtgcttactgaaacacagaatagttgctcaggattcctttttcttttgtgtccatttcgcatgaggagaaagcaaagacggatagacgattgcttgatatggttgcagcacctgtgatttggtcgggaagaaagcaaagatggccactgtttcgcaactctctgaactactgcagatatatcttgtctgtttgtttgtactactcgtaaccattatggcattctccttctttctttttttacatcagaaaatctgctgcaatgcaaatctgcaattctgcatcctttcttctcatcataacgcagacaagatctggcctacaaaatgtgcttgtgcttgtactgtaactacaattcggccagacagcctgaaactgccgcacttactcataccctgttcaactgctggctcaattgcttttttttttcttcaagaccatttgtagtataagtgaagtgtccatattttctcgcaaccttaaacttttaggttaaattagtccgtgaatgcaactcaatatgatatcacaaataaatgtctcaaatttgaaacctaactagcacgcaactaaataaaaaattacggtctatttctattatacacttgagatttgaggagtacttgtaaattgtctgttttttctgataagtttaaggtgccataccatttttttttaaattgtcaaagatgctatccatttagtttttttaccaaacttgatcaatacaaaagaaatcctgtccaaacctggcaatattaccaaattgctaaaattttagtgctaaaatttgataagttttattttggctgcaatctgaattgcatataagctcttagagcaggtacaatagcaagctataagctagctgcaaacatattttaaggagataaataaggagagagagaagagcagcgggctacagatttgtagccagctgtagcacggactccaggacgcagtgtgtgtatgacaggtgggaccaagtattaatagtatagtatgtaactattatatggatgagctattagattggctatagatgaattggagctagtagttggctatactattaaacttgctctaatatctagcactagtgctgctatggcatgtctgcatccactagtttatccatgcatgtgtaaaaattgatgaacagcagaacaagttggtcacagtttcagagtaaaagtagtaaaagaggccatcatcattcatctgctgggggcagtagtccaaatgaacagaacaggcagtgacacacactgactttctgctcatcttttgagtagagatcaaaagagatcatccatgatccatccatccattcacgcatgcgtagcacaattgcaaatgaaaaacgccgttttttcaacttgtttaagagcaaagctgcaacaatctgatttctactggtatttcaagctccattattgcttgtgcaggtgtgctgaattcttcttgcgggcacacaaattcatggccattggagcatgtgctcgtgatctctcctttttctctttatgcgatgcagattgtacttatcgttttttaggtcaagattggaggtgagggatcaggggatatgctgcactgcacgagttgtgatgtgatgggatgattgagcaccagccatgttggtcgattgattcttggggttagtagttttctaaagctttggtagcatcataccatatgtgttgatgcatgttgcttacactggagtgcaatttggggacagtgtatcatgaaaaatctgaagatacaccttcgtggatctgtggatgcatgaatcagcacatccaaaactattcacaaatagtagcggtgtacatcgtattagatatagaagttgggttttaatttattattagaaaatatgcacaaatacaattgtgtgcatttctagctgtcggcctgccgctataggcggtaagtattacttctataatattaaaacttttacttccctgaactctttagtctatcatttttttctcttaagtaaaagttttctcactttgatcaagtcacaaaacaataattaacatcaggagagaaacaaccgggatttcaacctgcaagagtggccctgagtcgatgtagcgaaagctatggctacagaggcggagttatggcgcctggcaaaggtggcaattaataccggcacttggtctctagtttcatgagtctctaggtcgtcccaatcggttgtgagattgtagcttaaattcttttttccgctccggtatcctatccccttttcaaattttatgtttgatttgtaaataacttttattcctcttaatataatgatacgctccttgcgtattccaaaaacaataattaacatctacaataccaaatgaacacactatcgaaactaacttgaaactaatacccgattttaaagttaaaagtacgaaaggtatactagctaattaaagaattcagggatagacattagtagaattattttcgtagtacgaagaaagtacatatccgttttgattctccccgtacacatttgcaacgtgctgtttgtattcctaaatagagaataagagcaagtttaatagtatagccaactactaactctaaatcatctatagccaatagaagagccaatttatacaatagttgcttactgtactattaatacctggccctacctgtcatatacacagtacgtcttgaagtccgtgctatagttggctacaaatctgtagtctattactcttctatctctttatttatctctttaaaatatgtttatggctggtttatagcatgctattgtactgctctaatagtagtactaatcaaggagatgtatgtggtacaaactgaagaagaagatatggataatagtatatatgagtacgacagtcacacttgactctctttacatgattaacaagaagagccgtaccgtaccacagctttctactactagcttaattagcgaagataattattaaccgggggctcatcttttgcgaaatctgtcgacgaccgagttggccgacagcgacatgtgcagagagacaaaccgatcgaagaatatccgtcgaccatcgatgagtttggttttcagaaaaattcagagaaagaaacagtgaacgaaacatgcacgattgatctactagaacatagtagtacaagaacaaattaaattaagttaatgtaaacacgtgcatttgtgtggtttaggttaggttcgttttggtttttgcggcgccgcacggccggacgaattttgaccttgcactgacgaaagttcaggttaagttggtacgcatatgcagctagtgagctcctagtgatattgatgatgatgatgattcagagatatatatatatatatatatatatatatatatccacccgtttttggcgccaaacacgcagatgcaggcgcgaataagttggtgggttagctctcactggaggtaggccggcgccggcgccggcggggacgagaattaatccggccgccgttgacgtagacgggtcaatgttattttatcttacgataatgaaaactttactgaactgagccagttactccctccttcccggaatgtttgacgccgttcgtcttattctaaaaattttgtgaaatgtgtaaaattatatatatacataaaagtatatttaataataaatcaaatgataggaaaataattaataattacttaattttttttgaataagatgaacggtcaaatatttttaaaaaagtcaacagcgtcaaatattttggaatagagggagtacatcgagatgaaataatcgtacttacaatactttcgacctttgtatggttaagatgcatagatagataaaaacacacattcgctctagtttagttttgaaacgaaagaaaacataatatacagcaagaattaaggtccatcaatcccataactaagatcactacccatgttcgcaaaacgattcctggccatggcgttccaataatgtcaggccatgccctgagatttgtgtactaatttgggtagtatatatatgtatacccactttgccactgaatttacttttagttatttacgtttttttaccttcaatgtactctacggaaaaacacataaattgaacatagcaaattaaaatttaaaagttttttcttgaaattgttcatttggaaatttttgaaaagctaattataggttattctatccatcggaacaatagggccgttatacttattatttttgaattgctctattaataaactttagttacccaacgtactctctccatctaaaaattaggtgatttatagagtttgaagtttgtcttgaaaaaataagttgatttttatactattggtttagtttacctggccatatatatatatatatatatatatatatatatatatatatatatatatatatattgatgccgtgatgcgattaaacttttggtaactaacctcactctatatatgcatgcatcattatccaaaaaaatatatgcatgcatatcatttgcatagtcaaggaccacacaattagtagctagcatgccttgaaaggccagtgtgattattcaaaacatgccatttccactgaactataatctgctagtgatttgtttcagctaatctgtgcaattgattccggctttttgtgcaagaagttcccacgtacaacacatggattgattaattaaccaagcaaggaggccgataattagaacaatagaatcaatcaatttgattaaagagaaaacatatgcatgtgaccgcaaataaacagtctgcttaacaatcctccgccagggattttacctttccgttctcaaaataaaaaccgctccaaccagtttacaaaaaaccaagtgaaaaccaatataacctgcagataacttttagtcaacttcgtatgaaaattaactaaaacggaccgatttataaattgaccaccgtcggtttcaaaaagacagattgattttgttgattttgtatgcatgtatatatatttatatttatatgagatcttcgcggtgtcaacaagtttgccataattcaattaattgacagatgatactctacaaatagatcagtactttttatttttagataatggaaaatcccggtcttttcaattaaaactataggcagttattataatgtttgtagcagatagcaaggccacgataatcgaaaacaccaactatagatagatagagacaacattcattcatgaatctgtcctattagtgaaccttcacccatcattatttattttattagaaaagatatacattgacattgttgtacataaatttatttctctgccattctagaatctagaacgattctggaagattcagactattaaagtctaagaaactcactataaaagtcagaaacttttctagagatgtttcttaattaacatcaacatgcatgaaaacatacatgtggtatcttgggactgttctttttgagagggaaatcttggaactattctaacaacccatttggttggccctcatgtcaaaacaatatgtttatgggaatttcaagcaaactgtccaataaagtatatggctcatttgattaatttattgtaggggagcctggcattgaactttgtttctgagtaaagataatatattatatagtaaaagttgtggcgtacgtgcaatttacaactataccaataaaaaaacataaacatgcagaaattctcacaatgagtaaaacaaaactgccctgtggcatatatgtacccatattctaatttacaactgccaaactctaattgacttagattctacggctaactcttacagatattttattttgaaatagaattccgctcagaaatcctgtcccacatagggaagaaattttctagacataaaaagtatcctttgtggcatatatatactccatctgatcataaatgttttaacttttaggataaaattcagtcaactttgttttttttagaaaattcagtcaaacataactttgactatcaataacttagttatagttataattatgttggatagagggaacaggttgctagcttgtaactctgatatgttataattatgttggataaagaggagcatccataatcaatgcttcagagatataggctttggctgaacctcgttaacaaatatcatgccttgatattatcgtctgtttttttttgaaggaaaggcaagaagattgccttatatattgatagagtagggaagcaaagttatatataagtcatgggagttatggtcgtcctagaccagtcagaacactccattctcgtaaagggtacatctcacttaggtttttttttgcccccgcaactgcccattggagagcttcctcctttattctcaagaggatgaggaatggggtgccggccaattttcctgaagatacacgagttccattctttccataatcctagaagaccaaaatgaccattaacttgagctgttctcgcgaagtgttatcatcatcagttttggatctcctatgacattcacaaatatcgatctatgtattatcggtaccggttttataacactatttaatttctcttacttctccatttccctctctcttagagatcttataaagttatctcttacatactgtgtaccttcttcttatcctcttatattttttccctacaagcatatacaaaaatatctatgtactctaatagtcaaactatcggtagatacaatatgcaacatataattaagcacaactgcattaagtctagatacccttttttttcagattgggcggtgatgccatcttaaggggaactactactaatgataagaatcgaagagtttctaataattaattgagtcgccgacatgcatggtgccctcgtgccctagacaaagtgcgcatggcgccgagccgaccggccgatggaccatttgctgttgcctgtcaatggccacagaatattgcccaacatatcgataagtgctgtacacagtaagccaacattgcacatacccacttcctctcatggttctatattcagattaaataaaaattaagaggtgtttcttttcgagaattacatagtacaacacagacactcacaacacacgcacgcaaaccccacaggtgcctcgttgttgagtacgtcgcctatcactgaaagcacaatgtcgtcaaaccactaggttacagccctttcgctcctttcattttttttaatatatgacacatttaattttatcgtgatgtttagctattcgtcttattaaaaaaatatataattattatttttgttacttattttatcattaaaaaaactactgtaacctattctttttacatatttatactatatttttaaattagataaattgtaaaacgttataaaaagtcaacatcatatataaaaaaacggaggtacataagtatatacttaattacggtgggtacaatccgaaatacaaacttataaaattcacatgtatatacacgaacttgtatactgcatagtaaccatgataaaatagtacactataactaatcttgctaaagtaaacagtgatttggacaccgtgcgcacatctaaggtgagcatgcatggttcgtttaccgtcagcgcaacatactcagaatttttaaaagcaatagtaaattagagggagaaaattttgaaacagacatattttaacctgatttgaacaattcctattatattcaaactaattcaaaattgccaaccaaaaatttcggcatcaatttcggtccgaaaattgtggacatcgccgccgcccaataatcggcctccatccggagcgaaatgacgaggggagagagagagagaggccccggtagctagcgaacagcgcggggggggtgtcgctagctaagctatcaaacagcagggcaaaacgtgcgggaaacttgggcggtagctcgcggcggcgacaaccgcggcgtgtgcgcggcagctgcgctgctacatgcgtgtagctaggcaagctgtccgtcctggactaggaaaggtagcggcaagcacggtggagcccctccctccggcgagacgcggtggtcggctgcgggaacaggacaaggacggacaggcaggggccaaggggaagggaaagatcggtttatactgcttcatccgtacctaaatacttgacttcgttaaccttttttaaatatttttaaccgttcgtttcattgaaaaacttttgtcaaatatgtaaaactatatgtatacataaaagtatatttaacaataaattaaatgatagaaaaagaattaataattacttaattttttaataatacgaacggtaaaaaatgtttaaaaaagttaacgacgtcaaatatttagggacggagggagtactattttgtatttttccctccattttgaaaagcaattttttaacaaaataagtgaggctcaattctttttattattactagcaaaatgctcgtgtgttgctataggaaaatatacatcaaatcctagttaattagagaaagagaaaggtgaataatactacagtaaagtaagtgagagaaccagagagactcaagattagtaactacaccacatttagctacttacgtcaaactacgcatgtaatattaaaagtcaaattaatatcgataattgatccgaaacgagaattagagctattgattttcttttttaaaattatagatctctgacatatgttagatctggaattcagacttgacactatttatttagacgatatagagagctagtcggatttggttgaaccaatctaaatatgaataaatacatgaaaactctctttcgcctcaagtttctcatggacgacacgtatttcttttcggatggtctttttttttttgcccttttttagagtcggacttttatttttttttccttttttatttcaggggaaactattggcgttggatgacagaaacactacagatcttttaaatatgtaaatatttattagattattgaaatggattatttacctcacgctttgaaaaaatatattttctcaaagaaatatttatttcctactattgtattacttaaaccacttgtttaaattatttggaaaatttatttctcaaaatatttgatgtatccttataatcaaacagataatctacggtaccaatctgcttaataacttgttttaaattgaggcaagtccagaaataagtgacttataatttctaccgaagtttccatgtaaacatattgttcctaacttaaatccaaggaagacaggcggagactttaactcaggatgtacacatactttgctaggcaatttccatccaaaatcttagacaaaaacggtctgactttgaggaattatcatgtgattcgattattcaaagaagttgggtatattgttcaaggatgtcaggaccatcccttttcttttgacaaatgaaaaagtagctagctcagcccataagctgtttaggacttctttgaagcacatgatttttatttgttttaagaaacacaatataatcgtaggcgctcgatcataacgtgagcacacccaccctatgaacgccttacccctataagcacattcgacagatccgactgacatatcttaagattaacgaagttattatgggcgtctcactgtcgacgggtacaacactgagctacgcttacttagcaaacacatgatttttaaaatgcagaaatagaaaaaaaaacacatgaattgattgtcacatgctatgcaatactacatgattacaaaatagaggaacaccacagataatgccttttgatggttcacaggaattgaaacacaagaattttgcaagaaaccatatgtggaagagagatagagagaatgtgcattgaactagcaaaggaaaataaaatataagacgtgagatcatgttaaatttcctaatagaatttgcattccataggaatttttaaatcctatttctttgatcgaaagggtgttatatagaaattctttcctaaaggattaattataaccctccaaaattcctttgattttcattcaagaacttagcttagtccaggaatggttgccttgtcacttatgctgaagttttatgtaaacatattgttcctaacttaaaacacaaatgaggagacttgagtgaggatgtacttaaacataccttgctaggcaatttccatgcaaaatcttagcaaaacggttttgagtccaaggaattatcatgtgatttcactctgtgagtgagtctctgagtatgatcaactacttaggggtatgactcaaccacagagcttcgtgttgatacctcaacttctttcccgttggtttcacatcgccatcgcttctcaggcatgggctaaatgaaccgagggctcaacgacggcgacctaaactgtgaggtgtaatactctactcccggtttcatcgtcatgggatttttgtttttcataaaagtttctttcaaaagggctaaaatgaaattacaatgtcacaatcagcacacttgcaccactgttgccggacagtgcgctgcaccggaggaggctgatggcgatgccgtcgctgataacttgtgaccttgatgtgtacatgtcggccctcgagtctaattgaccggcagctaagcttgttggctactagtagtagtagtactggtgctttctcctttatctcatgcttacttacaacctaattattagatggctaaaagctgattatatgctaaaacgatttattaacaaataaaaaatattgttttagtagaatttttatatgtgtgtgtttttagcggcttagatggtaatgctgaaaaagaaaccacgttaaaaatactgtagaattataatttcaaaattaagatttaaaatttaagttttgaacagcgactgattctttatatatagagcaaatgatgaggttctgaagcattgacatgtattgtcattaggacaccagagcgcattagtttggtattagctcagctgtaacaagttttgttgttttgcacaattgcacttaggcttgtacagctaccatgcatgcatggtaccacactacctgtcagatatgtgctaaaaacataaatatgccacgcataaagctagctcctccaacatcagtatatatgatatgaaattacagatcaatgacaaattggtcatgcattatcgatcggtagtcagttcagtcagttatgcttttgtgtggttcagaatagagtttggtgtgagtctatccaccctacatcttgcaagttgcaagtgggcttagatttgtggtgtaaagatggtccatggtagtatagtatatatctttagttctggatttctcccttttgttttttaaggaaactgtctattatgttaagttcgttgtgcttgagaaaaatgcatatacaattaaatttagagtaaaatacatggccggttcttaaacttgtggtgtggtgtcacttaggtccgtgaacttgaaaattgcacgattagatccgtaaacttgattaaatgtaccacccccggtccaatcgtcatttgactacgtttgaccgccaacgtggcatgccacgtaggcaacacttttgttctcaaccccttccacatataccttcacacataacttgccctgaccagtgcgcatttcaatccaaatccctcaaaatatccctaaatcggctagggtttcgacggtgagtttagcggaaggaggtcgagaggtagcggctgtggcggcctcggcggtgagattagcggtaggaggcagtgcagtgcagcgggaagctgcgcaattcggcttgcacgctaggcatccccatggattgtctaagctcgtccttgtcttgaagtcgccggaagaaggtgttgttgatcaagtgccagttgcgtaaggataagatcattttagagtgcagagcaatgtcaattgctaatcgggactgcattttctatacatgcaaggagaagaatgagagagaagaacaatttgaaaattatttttgggggattctggtgtctctatatagctacaaggagatatatgcgacatgttgtgatgtagaggaggctgggagtaaaattgttgcctgcgtggcatgccacgttggcggtcaaacgcagtcaaaggatatttggaccaggatggtacggggatcttaaagtcgagttcacggatctaaacgtgcaattttcaagtttacagacctaagtgacaccaccacacaagtttaggggccggccatatattttactcttaaatttatatggagataaataaagaaatttaattatatgctgcattagctgtttgcacatgtgaatatattttacatgcaaaactttgatcttttttcaaaaaatatattatgaaacgaaaattcgttcgataagtctatatatgtttgatgtttcattacctttaatgctactagttacctcttacctgcggtacattgcaacgggacataatccgataaacttggtttaatttttctcttctcccgtatttttctctcggttgatcaattgtctggtacagcagttttttagagcggctttttatatgtgggattagggtggaattccacctatatgaggttgccactaaccatttcttaattcacgatcactttatttgtaattaatctagaaaatcctaaaatgcaacaagcttatgaattttctccaaagcttgatggaattaatatagctagctcgctaccaattgaactattgaaggacggcgagccatctgattcactctagagacatacctatctaccagctcacagagatctcgacaactcctcaaatatatgctttctcatctaattcaggccatctattaattggccacttgagagagacgacatagctagctagtatctcacatgatctcaagtctcaacaacaactggaatatgctttgtgagctactccctctgttctatattataggtgtatttggagagctttagattcgaagaaacaattgatgggaatcctgttagtaagaatttgaagaagaaaaaaaatcagtttcaggtttctaatttattttcataatcctacaactataacattttagaatctgaaaaaaaaacctatattgtttggatgagcttttaattttagaggaagttacagctatcaaaagcttccccaaacaggtgatataagatttttaagtttatcataagtatttttttttgaagtttgatcaaaatttatagaaaaatatagcaacatatgtagctccaaatataattcattaatctatcgttgcataattttttaagtatatttgttttgtgttgaagatatgttacaacattcttctatatataaactgatcaaacttcaataaatttaacttagaacagccattgtcacttgttttctctcgtcgagtgacgtctagctaaggtccgagaaacaagaaacgagtgagtgtaccatgtatgtgcccatgccatgagttgttggaaagagtctcacaaaaaagacaaggaactttacctagtcatatgccaaataatcacaaaagatgtctctagtgtccagttgaacataaatagctagccctactggataaaggggatatgatcctgcacattggattgcaacaatccatgtggcggttttgttcttccggtgatctctgcaaaaaaacaataatgccaacggtgtcgaacgacagtgaaaccattgtgcttatgagatctctcccgtttccaagcccatggtttggagtagcctccaaccaacaggaatgtgacttgttggtgtacgtatgcaatatatgtgtgcaacaatccatgaaaaattttgtatgtatatatgctgatgcaatgatagattgatatggtacaagtgtccacatgcatccatgaaaatttttgtatgtatatatgctgatgcaaggaccgaatccaggctaatgatggtgatgatggaggtaatcacgcaactaggctatcaactagctatttaatctctgtctcatctgggattgattagaaaaagggaaggatgatatatttgttattgtttatagaatttagggcgtgatctagcttaatgattgatatggacagaaaaaaatgatcgtatgaatagattaaatattgtagaactaattgatagcttgaaaaacgttatgtaagtaatgttgatgtaggaagtttttagagataactttattcatttatttttttaaatgaacagcacaaaaggtaactttagaaacttggcacgaatagcccataccttcattttaactatttagaactcgcctagcagtaagactaggagcaggtatggtgtttttgttgtagtcttgtcattttgatgaactaatttgatgacgccaataggccggatagataacaatatacaaagaagtagagaaaaatttctactcccttcgttcctaaaatagacatttctagattgtttagtaaatattgaacataaggaagcaagatttcctttcagtcaataaatgtgcacaacatgtggctatgttaggcaaatccaagaaatgctttgttcaaatagatgcataatagagctacgaatttttacgtggaaaatctttacgagaaaaaactacaggcacaaactggcaattatcagtattgaggaattaattataatgcaagctagggaataaatcatcatctcacccttcccgtatttctagtaggaaaaactttgagtcctattgaaactataattaatccgaatatatagtaagctgaaatattcatatcacattatttaacataaatgcttatataatatatataatttaaattattgaaataattatatttgaaaatggatggcgattattgcaccatacaggcatgaggatggatcaacagtagtagtcaaatttaaacacaatgtggtggccgtaactatcacaagacggaaagacagtacagtaccgaaactgagcattcctttcagtccttactaaccatagaccattcccacatgtgctgttgtaatgttttatttcctcaataataattgaagaaagtgatatatatacatatatatgtggtgtttttggtctaaatgtttacacgtagtagtccccgttggcgttgagtgtaatattattaatgtttgttggcatgcatgaaaatattgttgctatctagagaagaaatttcacatgcatgtgcgtgatgaatcaataatggtgagaagtgcacatgcttatatatgtcgatcgatcgagtcgacaagatgaaataacagcatatgcaacatgcatgtaaccacacgagtccgtttctcacgctcactatcaaagggacacatctgcagtacccggcttgtgacagatgtacttagggcccattcgagaagtcagtttgtggaggctttttcgcgcaatggaaaatgagaaaaacatttgtacatgattaattaaatattagctattataaatttaaaaaatatttttattattttaaaaacatttatatagattttttttacggaatgtaccattcgagaagcgtgctaacataaaaaagtttgtgcttttgagttgaaaaaagaactcagttttattggtagattgggagcaggggtagtacatgccagttgcaacttgcaaccaagaaatttgagccaaattcagtggcaaacgttcacatctgacatctctttatcaatcaatttcgttttccattcgtcggttttaattccgtaccatctagtacgtagctgctaattaatggtttttctctataaattctttataaaaatatatacaaacatacatcttcagaaaaatattttttacggacggctaaaatagatttggagagaattaaggcaggaacaactgtctctaatgaaagcaggagcggcacctacattagatctctatggagagaagggaagagagaagaggtaataagggcatcaccaatgtatatgacaaagtgatccatatagatgggacccacataaatagtttatccctatggcaatgtccataatgtatagatacaaggtatcattaggagaagagagatgagtagagatagataatataatttattccatatgggtagtccatatgcatatggatatcttttgttattttttctatatagactagttgcacaatgttaataggtggctgaatggaatattctattgcttatggactacttttacaccacattgtggatgtcctaagagtaggaggctggagaaggaagaaaaatatgagcctccctaaacgaaaaggctttaaaaaatgttttcccatagtaaactagatgttgtctggattttctcatgtattcatatcatgtcgttgcatttaagtctaaactatctattatcttaaaacaaaaggacttgtcgtcaggcatacgtgtgcgcgagttgcctgtgaccggggatttttttttttttggagggggtagcaagtagctaggcgatgcatactgtcgatcgtggcgcggccggacggaccaccggcaaagatggagccatggatggatggccggccggataaagaaaaaccgtgtgttatggatgcgtggttggctatcgtacaaatacaacaacatcctgctgtcattttgcctggtacgtacggcggccaagaaaacagcgaaacggaacggaattttctgccgccctggaccaggaggaccacgcgtacgtacggcgtcgtcgtcgtcgtcgatgatcgacgagaaaaggtagccgatcgatggctaatcggggactaaatttgagttcttatcatatcggatcggatgtttgacattaaataaaagtattaaacgtagattaatgataaaaacttattttataatccttgactagtatgtgatgctacagtaaacatatgctaattatggattaattaggcttaaaaatttatctcgcaaattagctcttatttatacaattaattagttttattattagtctacgtttaatacttctaattagtgccaaattaatatttgatatgacaagcactaaaatttagtctctggatccaaacaccacctgagtaagggattgatgcatatatgtccgagcattcacacgaacaacatatataaaaaaatattttctaaagacactaaatatagaaaagaaatatcattaattttttttagaaaagagagcatacattaagttatgatcgattacaatcttacaaaagacgaagctgcttaattaaataatacacgttggatggtgcatcctctcgccacacgggcggagtgagatgtaccaaatgtttagcaaagttagcaagttcatcagctaccttatggcacgcctgcatatcaggaagaagacccatgtgaggccctttgtctctgggatgagggagctcagcttgatatgttgcccatcctcgatagtaacaagtcggcaaccgaggagcaatcgagctgactactgggatgctggtgttctacatatgctcccctttttcaacttctactccctttttcttcgagaactcttttctcacactggtaaacagtgttactttttttaaaaaaaatctatagaaaagttgcattaaaaattatgttaatctattttttgatttttttaactaatacttaattgattatgtgctaattcattattccgttttgtgtattaggacggatggattccgaacccataggttcaaatggaccctaatatactccgccgccagcttcaacccttctttgcaagccatagcctccacatccttcgcagcagcactaatatctattgggaacaaaactgaaatccacactaaaggcatgctcatgcctgctatatgaattagctagataaccagattttttttttactttatgtagatcttcaaaaaaacattgaaagttatatatttcaaagtaaataatgtgtataaaagtgtgttctgaattgtaatggaagcaaagaaaaattattttaaagtcacatacgtgttgctcctatgtaacaggaacatgggtatgttagaaggcacactcatggtgagtatggtgatgtgtgcgcgcgccattcttgtactaaagaatataatgttgtaaagtattttgaaatataaaaatgaaggtagaagagaatgtgtattaatatagtttatccactattaatttgagggaagtaaagttaaagatgtcagggttatggataaggtatacctcctatcctacaatctatagaatatacggatatgacatactttcacgtatacgaattatccccataaacgctattggaatctgttacaaattatgaaagatatctcctcgagtcaagcgatttccaaagtcctacttggaagggatagagtttctgttgtaccatgcaagatccaatgtctctaggtcttacttggggtcaagatagtccacggtataaaagggatccctagggaggggtgtaaagcatcgaatctcatcgccaacacacccaccatagtttacgaagccagagtacgcggagccaagtcgtcggaaaatcttgcgagtacatcgactacgatcttgtcggtatcatcgagttcgtctacttcctttgtaatctgtggttttccatcatcaatcccatataaactggagtagggctattacttgataaggggcttgaaccagtataatccttgtcttctgtttgcttgatgtcgtattacgtagatcctcgttccaacgtaccataatatcctaatcatccggtctacgagtatcactcgtcgacaaaagaggctgaatttatactatttacattattaaatattataatcactattgttttgtgctaataaagggaaggaaagttaaaagaggacgttttgtatccatttatattaaatattgtagccattattgatttgtgctaataaaaggaaggaaggttaaggagggtgaatttgtattaatatagtttaatcacaatattattttgggcaaatagaggaattaaagttaaaaaggacacatttgtacccatttataataaatattgtagccactataaatttgtaccaattttgcaatttggctatttgcattaatgtagtttatcccctattagtttgtgctaatcgagggaagaaagttaatgatggtgaatttgtaccatttatatagaacttctgttccaaaataagtttatatttggcttcttcagttcgtcccaaaataaatttatttttaagcaattattgcattgggatttgtaaaaatagaatatatatatatatatatatatatatatatatatatatacatcggagtagttaaagagagaaacaattgcattgcgatttgataaagtgagagtatttttagctcttttttttatattttatattggtatgtatatgatggatgaaaaagaacttattttggatggagggagtagtatattgtagtcactatcaacgtgtactgatatagggaagacaagtaatttggaaggtgcattcatatcaattcatatattaatatagtgttgcgcttataatttgcgttaataattgtctgatggttgttgacaatcaaatcgatggcattggctttagagtcgactgggttgccaactttttcggaggtattgcttcatcccaaaatataaaaaactagtaccagattagatattttatagtactacgaatctgattatattgtctgtcaagattcgtaatactataaaatgtttaatatgatcttagatttttatattttaaaataaagggatcgagtaatgaaggaacaaagatgcatggtagttggcaatatttgtccattccacatgccggagatagccaaacattatggttaggctcatttgctcgcatctctaggctctagctatgttttaagatgtggaaaaaaaaattttcctcttctattccttaatataatttacccagtttcgagaaaaagaaaagcaccaacaaagtaaaggaaagttaacgaggttgaagtatcatctgttaaccattgatctcacaacaatagcatgtttcatcccaaaaaccagctcggaagcaatatttagcagctataagttgtactctgattttttagcacacactttggacccagctcagcatgcaaaaatcgctgggacatagctgtgtacgcgcaaaaaatagaaaaaacaaaacacacaataaaagaaatatagagaggcaaagctaggctgccgggaaaacgttgttaaatgtttagcgcacgtgtcccatgtgcgccttcctcgtccacacgcattatatatagccatcgcctcctccttgactcctccccacccaagctcacacatctccctctctccctcttcttcttctcctcctctcgccatggatgccaccaccaccgtgtccatggagatggaattgccgtggggcgcgcggtgcgcggggctcgccttcttcgcgttctcggtgtgcctggcggcgctcggcgtcgtgctcctggtggcgaggcggtggccgtggtgcagctgccatgtgtgccgcgcctacctgacggggtcgtgggcgagggagttcaccaacctcggcgactggtacgcgcacctgctccgccgctcgccgacgggaaccgtccacgtccacgtcctcggctgcaccgtcacggcgaacccggcgaacgtcgagcacatgctcaggacgcggttcgacaacttccccaaggggaggcccttcgccgcgctcctcggcgacctcctcggcgacggcatcttcaacgtcgacggccacgcgtggcgccaccagcggaagatggccagcctcgagctcggcagcgtcgccgtgcgctcctacgcctacaagatcatcgcccaggaggtggaggcccgcctcatgccggtgctcgccgacgccgccgaccggggcgccgtgctcgatctgcaggacgtgttccgccgcttcgccttcgacaacatctgcaagatctccttcggcctcgaccccggctgcctcgaccgggaaatgcccgtgtccgagctcgccgacgcgttcgacgccgcgtcgcgcctctccgccatgcgtggcgcagcggcgtcgccgttgctgtggagggcgaagcggttcctcaacgtcgggtcggagagggagctcaggaaggccatcaaggtcgtcgacgagctcgcggcggcgatgatccgggagcgccagaagctgggcgtcggcagcagccacgacctcctgtcgcggttcatggcctccaccggcgtcgacgacgccgccgcggacgacaagttcctccgcgacatcgtcgtcagcttcctcctcgccgggcgggacacggtgtccaccgcgctcaccacgctgttcatgctcctgtccaagaaccccgaagtcgccgccgccatgcgcgcggaggcggaggccggcgacggcggcgagacgggcgccgccatcacctacgagcacctcaagggcctccactacacccacgccgtgctgcacgagaacatgcggctgttcccgccggtgcagttcgactccaagttctgcgccgccgccgacgtgctccccgacggcacctacgtcggcggcgacgcgcgcgtcatgtaccacccctacgccatggggcggatgccgcacatctggggcgccgactacgccgcgttccggccggcgcggtggctcaccggccccggcgcgtcgttcgtcccggcgaacccgtacaaatacccggtgttccaggccggccaacgcgtgtgcctcggcaaggagctcgccgtcaccgagatgaaggcggccagcgtcgccgtcgtgagggcgttcgacgtcgaggtcgtcggcgagaatggccggagcggcggcgccgccgccgcgccacggttcgtgccggggctcaccgcgtcgatcagtggcgggctccaagtgagagtcaggcgccgcgttcacacttagacagctaggagacttcacttctactgcaacaacaaactgaaacaagttattacaggcttgtacatagaaaaataggagaaattaattagtagggaaatttgggtttctaatgagacaaaacagaaaattcagatattgattcgtgttcgtcatggtttcctcgtatggtgatcattctgcaattggacattgttagttgaaatcacaaatcgggtaatcgaaaacaaaagaaaaaacatacaaaattgggtaactggagtagatggtatgttgttgtcactaatatgaaaacaccataatatctgaaagatattccgtcggacaggctttgttgcatctgatttggcacattgttgttccagtacaatgacacatcactgatactgttattgactagcactacctccgtttcaggttataagactttctagggttgcccacattcatatagatgttaaaaaatctaggcacacatatgtcaagattcattaacacatatatgaatgtgggcaatgctagaaagtcttataatatgaaacggaggaagtaatacaaattttgtttcttttcatctaaaaacaaagtattttttacaactaatactgtcagtttgcaggttcccttccctgtttttacttctggttagaccagcttaggttaattttcctgcaaaatcacatttccttgtaagcattactattacagaagatattcgtcggaactaaatatagaatgaaggtatccaatgtaccacatttaatttgcagcagtaatatgaaggtttgccttcaatgcatatcaaaatgtggaaaatttctgaaaatgtgcagaccagtgcaattactgcagttaataagcctcaatttcaggtatactcaaccaatatcacttttattggcataatctgttgacctgggcattcccaaattatcagtgtcattgactcaagtctcatgctttcgcacggagagtcattgcagaatacaggcataaactcacaacaattcccagaatcccagtattgccaactactgccatgctcctgcgttggaatgggattgaaattattgggtttagtttttttctaaccattttttcgggttgatttttcgcgccgaaacactggtttttaggtggaattgtttttttaaggtgggtggggggaggaggagaactgtgttggttaactgtactacaccagaagcaactgggaacctatcttcttactggagtaccatgattttgctcatgtctcatggtattgatagaagagatgaagatagtgaaaaagacagattcctacatttcctgtatttgtctccatctctgagtctgaagaaatgcaatgtttgacagtgctcatcagacgattgtttttttttaaacgaaccgcacaagacagtgcgagtttcatgtattgataaagcaggagaaaaatacaagttatagccctggaagactatagcccagaaaggaaaaaacaaccacaccacgcacctacaaccacaaacgctgcaagagcgaaacaggaaatcttcaagacgacgtctccaagaaggaaacgacaccaaggatgccgccgtctgtgatttttgcgctgttgtgaacttcagaacttgcacttttgtaactttatcttatcttttctcctttcccggttgaagaacagtcgcaacacgaaagaagaattcagttagtgattctggtggagaagcaaaggaaagaccttgaacgtgatgaaatagacagtgtccaattccaaaggatcaaagatgatatatgccgtttctgatgtatcctatgctatcctcatcgaaagctgcatttccatcgcccctcttttccagcgtcattttcagctatccatgatccccaaacaatatatatagccaggttcaccgattactagttcatctataaattctagggagaacttttgctggcattgatcatctaccttgaaaatacatttggggacagtctgttcatattttgacaattgttctttaatctttatcaactgtgttgctcacgcaaagaccgggaatactcatttgagtttagtaaaatgcttcatttatcctaaaaaaaatacgtcactctttgacgttatcttccgttttggacgtcggtcaccgacggcgatgggagcgaaattcgatcaacaaagaccgatcgctgatttcagacattctgcttttctttggtttgaagaagacagggattacatacaaccagagatggaaatgtctatgtttatgtttattgtggtgtactaagtaggaatcttgtttttaatcaaactgtaattttataatacacagctgtttgtcctgcattcgctgcaataattggttatagcatctttgaagcaaaaggacagaacgaattccattatctttaaaaagaccgcgtcactcacaatttgtcacctgcataaaaacctaatatctccattactagaagtacattactgtacttaattccgacataatgaatcatggatgtaataattgaaacatgatgcagacagcacgtcagtattatcttgaccctgattctgatcctagtcgatgcataatgccataatgcacaactcattaatcgcaacgtgcgatgcgtgatcagcgtcttgtcatcgctagtacgacaaggatccacaagaaatttggttgggccacaaatgctgccaagaatccacacaaatatggataaggaattcactagtggtttcagaacaagtccaaatatgatagtacttatttggtatctgttcctgataaaaagaactggatagttgctcatgcttctctctccttttgtgtccaatcacatactcacatgaagaaaaagatactactgaacagactgaacctgagcaagaaattgtttgtttcccctatagctgaacggcttatcagtgagaaaaaggttatggataaaagttttatatatcttaacggtttaaaaataaatgctaaaaaataaattacaatgaaaaaaactaactttaaaattaatttttaaaatttaaattttgccagcagcttatataagatgaaaagggctcctctgctagagatgactgaacagctcgttcacaattcctttcagacaaaggcagccgtggttttgaagggctcctcaagatttgttttgcgattcccaaacattgtcgattaattactgcaaatttcactcaaacaatgcgtctttctcatcaaaccgagatagggctgctgttgttttcataatgcagagacgtcctggcctgcaaaacgatgagtggatatttctgttgttatatatactatatatctacctcttgcatgtgccaagatgccaatggaggaagatgcaaacgatttacaagaataactaactactggcaactcgaattgggcgtaaattgcaatagaaataggcgtgtagatggttgactaaaacactagcaggggtagatccctatagaatgactaaatcatgagtgatgtggtcggtcaattgcagcgtcttatccaggatcacccaattacatttctgtatttttattagcaaagttaatttacatagcccaagaacagatcagccaatgatcggtagacacatgctccgatgattttatctctagtcgtgtgcttgttaagcgcatcggccattacattctttgtcaagctgacagcctgacactgaacactacacaaggacttggattcttgtagctcttgtgttccactctgtcagtatcctgattcatatcctagtatcttagtatactacgatcctatcaagccgaaacgataccgatcccatctagtatcttaattttcatagtatcttgattctactatttattactatacgatcctacaaaatcttaggtgatatctcgatcctacgatccctacgatcctacaaaatattattttaaataacatggtttggaaataatgtaaataaatatgctcaattttatataaaaatcagttaaatatatcaaaaccagcgtggtttctcttgataaatgtttctatttgcatgacatatatcattactacatttattttatatagaatggctatatataattaatatagatattaattaaacttaaaaaaatatcatagtatcccgatactacgatacgatcctacgatacgatattactttgagcaaaacgatactacttagtatcctgatcctgacaaccttagttccactcctgggctactctattcagctattgttggttatgcattaatttggctttgtgctcagcatgcatgatatgtttgtaggtctggcggtgttcgatcttgcatagtgatggtaggtgtggtgatagtttttgtgtgtgtaaggcttgaatctttggacacatgcatgaagcattaaatatagataaaaataaaaactaattgtacagtttgtatgaaaatcacaagatgaatcctttgagcctaattagtccatgattagtcataaatgctacagtaacccacatgtgctaatgatagcttaattgggctcaaaaaattcgtctcacggtttctatgcgagttatgaaattagttttttcattcgtgtccaaaaaactcttccaacattcagtcaaacatctaatgtgacacctaaaaattttcttttcgtaaactaaaagcattgttggtgtgtgatggtggttttgtctttttctaattctagtctcataggacggtagtcttgtcatttttttcctactatatcatttttttggcactatccgatgttatttgttttttaaaaagcatgcatgatacgtagttctccttctagacaatagctaccatgtttttagtatttaattgggatatatttgaaattatagatcagatttctctcaaaagtactaccattagaaaaaaaataacatataatttgttggggtgaataaatatgtaataatagaaactggtggttatagttgtattttataagtggggtcaaatggtcaatatccaaaacatgaacagcatgtatttatgcccggagagactagtagctactactatgttcttaaaaaaaagataacaccttagctacgaatatagacatagctatgaaccctagctaggattgagttttttttttttttgaaacggaggtggtagatgatatataaaaagtaagttttttttaagatagaataaatcttggccttacgaagaaagtaagtggctagatgataggaacaaagtgtcatactgctcatttggacggcaccgagaagagaaatggaggccgtgttagtgtctccttttgcttcgcattcaggccaccacttcaatcttgaggtggacatgctcagttaaaggaaattttctagccacaatttgaaacggatggctgcatgcatatgcaatgaggctcaattgaggagttgtgaacgtatccaactccatgaccgtaatagttcagaaaaaaggagatgaaaaacatgggctaaatcctttcttgtcatacttctgtgcacgaaatggataagaactttggggcagctaaccagagttatggcaaagctagcacacatatgccaatgcagccaaagtgccaggtgatcaaagaggctttcattttctttgacattctgtggaacaatcaaaaccagtcgatttgatagtttagcggtattagtttttttagcacgtttcaggcatatatacatcagtttaccatccagctgaatcacttcaggaaagagatagtgaagctactaaatcacttcagaacagttccaaaattcagcatcactttaaatgtcaagcattagagctgacgaattggagatgaagacaaatacatgagttctgcagagtcagtgaggtaggtgttcatgaaaattgagtagccaagaatctgcgcatagactgtggaaacagatagccgtgatgaagcactgtaacctatactacagcaactaaaaatgcccatgtatggagcagtttcagtctgaaatggcggctttaatagtaatgtaatttgccttcgaattttctaagataaggattcgtgtgaagtactccctccttttcaggttataagacgttttgacttttgtcaaagtcaaattgctttaagtttaaccaaatttataaaaaaaagtagtaacatttttaacccaaaacaaatttattatgaaaatatatctaattattgatttgatgacactaatttagtattataaatattactatatttatgtataaacttagtcaaaattaaaacagtttgactttgaccaaattcaaaacttcttatacaagaacaaaagtatatctcatcctccccggctcatatgcaacatggtgtccgtattccaaaagtaaaatttaaaagttaattatgctatcgacctttcagttttacgctaccgtttaattatcagtcttattaaaatattaatatagatataaaaaaacatgagaacttacctcagcagatccgcacctgttggtagcgatcggtcgatgccgcgaagcgggctattttttccccccacgtacttcgtgtgcgccacacgcacgcacgctcgatcgatcactatctctctttctctttcttcgtgtcgtcgacttcgcatgcagccgtcgcgtacggctacagctcgacggcgacccaccggagctggctgcccatccggcatccactccatcgccgccgatgctcagctcgctactcgtcgcgggatgagcaagataacgacgagcgaaatccagctggactggacggcgagtcaatactatgcttgagaagagacagttgtattgtgttgtgtgggttgacgatgttgagatgtaaggatagaatatggcgatgcatgtccaaatttctggttacagttggcacagaggtgatctcataacatgcattgtatgcaaatcatggtttgcaaaaataatttggtcactgatgaaaaccgttcctaattaagtggattttagttttatatattatttaacttggcccctttgcctagcggtttctcaatttgtaccagcttgacacaagttcgatgaccagaatttccgaccggtcatattcatttgtcaacctgattgtaccgtggttgactatttattattgaagccttgcaacatggacattttggattagaattagtaccttgagctcctttcgaaagcaacaatttctgtagaattttaacaggatttagttgagttccttccaaaaaaaaaaagaaaactcatttcaaacttctctgctgccaacgaacgaacagaatgggctggattccaacagaggggcctttccctgctagatcagcacgtccggcccatccaagactagcccacttaacatatcttatctatggcccaaagctcacaaaaccagaaaagacctcggcccaattaccccattccgtccaactccaactcatcctggccgtccattcccgatcagaatccgctatataccctctcttccacccgcgccacccactcatccccttcctccgaaaaccctagctccaccacctcctcctccgccgccgccgccatgaagcgcaatccgcgcgtgacgagctcccggcgcaagtgccggaaggcgcacttcacggcgccgtcgtccgtccgccgcgtcctcatgtccgccgcgctctccaccgagctccgccacaagtacaacgtccgctccatccccgtccgcaaggacgacgaggtgcaggtggtgagggggagctacaagggccgcgagggcaaggtggtgcaggtctaccgccgccggtgggtgatccatgtcgagcgcatcaccagggagaaggtgaacgggtccaccgtcaacgtcgggatccacccatccaaggtcgtcgtcaccaaactcaagctcgacaaggaccgcaaggccatcctcgaccgcaaggccagcggtcgcgccgccgacaaggccaagggcaagttcaccgccgaggacgttgccgccgccggcgccgccggggcctcgctccaggagatcgattaggctcggggagatatatccctttcctctctgttcgtaccgtctctcctattattatcatcatctagttaattttaatgctacttgaaatctgctactttatccctgatgaaactgtttgtcaacgtgagttttggaaccttatgtggatctagtctgatgccttggattntgatagatcaagaactgaactcattacatgttttattgctcatgctttagtgaacgttcaaatctgatgctgaatggtctcattttttgttgttatcatgcctcctgttgttgcaatgcgtcac

SEQ ID NO: 5127 - DNA, 33643 bp, Oryza sativa
ccggggaggtagtgcgccacccgggagcagacagcttggaaatggatcgtctccaccgccggcgacatcgtcggctgaaaggagaagctcgaggtgaggtggtcgtctcgcccatttctacatgtaccttgtcccctcccaggaaaaggccgtgcaagttaatgccgtcatttctctctttcggttgcttaattcgtgtaggatccgttcctggtacttggaggattgaacagagtaatttagtgatcaatttgtgatgatgatcgtgcaggtgcgttcagtttggaaacctctctgaagatccatgccatcagtttgcatcctggtgcttccattgaacaccaacttagttatgttttcgccaattgtggatgtaattccattttcaatgtcagtgagttagctatatgcttgatagggtaggtatgtcaaatttatagtttaagtaattcattttctattgattgctctttcacagtaaagagttgcgagccagagtttctgatatcttcttgaacttgtctttaaaagctatcgacatatcgggcgtttcgatggtggtgagtaaatttgatcattggactctttggtactgaggcagctgattgtatcacttacatttaatatctgagaatggattttaacgaccaatatatatagttttcacttctcagtttgcaagatattaactctgctgtggttaatctctgggagaatatcttggttgtagttttgaaaaattaaatcgttggtatcctatccatctagagtggagggtaatgtaaagatggcaacctcatttggcaggtcattgatggactgaaatgtttcatggaccttaatcttccattacagacgacattcttagcggaagttcctcttgccaaatccttgactggggttctcaaaatctgtggtcaggtgctgcctgaatttctttaaaatttacaatcctcgtagcaggattggcttttacttgttaactgtcatattataacatcactcatgctcttcttgtcaccaagcagatttgtcactgctgtaagttttgactgttttgtgttccttttcatctaattctcatgtgtcttcattaatgatacacttttcgttggagtagttcttaacttcttgttttgaaaatgcagttaagtactttgcctgtaagaagttatactcaatgcatccaatgttgtcagacgaagaagttacagtaacaaggtgcagactgctaaagtcaccgacttctatgattgtgatccagcaaatcctggacagccctttgcaccattcctctttttcaagcgaagcaaaaaaaggtacacaacacacagtgaatcagtgacagatctctgtatctttaaagtgcatgaacatgtctaaggagtaacttctttttatgcactcctttttggtacgatcctcttcatcttgctctcttctcccattccgtgcatttcaaacacatcaatagattcttgtgctgctgagctgatggcaataagaaagaaaagcttctctgcttcagcatctttcttcatcaagtgttcgtcctaggctcctagtaatcactgtaaagagccttttggactggagctagatggctagatgctgaacaatcaatcacaaaatggaaggtcatggtgtgttgggaccatgatcagcaaatggcatgttgatacatcacgaaagctaagttttgcatgtacagcttggtgtgtcatatcaatctatgatcacctctgcttgctgctttaagcctctcttcttttgtaataggcaacctgtgattttgttctctcctatgattcctctgaagttaagtctcagtggcaagcaattccagcattttgcagacaatgatccaaacaaaaaattaaaattcctacttatcttcatgaagcttccatgcacaagcttgttgtgtattactatcacctctgattgctgctttaagtctcttcttttgcaggcaacctgtgatttcgttcaatcctacgattcctctgatgttaaatctcagtggcatgaaattcgattgcgttttgcagacaatgatccaagcaaagatattccttctcatctccatcttcggagacgaataaacatggacacttgatgcagaagcctgtcttggagaaacatctctgatggatggacgaggcaattcagcagagcccttctttgtcatgactaccatatctgtctctctgcacaactcagatcttctccacaggtaactaaaatagttaagagcacatgattaagcatgcattaaactagtcaagtaccctccttttggcagcaagctcgatcgagcttatcgtaatccctgtgcaaaggtagttcaggccaaaaacagatacattgattaattgggttagcacaagtattaaatttgcaagttgacacttaaagaggggcgatgatgcatcgcatctcttgcaagcttgcctccatggccatccaagcctgtcagcgtcactgattatactaattaagcatgcagtgtaatcatgctttcatgctccatttgttttgttgtttgtgttgattgattggtgtgcgagagtcctattttttcatgaaaaactttgtgcccgctccttttccttcgatttggagatcggccaagttcgcctttttattatgaggcgtggagaatgtcgtgttaaaaaatactgtatgcaaggacatagggcagaggaatacctgcttataaaatacggcttatgaaaagagtagcctatcagtttgtcagattaattatggaattgtgcctgtggttacgtcgaatgccaggtaaatgaacttaatagtctaatcttaagttgaaattgtaaaactataatataatcaatcctaaaaattgtgtacacgactacatgagaatatgatatcaatcaataacctatgtacacaaataatgtatacatttattacaaaataattaacagaggcctatatatatttacaaataaatgatactccattcgttccaagctaaccaactaagatggagggagagtgtatgatcacccgcaagtccggccttatcaaatggtaattttatcatcttaagaaattattaggacgtatcatattttgtagaagaaattttatggtccttgaaaaaatacctcgaggtatctaaattttacactaaatttattggtaccttgaggtacttaagtaatagtgtaaaatttggtacctccagatactaagtacctcgagatatcaaaaattttagtgaaaaaatttagatacctcaacgtaatttctcaattaccgtaaaatttctttatcaaagagtacagatttctgatacatttgcgtattaattaagcattctgctagctagctagctatagtgtgctatggtttcaacacaagatctatgaaagctctgatatcctcaaagaaagggagaagctaataattaactagctaaatcttttatctcatccaattgcagtatggtttatgggcgtacatatggccatgcacgaggataaacgttaacgtccctctctcggcatgctaaatttagcttttgcccataaccttttatatacatgtatatactccctccgtactaataaaagaagtcgtttaggacagcgactcagtctccaaaacacaactttaacttcttatttctatatttattaaaaagtgatatatgtatatttttatgaaaatattttttaagacaaatctattcatataatttttacattttcaaactcaacaacttaagagttattcatgatttatatttctaaagtttgacttaaacattgtcctaaacgacttcttttacgagtacggagggagtactatatactacatatatgtggttaataatatctgcagttttattgtcactaactcgatcgatcaccatcagcttgatcaccatatatgattgttctacagaaaaggtgatcagcttggtcaccataattgtactagaaaattagattggaggggtcccaggcaatgcacgcacgcacgagttcttgctacttttagtttgtgaacgcatcaaactcaccccgttgattagcggtagctagattgcaatgtgatactgtgattaatctgtccttaatttgcaaatactgttggcatgcactagctaattaagctgtcagcaatatatagcatctgtaaagagaagatgcatgcacatggtaattaagttgcatcacagtactagttttcatggcttagtaataattagcacttgctgtgtacatccactttgaatgtaggggttggtttaatataaaccattacctaaaaaaataaagtaattaacacgtggaatgcgtgtggatgccgatcgactcatcgatcaatattgttcttgagcagattaagccaaatcaaatacgtatataggagtatgaagataggatagtatgtgtacgctgtacctaggagacttctaattaaaggaagaatctagactctgaaagtattggtctgacaaatacagcattacttggtgaccaaagctaatgtaatttaaaaacaaatcggtcgagtgatctatgcatgcatcaacaattccaccaacctgcaaaatggaattaaactgaactctcttcgtcacaaaataaaccaacttttaggatttaaaatttattccaaaataaattaacttctaccttgttacctaccatcattccgtaaatcaacaagttttatctcttcaatactccacacctacccactcattaattaggggcattttggtcatttgctatttccttgtatctatcttaggaagctaaggttggacatagaatgggacagagggagtaactctgtaaggatggtttattaagtggtgatgtgtgtactgctctgctactgcatatgtcaaaaaggttgcgcgtgatcgtgtgaggtaggtctaaaaaaaatatcataaacccttttagatctcattcgtacgtcatgctcaccgagatcgtaaccaaccatatgatcgattgatatttacttttcggactatatatataacatcatatttgtattaataaatacaactaatgttttgcagtactaattataaatcttatactgtaaatttgaaaagttaatactccctccgtcctaaaatataagcatttttagtgtgtgtctgattcatagttaaaagtggctatattttgggacgaaggtagtaggtgtagtttttttataatacatactacataagagaattatgataaaaaaaaaatttattacctacttaaaaaataagggagaggtagcagtgtcataggagtattagtgacaaaaatcaagaaaacaaaatatgacaccgtatctttgaagttgaactgtgaactttctggtcgatcgaagttgtgcgtaattggaatgtgatgagaaatatatatacatagtgcattccagactagccagctgaaaatgatagggcaagctcagcacttacaatgagcacaagatggtatgtatacattacatcctcatccattaactaagggtgtgtttgaggagtaggagattagagtgattgggaagatagctcatgattaattgagtattaactattttaaatttcaaaaatggattaatatgattttttaaagcaactttcctatagaatttttttgcaaaaaatacatcgtttagtagtttgaaaaacgtgcgcgcgaaaaacgagactcaatctcccctatctcgccagaacgaacatagcctaaatattcctcgcaggccggtttacattcaagtgacatctcacgatccatatactccgtactcgtaaaggaagtcatttaggacagcgacacggtatccaaaacataatttgacttcttttttctataaaaatatttattaaaaagtgatatatgtatacttttatgaagtatttttcaagacaaatctattcatataatttttatattttcaaactcaataacttaagagttattcatgatttatattctcaaagtttgacttaaacattgtcctaaactacttttttttatgagtatggagggagtatattataaatcagtacgtagttaagtttgttgattaatttcacctatataaatttcatggatcgagctggggtgcatgacgtaagcgtgaatgacaccaagtgatgcaaatttctgttgttaattcaaggtgtgtgtttagttcctgaaaaaagttggaagtttgggaaaagttgaaagtttggaaaaaaagttaaaagtttatgtgtgtagaaaagttttagatgtgatatgatgtgatggaaagttgaaagtttggggtagttgggggtgaattaaacacggcctcagtcgatcaagctggtcacggcactatgcttgcggaagaggattctctaacttacttccctctgactttaagtcactgatatgtactccctccgtcctacaatataagggattttaagtttttgcttgcaacgtttgaccactcatcttatttaaattttttttgcgaatataaaaaatgaaaagttgtgcttaaagtactgtagataataaagtaagtcacaagtaaaataattaataatttcaaaaacttttgaataagacgagtggtcaaacgttccaagcaaaaactcaaaatcccttatattatgggacggagggagtatggttcactggatagagggtccacacgttagtgacacaagtttctcttatattataggacggagggagtagagttcgctggatagagggtctacatgtcagtgacacaagttagaggaaggtaagttagaggatcttagtcccatgcttgcatgtacgtactcaattcaactccatccatttcatttcaattaattacatcagcatttcaattactcctaaccagcatgcatgcatgcgcgccctgttggatacggaaaaacggcgtgggtatccatgcttgactgccgcgtaagcacagatgcatgcatgccaacgtacgtgacgtcgctaacgtgtgcccaattaatcccagagatcgctatacacacacgcgcgcgtataatatccaactgcatgcacacttgcagaattttcgtcgagatatgatatatatacgccatccatgacgtactgaggcccgttcgaatccagttataaaatgagaaaaaagaataattggcacacataattaattaaattttccctgcaaaaataattttcaattatttaaaagttgaaaacttgatttgtctaatactagcaactttaatatatataaataattttttttgcaggaaatacacctaatagcagtttaaaaaacatgcaaacaaaaagcgagataaatttttttctccctccatcccattttaagtgtaaccatgatttttcgtgtccaaatttgatgtcttatctaaaagattttttaaaaaaatttaaaaacataagtcatgcataaattactattcatgttttattatctaatagcaataaaaatactaattataaaaaaatttcaaataagacgaacgattaaagttaggcacagaaacttacggttgtacttaaaatattttaagactgtccccaagagaagcaacctaggaggggaacaatgaatctgtaccaagagttgtctagatttattggggttgtctttttttatttttacagacataggattgtctagattcattggggttgtctttttttttttaaaggcagaggaagtatatctaatcagacctaacttaatccattgatgatacgcgcacctctcatctctcgatcggcgcctgtgcccctacgtctctgtcaccgcacgaacgaacgatcatcgactagactgatgcaaacccatgcatgcgcggatgcgccgccgtcgtcgtcgtcagtgtgctgtgctcctactacactgtagatggaagaacagtgtagtaggaaccatgcccatgcatgcagtgatatgatgcaggccatgagctattgagctactactagctagctatgtgatgggaacagtcgctagcaaggctactacattcgacagtgcaggggcagcatgcaacagctacagcagccgccgttgactcgtattcgtgctccctccgttactaaatatttgacaccgttgactttttaaacacatatttaaccgttcgtcttattcaaaacgtttaagtaattattaattctttttctattatttaatttattgttaaatatacttatatgtatacaaataattttacatattttataaaatcttttgaataagacgaacggtcaaatatgtgctaaaaagtcaacgatgtcaaatatttagaaacggagggagtatatatgaacaggacaagttcatatatatggaactgtgagaaggaagaagaggaaagggtggcgccatgatggatcaggatcgacttcacgagcccacgctgccgatggatgagatgattgctcaaatggttataaaaaagttaaaaataattgagaaaatgtattaacattagatatatcattttcacaaacatgcaaagttaaatttcacttttacgtgttatataaaagataaatttaactataaatatacgttaactagctatagtttcatttgttttatttttacaacttgtaaaagttgaacgaaaggagcaggtttacattatcggttgaccactaaattttgagcctcatcagtatcacggttttcaataaatttcaactgaatatactgtttaaccttcgaaatctcaatcgaaacttaattccgagccatgtcgaaacatcgaaattttacggaattcgaccggttttcgtcggaattgtgaacagggagtatcttactcacatgctccggtttgattttcctcgtggatttatcctcttctcccgtcgccatctccctcgtcacggcgcgcgtgccggccggatgaagggttggtttggtttgtggcctaaatagaccttaccaaattttgtcaatgcccaaattttgataagttttggcatgactaattttggtatggcaaagttgtgtttggattgaagccaaaacagcctaagttcactattaaaatggcctattttcttagacatactaaaatttggcttcaaaccaaatagacactaaacactattgaaattgtcaaatattggtaagcctaatttaagcctcaaaccaaaccagcccgaagtcttcagtcttcacgcacgctgcacacatgccactacctccaccactccactgtagatagtggccatggcgccaatgatgcagccaagcagagctctgaatgcgtatgcatgcagaagcagcagctgcaaatgaacagagcatgcgtagccgctgctactgtctgtgtgtgtctactattccctcagttataaaacaaatactactccctcccttatagtatgaaggattttaaatagatgagacaatttctgtacaaattcattgtacttatagtaattaagtgtcatatccattgaaaatcttttataatttgagatggagcgagtacttgacatttggcaatggccattggctggccaatacggattggcagattattgcagatcagagagatgggtgggtgtgtagacttggcggcttccttccttccatcaaacgtgctgctgctagcttgggcgtgggtcccacttcgccagctgttactgtgtgggccccgttcctgccctagctctgcaagctcaagctgccgagctggctgccacgtccactccacagatgcagatgcagcagctctgatgatctcatgaatctgctacctgctgctcatcatcagttctgtgcaactgtgttgaaaaacgaaacacaaacagtttttgggacaaggaaatgttggaagttgcgtcgggggagggtctgatgatcaattcaatctctcctccgccgaagaacaaaacaaacaaatccaatattagatgcaaggagaacgacctgcgagttcacttaaaggttaaatagatgataacccatgaattttcgcgtcgtggcctaacttatcagatctagatatacaaatgggtcaatttataaacttatttatagatcaaattaataggtaacctgcaagtcaaatccgttgattcgcggataagcccgctcgcacccctaggaggagggtctaatgatcaatccaatctccgctgaagaacaaaacaaacaagttatagtattctctgctctcgtctctgaattccaccaacttcatttgctcaaatccaaagcgtcaacatatacaagcacattaagggcccctttgaatcggatgattgctataggatttttgaagcattcagtttcctaaggaattttttctatggaactctttaatttataagaaagaataggattgtatttctattgcgcaatttcatagaaaaataaacaagaggtctaacatcttagaaattttcttttgattcattgtttcctatggtgatattaaagggatcctcttcatatttactcggttttctattcctgtaggattatggaaatatgtcacttcaattcttatgtttttcctattgttgtgtactattcttcatttcaaaggggccctaaaataaaagtaaaattgatactacaatttacatggattggctgggttcatattgccagcagattttccagtgtgcaatgagcagccagaaaatgattaataacgtaagcaattaagggcttaattactttattgtaagaaaaacattaccaatatttggtaataccaaaatttggcattaccgaattttgataaagtaaggtaaattttagttgaaattttgtgagtggaaagttccggaattaccaaaatttgaaaggattgtgttggtaatggtatgtttaatttgctaccttacaaaatattgataataccaaaatttaaaaatgttgacaaagtgaataagctctaagttcggttaataggctgacaaaggatccatttttttctatttcctcatgctatttcttgttgcaaaataccaatcaatatattcagctcgttgtgttggcgacttggcgcaaatgttgtacccgtgaaaatggggctagtgtcagcgcattatctctcacaagagttctatttttctggattagacgaaaacacaagtagtaatattatgcaacaatcaactattgcgttccctttgccttgtctccgacatatatatccatttcatacagcatccctttatcaccaatgtccaatatgcttttcttttcacacacacagtagttcagatgacccacaaaccaaatttacgattgtttcaagagttgaaattctgctagtagaaaattatcactaattaaatagccatgtttagttggtttttagactagacctaactcaggccaaccgcaaaaactttgcgttttgaccaacacggtagtggcagttaccgtagcatgaactaggtgtagtttgtttggcacctttgagcctctgtttgttttggaaaaaaaagttttattagcagcttaaaaataatttataggtaaaacttttcttttttttgaggattaaaaaaaagaagaaaagttaatattctaatcgatttaaaagttaatatatattggaaaatagagtatgattaaataccctcaaaatcaactctaaaaataagtttcaaaatttaaattttgaccgcatgcagctgataagccaaaaggcaaacgacagcgttgtttgttgccgcgagaaaggactggaattctaatggaatttctagcttgtgaatttcttatccctaggtttctttgcccccatattttggtgattggagaaattaagggcccctttgatttggaggaaaaacataggaattttagagaattttaatcctatagaaaaatttcctatgaagccatttgaaataaaggattgaatcatattcaatcctttgaaattcctatggaatggacaatcctataaaaattttggaggaaatttagcaagagcttcaacctcttgctaactttcctttgagtctatctctctcatccaagtcctgtgtttttcatgtggttcaatcaaacggtcattcctgtgttttgcaatccgctgttttacacttacattcctatcaaaatcctacgtttttcctatttctacgttttctcaattctgcgattaaaaggggccctaaaggattgataatttttacatatatatatatatatatatatatatatatatatatatatatacattaactaatcttaaatctacccgtgttttgtatgcatgcggccgatccttataaaattaacaataatcctgccctgtctggccacttcctgtgtactgtacatgtaacatgtgtttttcagttcactgtgtgtatcaaacaacggcaagttgcaacgaaagcaagccacttcgcccgattataaatagcctccactacttctactactcgccgccacccaaacccaaagcagcaattgcaagaagcaaaatctcttctcctcctcctcctcctcctcatcatcatcctcctctcgcccttcgacaacgcaccatagtttaacccaagctagaagaagaagacgatagatatgagcactactcgcggcgtctcctcctcttctgctgctgctgctcttgcgctgcttctcctcttcgccctctgcttcttctccttccacttcgccgcagctgctcgcgccgttcctcgtgatgaacaccaaggtagctagctacagcacttggattattgattgttcaattgatagtgtatgcaaattagctgacgttttggagcttttcttttcagagaatggcggtgtcaaggcagtagcagcagttgcagctgatcagcttgtgctccagctggaaggtgacaccggcaatggcgacgaggtctccgaggtgagaatcgatggaaatatacagagctataaatcttcgagtacctagctgattagacaagaattgatgaagaagcaattagtggtaactaatcttgattgttaatttatttctatcttgttcttggtcagttgatgggagcagctgaggaggaagcagcagcatgcgaggaggggaagaacaacgacgagtgcgtgcagaggaggctgctcagcgacgcccacctcgactacatctacacgcagcacaagaacaagccttgatcgatcgatccatccatccaactacacgctgaaatccaaagctaatacaaggaagatcgagatcgagataaattaaccaactctatatgcatatctatctatccatctacctctgcatgctgttttcactgcatcgatcgctactgttctgcagtgccaatcactgtccgtttctgtacaatctgtgatactactagctagtagcagtacatggcatcgttttccttcaagtgttcgttggcttttacttagtccggtgagtgcttgtgggttatttctgacgagggagtgtgatcagtacgcgtactaatggtattttggtttgtcatggcatgatgaaattaagctgtggtagcaatataatgcatatatatattacctttgtctcatgtccttagtatgtagtagtggtaaatagtacatagcatgaataatatacttatcaaggaacacttgtgttttgtttaatggcgcatgtctgtcttcctgtctgtaaaaaagtgtagtacttaatttcttcgttttttaatgaccgaccaacgttaagccgagctatacaaacttggacagttcttctttcaacaatgtttttacaaatggctggaactttaccggagcaaaaaaattctgacaaataaattaacatcaatttcaacgtacaatataaagcaaacaaaagatgttatcaatcagggtttatctctaccaccttaaaagcggattcatcgtcctcctcaacatcgtaatcccgcacgtaaaaaaaacagtttcccaaaaaaacaccccacccaaagatcaatattttcacacaaaaatttaaaaggaatggatagaaaaagaacaaaaccctataattccagtgccattgcaacgtacgggcatgacacttgtaaatactaaaatgcgaataaaatataacgaaacctcaacattttctcgacactaatagttctcccaagagaaacttaatcctttttttttttaaaaaaaactaccagtccaggatcctactaagatcgattgatcagtcactctctgtcagtctgtctacagtgcccaagtcatgggcaattttgtatcaagtctttgttccagattccacatcatggtcatcagaagtcaacaccgtggatgcagctagctgctatacagaggctttgataaatctcatctgaccagcaaaaggggaacacacgaagattctccccacatgcgttggcatgcaatgattcagtcacactgctaacatagctacctatctctatctatctatccccatgacattgcaaattattgtactatgtatcgatcgagcaatttgtggttagctttttcacaaagatgctgtggtagatgcgaaagatgtcgtcgagttggagcctcgaaccagcagtcaaaaattcagaccgaggtgatcacaaagctcattagtatctgagtatctaggtatgtgtgagctaaggtcgtaggttacacatacacacgtactgtctgatcataatctgatctaatcgtcgaaatataaaattgactatcttttcttatcactttaagtttttgttgaactaattgttgcatacaactcaatactgaactttgattgctgaccatgcacgatgtcttgtttggaaaaacatcggaacttcttttagtatcatatagctctagaatctagaaaataaactaaaagttagatgctacaaaacacagttcttcttggttctcaccggtgggctactcaccatctattttttaggatctttagctcgctaaacagggactgagcttaatttgatatagtagaaagtgaactgcacgcccgtgcactagtgtatgtttgggttaagctgagtggccaatagtgatcagctccattatatatatctgaatctgatgactagtgaactagtgataaatcactagtgtgagtagtcagtgacgacatacatatgatagaatcttagttgggcatgcatatgttgctgctgttgtgctgttgtctgaagatatgagtatatatagtagccgtagtgtggtgtagtgcgcgcgagtggggttttaattggttaaaagcatgttggttgctggtagctaggtgtcaggttccctcactagttgattacatgattcatggctttttcgaaatgcatgatttttaaaacacatgaacaaaaggaaatacatatataactaaaatactataacatctcaaattttatggattgaaaaaaatgaataacaataatatgaatgaccatttaaatagggcataggaaaaaaaacgatggaatcagaagttggagaaagattttcccaaatcttaataaacttcggctggcttccgccaaccggcgaaaacagaagttggaggaagatacaaagaatttatttccaataggttaaagcacatgtcagaattcctctaaaatatctatattttgggatataattcaaaggaatctcatagtactctaactaaaaaaagacaaactctaactacgaatatagacacacacgtgtccaagtttatagtaagaattgaacttttttttttgtcggaaggggtaggattggacatgtagttaggattggattttttttcggagggagtaggatttttggatagttatttctttgatccaagtgatcatcacataggaaaatcctccaagaatcatttgttcgaagtagccttcatcatcgaagaggaggctagtagtagcagtgtagcacgcacgcatgtaggcgatgtacgctttagttgcttcttttccggcagatgggtgtgtgtgggcgtgcaacagcaagtcagcaacagagggaggtcggccacttcgcaattggagtgaggggccgcacacttttcgcctgcacttgctaagctagtagctgcatgcaaacataatctgtctatcaattcatcagagattcagaatatgtattaagttaaagctattctgttacaggtcgaaaccaataattatttatgaatggagggactaatgtgtgttaattggtgcgatccaagctggtcgatggcttctgcacattttggctggtatgcttgtcttcactctgctggccggtccactgtcagttcagataatgcagggtgttacgctagctaggtcgatttcagttcagataatgcaggcctacctcctcctctttgatttcattgacttcgacgacgaccatacgaattaaaccgtgttaatcacagtggtaaatacttcacctgaaacaatcaaatccatcaagtggcaggttagtactatgcgtttcagacaagagaggcaacagttatactccctgagtgcacaaatatatttgtccataaatataaatataagatgttattttatttgttcataactgtaaaggatttgaaatgttacttatcccatcaatcatattccttttaattttctttgcatcttaccctcaaccattaccattacttatttaatgaggatactgaagtattttctcctcaactttaatatctgctaaacggcctagtggtggagagccagcagcgccatcgagcttggcccaataatagcgtttttcaatagccaactatattttccagacatcgatagcacaatccatagtggagacgcatgtaactgaagagagttatattaatatactccctccgtcccataatataagggattttagagggattcatcatactagaatatgtcacatccctccaaaatcccttatactccctccatttcaaaatatttgacaccattgactttttatcacatgtttgaccgttcgtcttattaaaaaaaattatgaaatatataaaactatatgtgtatatgaaagtatatttaacaataaatcaaatgatatgaaaagaataaataattacttaaattttttgaataagacgaatggtcaaacacatactaaaaagtcaacggtgtcataacattttgaaacgaagggagtattatgggatggagggagtagaaggtctagagtaacacaatctctggtggccgtcctccagggcctgatattacctgagcatctccgcgccagtttcgactccctggtgctcctgatcttttggcagttgtggaagaaatgaaactctagggttttcgactccacgctttcttcagtctcagggttctggagtccatccactcggaggatcatctgtggtctttagctggcattgtcgcttttagagacttgttgggagtgtagcgtggctcgggcccttcctgctgcttggagtttgtgttttagccgtcgtagtttgtttcctaagcttcaagtttttatttttgcttcggtctggttgattgcgttgtgtaactataactattttcttctaatatattcacgtgcaatcattttgcgcatttgagaaaaaaaaacacttcacatgttccaaaatataatcattaatgaaagttttaaaagaaaccaagtttatggtgaaaaataattgtaattggttgaggtaaagagttaaatagagaaattggttgaaatgagatactgtatgaaaaagtgcttatattgtggtataaattttgaatccttaaaatcttatattttgaaatgggtggagtattagtactctaaaaacagaatgcctactccttatgtccaaaaataagttttactcttttatttactctcggttcacaattaaatttataaggtttatctctttagtaacccctacatgtgcacgtgatactattctctccaactcctaaagttgaggagaaaaggggggtttagtgtacctgatttactttaacgatggatggtcaggggacatcaccgagcatgcgtgtatgtgtatggcctattatgtgagggttgattttaaactctacaaaggatgtcccctagttatttgcatgtcacttaaataattatggaaaaaattaagaagatatattaacatgtaatatatcacttcacaaatatacaagttaaaattcaacttttacaagacatgacgcaacatatagaagttaattttatcttccatgtttatggagtgatctagcacatattaaactatcttgttgatttttttaaatgtttttccagtgacgcaaacaacaaagtgactttctctcgagagtttataatgggtgtgtttagttcacgtcaaaattgaaagtttggttgaaattggaacgatgtgacggaaaagttggaagtttatgtgcgtagaaaagttttgatgtgatgaaaaaaattgaaagttcgaaggaaaagtttggaactaaacaaggccaatagtttctcctattctatctgggttatatattatatgggccaaaacaactgcggtactaattgggccttaaattattcgtcatggcaagcccaacacagggtccagcgacggatcgcatcgcgttgcgggatcagagagaagtgcgatgactgtaaaccatcggactcctccgagcggctagtcgatcgtccccgcgcgttttcctgtccgtttccgtgtcggaatttcagagttgagtccgagtccgatacggagtaaaactacttgatcgcctcgatatattgaaacaccaaacccacgcaacgaactcgatcatctgaagtttccttcaattccccgtcgccgctgatctcacgatatgatgatggccgcggcggaggagcagctcgccacgacgccggagatggagatggagatggagtatatcccactcgatggttacaacagccactacgtgcgcgacgacgatccttaccggcgttaccgcgagctccggatgctcgcgccgccggcgaacgagatctccggccgcctcctcgaggcggcggacgaggacgccgccatgtcgtcgtcgctctgggacgatgagttcgagctcaccggcggcgccgacgccgaccgcttcaccccgcccggcccgcgcctcccgcgcccgcccacccaccacctcaacatcttctcttcccggctgcagcgcctcgcgtccacccgcgcgccgccgccgatgccgccgccgatcgacgatggcgacttcggcgtcgtcttcttgacaggcggcgcccggcgccatgtcgccgtggccgccgccagggtggcgccggcggataccagctgcctcgggaagagcaagtacgaggaaccgcgcggcggcggcgagacggcgatgggcggcgcggattcgacggggtgcgtgatctgcatcgcggagttcgaggtgggcgacgagctgagcacgatcccgtgcgcgcacaggcatcggttccacgacaagtgcctcgccgagtggttgaagcgaagccgctcctgcccgctttgccgccatctccttcccgccgtcgttcccgccaatacccgccccaacatccattttctttaaataaattttgtgggctttttgtttcgcgtgtgcatgcctgcatgcatgctgatgtatagttgagatttccattcttctgtaaagagcattgagctaagcaaaggcagtgtaatacttcctccgtctcaaaataagtatagttttacactgtttatgtgtcacgtttaaccgttcatcttatttgtaatttttttatgattaatatttttattgttattagatgataaaacttgaatagtactttatatgtgactaatttattttaattttctcataaatttttcaaataagacggacggtcaaacgttggacacggattctcatggctgcatttatttttggacggaggtagtatgtgttttagcaattgatggaccatttttcttttaatctagagtagctgtaatgataagattctcttattcaaacaagtggcataacaatgttttcagaccctatttagatgggactaaaacttaaacgtagactaattataaaatatcacatcggatgtttggacactaattataaatattaaacgtagactattaataaaaccatccataatcttggactaattcgtgagacgaatctattgagcctaattaattcatgattagcctatatgatgttagagtaaatattctctaattatgaattaattaggcttaaaaaatttgtctcgcaaattagctttcatttatataatttgttttgtaagtagtctatatttaatactctaaattagtgtctaaatatagagactaaaattaagtccatgtattcaaacaccacctcagccttgattttacggcagaattcgagttatgcccgtcttaattccaattaaccgcttatccagtgatagaccacatgtttacagatattaggatgaacatcaaattcccccttataattctttttttttcgcgagaaccctttataattcaaattaatgatgtgactatatataatctattcatcgtataactatctgagaccgccaaatcacttgcgaggtcggtggcaagcatgatgagctttttatgccttccttgacgttgttgcgttgcaccaccatcgcttcccatcaaaagaagtgatcatctatggtcaattttttttagataatgaaagttttatttagactcagataattatatcaagatgatacaatcaaactgagtcacccccggcctctgcataaaatgcacacagccaaaaaagaagataaaaataactagaacatctcccaagcataaaagtttaacagaaacatatatcttagtggctatcaatccttaggctagaccgccacccatgctcctgggtaaaaaactcctgtgccacctggtccaactgtcgagataccaccgtatatcttagtggctatcaatccgtagactagatcgccacccatgctcctgggtaaaaaactcctgtgccacctggtccaaacgtcgagataccaccataatagtatcccgcaatcccggttggtggaggatagcccaggtacgtagccaccgggtaactaaggtgataacctgcaaaaaggagaagacaccatcttcttatcaaaaattactccattcctgcttagccaaatggaccaacacagagctgttgcacccatcaaaagcagattcctcatttctttggggacacatgatagccaactcccaaacatatgaccaacattgtgaggaggttttagattagaagccaaatgaattacagaccacaccaagcgagataagcggcactgaaagaataaatgttggatagtttcatccttgtgacagaaacaacatgtattgctgcctttccaatttctcttagcaaggttgtccttggtgagaattacgccccgacgtaaataccaaagaaagattttaactttttaggggtactttcaccttccaaatctgtctattgatattcggaaccccggtatgtgttagagctagataatgagatttgaccgagaagaccccattcggggtgaggttccagtgaaactcatcttgctcctgtactagaaccaaatcagctatgcgaggcaataggttatgccaagcagctagttttgcaccaattaaatcccgtcgccatgaaaagcacggaggattggtttggaaaatctgtacgatagtcgactgtttatgcctaactatgttatagagacaaggatactgttctcttaacgaggcattccccaaccatttgtcttccaagaacctaacttgggagccgtccctaattttgaaggatccaaaacggaaaaaatcatgtttgaccttcataagactagcccaaaaatgtgaatcccccgctttccaataggcttgagataaaggttgtgatcccaaatatttattgcgtagcagttgttgccatattccatcggtggtaagtagtttgtataaccacttactaatcaacactttattctttatctcgaggtcatgaattcctagccccccattgttctttgggacgacaaataatgtcccacttagcaagccggtatttcttcttatgtccatccccttgccaataaaacctagatcgaaggtaatcaagttttttaagtaccccactaggaattgcaaaggaatgacatcatatacattgggagactactaagtaccgagttaatcaaagtaagtcgtcctcccaacgaaagaagttttcctttccagctactcaatttcttctcaaatctctcgaccacttctttccattccgcatttctcaacttcctataatggatcagaatgcccagataacggaatgggaagttgccgacctggcagccaaagagctggttgtattgatcactataatcaagtgcttcaccaaaacaatacagttcacttttatgaaaattgatcttaagacccgacaactgctcgaaagctagaagcactgacttcatgttctgagctttttcaaggtcatgattcacaaacagcactgtgtcatcagcatattgtagaatggagagtcccccatcaatcaaatgtggtatgactccatcaatttgcccttgtgttttggctctgtttatcaatgtggctagcatatcagcgataaagttgaataggattggggagagagggtctccttgccgaaggccctttttatctgaaaaaaaggcccgacgtcatcattgactttgattgccacgcttcccccggaaatgaaagactcaatccagatatccacttgggcgaaaaacctttcatacgcagagtttgtagcagaaaaggccatttaaccttgtcatacgtcttttcgaagtcaattttgaatatcaccccactcaacttcttcctatgtagttcatgaactgtttcatgtatgatgacaactccatctaaaatgtttcgtccacgcatgaaaactgtttgggtcgggttcactaaatggttagcaaccgagctaattcggtttgtagccaccttagtgaatattttatagctgacatttaacaagcatatgggtctgtattgttggatttgatttgcttctttaacttttggaactagagtaagtaccccaaaatttagtccgaaaattgggaggctaccagtatggaattcattaaaaaggttcatcaggtcatgcttaataacatcccaaaatttttggtaaaattcagctgggaaaccatctagtccaggagctttattatgctccatcgcaaagatggcttctttcacttcttcttccgaaaaaggagcagtaagaaaatcattttcagcttgtgaaacttgagccatatcaccaattatggactcatcaagcgaaaacgagttctcctctggtggtccaaaaagtttcctataaaaactcgtaatataagttttcaaggcctcaaccccctcaattttcccttcatcctggtctaggaaaaagatcctcttcttcctatgtttaccgttggctatcaagttaaactattttgtgttgttatctcctaagagtacgtccgagactttcgagcgttggtaccatttaatctcctcctcacggagtagacttgccaaagaatccctcgattgatcaagaagaattctttcttgatccgaaaggagtcgtacctctactgcgatgtctagagaatcaattgtgttttgcaaatttgcctttttctgcttaaagacgccactggtatgagcagcccaacctctaagatggcgacgtaaagcgctcatcttgttattccatctttggaccgcattacgacccttgactagtttgttccatatctcgagaacacgatcatagaagtcatcacgtagaaaccaacccagttccaatttaaactgtttaatgtttcccgtgaaggccgcttcccctgtgtcaaggagcaaaggcgtgtggtctgatacccctctgtcaagagcatgaaccgaaaccaggggtacttggattcccattcaattgatgtgaggaccctgtctagtttctcataagtaggaatgggaagcgaatttgcccatgtaaattgcctacccgaaagagcgatttctcgtaagtcaaagctatcgatcacaacattgaagagaaaaggccaacgagagttgtaacgggcattgtttttttccacactacttctcaggatgttgaagtccccccctgtaagagtaggtagatgattttgttggcatgtacgaacgaactccgccaagaaactagatttaaaatcatcttgggccggaccatacacagccatcaagatccatttaaaattatcctccctattgttgagatgaaatttaacgaaaaattccccttcaacaattaaagatatatccaaaacagctgcattaattccgagaagtataccccctgatcttcctttaggtgggagacaatgccacatgaaatcagcacccccagagaggcgatctaaattcatctttgacatttcaccctttcttgtctccattaacgcaacatagtctagtatttttctctctaactgtttctgcaacataacggtatttagccaagtctgcaagacctctgctattccaaaaaatacctttcatgaggaaacagatttagaggcttttggattttgggaacgagcctttcgctcttttctttttgaagaagatttggatttttctagtggataccaacaagtcacaaattttgtcactttggtccacatcgtccatatcaatctccgtgagatcctttactaagtgagcgagtagggcaacatcatcgtcgccctcgtcatcactagttgtaaaatgatccacttctgaaaaaacgtgcttagaatggttacattcactagtcttgtttgttgctttagttctatcaacctcaatatgtttcaaagcgttaagcgagaaagaaatttcatcatgagagttacccaaagaaacacctaaagaactaagattggaagcaacaaaatcataatgtaaagaaggtaaagaaggggatgaatttataacagtatcttcactagaggatgttttatgagaggccgagtgctgctaagaattcgttgccgaaacctcccgtccaacaaagctgtcatccaaattgcgcaatgctttcctcttcattgccttgagcagtgagtcatcatcccccgcagcgatgccatccatgttctcaacattggatctcacactacgacaacgaggtgtagaagatgtcttgctcagttggtccttgctgcgattgacatcggttgaggtaggtgtagccatctgaggtacagctagggagagtgcagcagtggtagctgccaaagaggcctcgccggtgatcttggcagctgcagccggctgagaggacagcaaggaccaacgttccaactccggtggcagcaaacaaggttgatcgggtgtaggactgtccactggttgagacaaataaatttcatccaccttttctgctgctgttattacctcacccaccactgttgcacctgatttggtgtgaacaatggtgtaagctatcccatttgcgatcaccagacgaggtggtggtggaggccgacaatttccaaacggtgttagaactagttgcatggctgtaacatctgatttttgttcctttgatattgttggagaagctgaattcttagccctcttgtgtgcctgatcatgagagccatcctttgacgagttttcatgatcctcctgtgcatccccgtcatggtccataaagtccacctccgaaatctgtgccggctaacaaccttcctcttccaaagcaaaagtgattgggtagcccaatttcccaaaaaccacatctgtagtgacagggagttgtatgctacaatgcatacaaaccttcacacgaatcactcccgtccgcctgtaggtgagcatatctacttcctgagtagctccaataacacaaccaagtgcccaaaaagccaagtaatgatgccatgggctaggcacacccgacacatgcacccacacttcatccaactcatatgccggaatcagctcatcagtcgttttccactcgattattgtcattgacacaccatgattttttagacggaattccacatcatccatcctcttcaattcctcaatggaaggaaaagcgacaaggaaggaattctcagcatgaaggactgcctcccacttccaatccggtctgattcgatgagctaactcagtctgaactatttcaggcgtcaaggagccgccacgaatagagaccaaagctgttggaaccaatgaagcctcctgtacattcatcccaaaatcactgatttggataaaaccgaactcggttttcccaaatccaaaaagagagcatgtaggtttcggcaatttgagcagcgggcacttgacagctagatgtgactctttcttgttacatacatagcaatcgatgtccgctttacatacctgcgctatgtgaccactcgttttgcactggtgacagtgaggtggcctcggcttcttggccttagttgcttgtacagtaggatgtggctgcccaccatctgttgtttggtccagtttctccgtttgctggccttgcgccgccatccccttcccccgaggtttgggcttctgatcttgctggtccggacacgggagatcatcatggtctcgcctgtgatgacccccagcattgtttccctgaggaaaccatctgttgctattgcattgagactgcccggcgcctccatgccaacgccctcccgatcccccagtcccagacccaccggcatggttgcccccgaacctcgggaaaaccggtggccgctaaaactggcgcggaggatagtggtttggcccgtgctgatttcttgcattgaaaggtggattccctgtggctccatcatcccgtcgctgctcggccgtcgctgcatcatcacgagggcgcgccgccatcgctgcctaggagggtttcttcggagaactctcgctagatggcgtgcatctgtttaggcgaaagtgggctagggactttccacgaaattggtttccaatcggtctgtgtgggaaggaaggaataccgacactcataactgaattctggggaagggaattagccaaaaatcgtcctcccgcactttgatcgactcggtttgatgcggacaccatcgattgccgatcttgggtaggtgttgattttgaatttggtgaagttttggcccgcggcaagaaatctgccagcaaaactgtttgcactggccgtggacgaggtaatggtaccttccatggacgcattacccatccacggcgatggcactcagtggattttgtcttctgttttgatgagactctggtccactgatcgtcctcggtgataggtggggcagtcggagtcacccctgacactatcgggcttttttgttcccaccaacgagaagcaggagtgggaaaaccaatctcgtcccagaacccttggattagggagagatcggactctcctgattgagagtcatgcgttttcagtcctataacctccatgccggcgagagccgttgagccgttgtgatgaacttgagcgggagaatcaggagcagaagttgtggcagccatggttgcaatcagattctgtccacaaacgtggtcttgattgcagccggctgaattaacgatctctccttcctaaatgacgtcagttaggctggagaagcgagatccacttaccggcgaaggaattggtgctagggttagccgacgtcggtgggagtcatggcgccgtccatagaccttcagacttcctgcacagagatcagcacctgcatcctaggtaggaaaattaccttgctcttgtcctgaggaagaagaagccgccaccgaaggagatgcactcatcgccggcagtgaggaagaacctcaggggagcctccaatggaccattgatccgtttttggagcaaggacacagcgccggcgagggaaggatacagctccactcccggccgtcggcctgaagaacgctgtttactagactgaagaatgtcggacttgaaacattggcccgattcctggttccggaggtgttgacagaaaacacgaggcctgggagatctgcttaactctagtgcaggtccaaaactcgccttcggatgtatgagcgtgccagttgatttgatcctgcaatcaacaagaaacaaagacaaagaaaccgtggttaaatccacaaatgatagccaatcggctagatgccgatgacatatcatttgtctttgagccgatgtcatatgtagatcgatcggcaaccatgaataagtaaagaagaactagatctactcgatcggctgtagacattaacaatatataatctttatgtcgatatattcttaaatcaggtgattgggatagatcggtcaccatgccgagacagtataaatcatttagatcgaaagatatattaacaacaagattatatatgttcatagcatagccgatcagataaatttagcgtgtattggctaatactccgatacgactttatattaagatgctagggcaagtaaaatatactagacagaagcctaatatacttaaatgtaacaagatcttaacctaaaggacggatttaacatatcaattaagcatataagataaaagtaattaaatcagataagatcggctgaaactccgatactactctaatcggcaaccagtaggcaggctagagattgaaattctaaacacgacttaatagatcaaactcaactgatgtagcattaagtatgaaaagaagaacaatatctagacaatcaagccgctggatgtttcataaagtggtggatatcttatataatctaagccaacgtcgttatttaacctaatcggctgccttctggtaacagatattagccgattgcaggttagatgacgatactgtcaaagattatgtaagatatatgataactcgacgaattacataaacaagactagagtatcataaagatggaagcactaatcttgagaacgcaagccgccataacaagttttacctcttgttgaagatcgaaaccgatgcagctcaacccgaaagcaagaactcgtcgaaataaaactaaaggaaaaagggtggcgatgcgccgaaattgtattgaacgtgtgtgttaatcattacatagagctcggggcctatttatacccgagaattacaagatatgcccataccggacacgactgttatctctaacaaactctaagatatcacaagtctttacggcagacttttgcccacacttatctataaggaatttacataaaatatcctaattaatagatacaattgccttcccaggactctatccgtgcgtggcaatcatcttgacgcacatcaactcgaacccgatgtcgtacacagatcgtattgtcggaatcagctgtatcacctaacccggtctaactcggacttagccaatcccaatcgtagccgatcctgactccagccgatccttactctgtttccataacaatcctcatcttcgattctgcctcgaccccatcttcatctccgatgctgatattaccaaatttggtcgttaacaagaggaggactccagtggctggatggccagcgccagaaacagggccgccacaggcaagccaaggaggccggcgtcaccgccggcgaagccccgacagccgccccccatgagatcgcccagaaatcgcccctccacaaaacccggaattcaaaatgtgaatccaattccgcgcgcgctgcgactacgccacgctatccttatttagatcgaaaattgagcattgcaacttgttaggttatctaagatcaccgacttatagattcgacatgaaaatcctcaattaccatcctactgacataaaagtcaccaacccaatcatatctaccccctccgtctcaaaataaattaacttttgaaattcaaactttgtcccaaaacaaatcaacttctaccttctcatccaccctcggttcgcaaaatcgaaaaattttattccttcaataccccttacctacctattcaccaatactaatttgctatttataatggatattttggtcctttattctcttatttaattttgcattgagaaactcggagttgcctctttatgagacggagggagtatttggtaaaatttggcccctccaactttgaatatcctctaaatgcaacagccctactctcccatagtcccataccgcaaaaagagagaagtctaaataaacgtccaaaaacacggaatttttttattaaaatatttaaaaatatattttttctttcgaaaattaacaaatctaatcgcctaccgccctttgggagggcgatttttaaaaacctaaatgcaaaatttttatttgtgtttaaaccctttccaccggttttaattgcttaaaaactaataatgcttattcgatactccaaatgattttaaatggaaaagtgataaactacaaagttatagatctcatcaagatctacaacttttatataaagtttatctccattcaatgtcgtttgaaatgtagatctgagattttttaaaatgtgttttatattttgtaatgaatatttggatatctaaaacatcttaaataaaaaagttgttaactacaaagttgtagatctccttgagatctacaattttgatataaagttttatttcatctgactttatataatataattttaaattataaaattatagagctaacaagttgtgctgaaaaatttgcatttaggtgccttgccgccctctggaagggcaaagggcggcaggcgattagatttgtaaattttcgaatcaaaaaattatttttgtaaatattttaataaaaatgtataaataaaaaaattccaaaaacacgttggattagattcgggccaacccaccttgaacataccaaaccacatagggccagcccaccttgaacataccaaaccacatatttcggcttgggcccagtttccatagaatttttttcggttttagatttttttaatatttacagaaataatctatcgaccaaaaaaattgcagaaatagcccctgccgcccacctctggggcagcaagctgacgtggcaaacgggggaggaacgggcggtgacggagggagggttttttgcaggaaaacccttgccgccctctggtggggcggcaaggggcccgaatgcaaaaaagccagtcggggccggctattttgcaggcggccccttgccgccctctggccgggcggcaggcctcgctgcctataaaaggcctgctgcccagcccccagccctcattcttctctcctcaattccagtgaaaaaaaagaagagaggggaggagaagagaagaaggggcaaagccctaccggattcagacgccgatttcaggtaatattcatagatcctatatgtgactattgagttaaatagtgtgtattctttaaaaatttgtttgaataaatgcattatatttttagggttttagttgtactaatctagaagtgcgtattgtagatatcggtaactacgtagatctgctagtttggaattaatacattaccgttgcattggcttacacaagaagatattacgttgtagatgtttattgcatgaaagagtaatatgatctagttatttcgttgacagatatgtcgaacaaacaaatattccaagtttaccatggaccaggaaacgtccgttacgggccaactggggtagatctgtcagattttattgtatcagaaaggggaattgatagaccggctgagaggagtgtaccttctataaaaggatggttaatgaggggcttgagagttgatccacagacaagtgacataacaattaatgttatagtaagtcgggcaactgagggtttttattgggaactaatgccagttcaaaactctcgagtgtggagatggtatttggaaaatgcattgcaacgcgggtggcctctagctttggttccgtttgttcacccgaaggatctaggtgtgcagacgaacatggatgatggcgagggaccaagtgctgaagtaaacgagacttctgtggaggaggtcaacgcacgagaggacgggggcgtagtagctccagtgggcattcaaccaggtggagtggccgacgagggggagactgtcagtgccattgtggatgaaatggagagggaggattctgacaacgagcgtgtagaggaaggtgattcgtcagatgatgagacggatattaatccagcagaatgggctagtgaggatttttctgggctgatcgtctctgaagaggatagtgtgagatgggagtacaaagaaaatgaggttattcagggagcgatttatagtagagcagaagatataaaggaggcggtaaaacattttgcagtgtcacttcataaagagttttgggttgccaagtcgaaccggtcgcaatatgaagttcggtgtgttaaggaaaaagatggttgtccctggagagtgcacgcgtataaggggaaatggaaggattattggacagtgtcagttgttaccaagcatacatgttttctacctggtgttcagaaataccacaggaacattacatgtgcatttgttgcatctgagatgtatgcgcatgtcatcgataatctcacatatgaaccaaggtcaataatccgacacattgaagagacatacaagtatactattagctatgccaaggcctggagggccaaacagaaaataatagagatgagatttggaacttacgaagcctcgtatgtcaatttgccacgcctgcttggtgttatcgaggaaagaaaccctgggagctcttacgaagtgaagaaatttccctcaattgaacatcctggcaagagtgtgctgcaaagggcgtttttagctctacatgcatgcaagatggcattcgtgaactgtcgtcctgttctctgcattgatgggacattcttgacaggaaagtatcggggccagatactaacagcaataggggtagatgggaacaatcaggtattgcccttggcatttgcttttgttgagagtgagaataccgacagctggtattggttcctgaaattggttaaaacaaaagttgttggtatgaggccaaatgtatgcctgatacatgataggcacgctggcattctgcgagcgataggagagttgtagtttgggagtgtggaacgaggataccccggtgtttgggaagatgtacagagtaggtggtgcatgcgtcatatgggagctaatttcttcaagcaattcaagaacaaggagctcatgtacatgttcaagaggctgtgcaatcagaaccaggagaaaaaattcaatgagctttggaagagattagatgagttgacagccaaatgcagtgatcagcgtgcagcggcctcatcgaccgccgttgctgaccctcctcaagctcttggacctctcccaacggatagtccaacattggttagaagaactggattggagattcggaaattttctcagtggattctgcatgaaccaaaagagaaatgggccaaggcgtatgacacaggtggtgctagatatggagtaatgacaacaaatttggcagaagtttacaactgggtgatgcgcggtgtccgtggactgccactagttggcatagtggagttca

SEQ ID NO: 5128 - DNA, 40877 bp, Oryza sativa
gcccaccggaggggaagctgctgccgccattgccgccgccgccgctcgacggcttcttgcggccgcgccagcggcggcggcggtggcgcccgcgtcctgggaaaagctggaagcacgacacggcggggacaatgcaggacgggatgatgcacgacgaggaggaggaggaggaagactggccgccggcgagggcgatggggtccgagatgacgtgcgccggcgtcggcgccgtcgggtcgcacttgagcgagaggtcgaagtcggtgagcatgatgtggccgtcggcgcggacgagcacgttctccggcttcaggtcacggtacacgatgtccaccatgtggacgtactccagcgccgccaccacctccgccgcataaaacctacgcaaaacaacacattatcaccatcattaacaagctcccaaaactaacattaacttttgaatcgtttagcaacttctagcatatgcaaaaaaaaaaaaacaagttggccatggaagataaattccattgaaaatcttaaccttcacaccaaatttaagtttgtgttattaaattaagcattcaccaaacatttttgcttttagagaattcaccaaccaattcttaggctgtgtttagttctctttaaacttccaaaaattccatcacatcaaatgtttcgacacatgcatagagcattaaatgtggacgaaaaaaacaattgcacagtttgcatgtaaattgtgagacaaaacttttaagcctaattacgctatgatttgacaatgttgtgctacagtaaacatttgctaatgacgaaataattaggcttaatagattcgtctcgcagtttacaggcggaatctataatttgttttgttattagtctacgtttaatacttcaaatgtatgtccgtatatactttaaaaaaaattgaaatggaactaaacacggacttaacaactttgcaactgtatacaaagcaaggctattgcatactgcaactgtatctgaagcatggaagtgaatcccttgactttattcacatgtcacctcaaccaacccacatatttgtgtatcaactaacgacaaatccaactgtatcaactatcagcactatttgcattgatacacagacatgcatggatgccacagtgtgatccagtacaacaaaggaaaaggtcacaagggagcagaggagtgaaaaggtttcagacagtactcgaactagtgcatcattgatgttggaggtttgcacgttccaaagctgattaggataacttaatggcataaaggggatgcagctcatgtgtgtgcactcaattgttaattccttgggttaattagattaatccttacagcaagtaccatactggctactaggctactaccccatgttgatctcgactgaatccatttattcataggctcgtatggttggctgtgattaacactcatcacatgggtgttagttaaagtttctctgaccaatggcatctataattctctacttatgaggctatcagagagtgatttatcatgttctccgaacggttcttgcgccgtagtgcaagggctttggctcgtgtcacacaggcattagcacaattaatctacctgaccgtgcggttgattgcaatgttgttggtcctaggtaggagtgtgctgtgcttgtaccatcagaattcacaattcacaaacgccgttgtaaactgctactgctcatctactggtacaagtgtacaattatccccccgtaaatagcgggattggccattgattcatcttggtaggaaatccgtgtcatgcaattctgtatttgaggccgtacgtactacaactcgtctaataaatcaattcttgaattcatggatcgctttgtactgccaaagtgtcaataacttcaaaaaatatatatatgttggtctatgatgttgtggtgtttttgttagttggtcttagattctagcaacactgttaatatattgtgaaatgaagaaaaaaaaataaaacattggtaattggggatgatctggcaaagcatgtaggttgagttgactacagctctgcaggtgaatgctatggccggactacttactagtctgtctaaatgaatatagccacatgatgctgtaatggagcaaacgtaaccgaataattctaccagtattttctatcagtacacagcttagtaaagttgacgtgtttttgtctcgtaatctctggcatggcctacatcaaagatattgcacagggaaagtacggcggagattaattctgtgtcttaagtttattctggaaggaaattactacgacatcagtatctgtgtatagtgggaagataataatattggcaggcagtgatcatcatcgatctaagaggcaagtaaaaaattcagatttgtgatgcaaattaagcagcctaatttcctgcaagggacaaagactgcaaactgttcatgcgacaacaacagcttgacttccatatgaacagtcttagcttcagaaattcagaaggccactgcagccacaggtgtggatgcacaagcaaacacaccaataccaatagtgattagtgagtgattgcaaggtgatatgggcgtgcgattgtgtgtttgaccgcggtgcggctcacgatatggcacgaaaacaagaaactgtacagtgacagtgacccagtgatcgagctcccatccatgatgctcaatccttcacaatgtctacaaagatgcttttttttttcctttttctgaagaagaaaatattctcctcctcataagtcagattcatgcattaatttgaggcactcttaagtgtaatttttttggggttataaaagaatgaatccaaagggcagctatcatcaaacagcattatccatgttgttatgatggaacacaattctggcaaaaaaaaaaaaacctattcgataaaaacggccgatgcatggctgacagaagacacacgggccaaacaatgcacagaagaagtacagaacaagtgttgcttcatccactactagatcattaataaaacaaaatataatttatacgaaaaggaaacaggaaaagaaatgcagataaagtgaaaccaaagtcaagagaaatcgcaggaaatcagccacattcttctcccaaaagcctaagaataagatcaatcactaccttactactccagctacaacttcagtcacagtccacgccttaaaaacggcataaaaaaagtgatttgatcgaacatttttactagcatttaaaaaaattataaattaacgatgtggtgatcgatcgatgccacagaaatcgagcagttcacaaaattgtttcaaaaaagaaatcatttcatctgggtgagtgaatgcgtgcacaagacaagcggtggtggtgtacctgacggcggactcggagaagcggcggtgaggctggcgctggcggaggacgtggaggtcgccgccggggcagaactcggtgaggaggcaggaccagcgatccccctcggcgacgcccaaaagccgggggaggaaggggtggtcgacgccctcaaggatctcccgctccgtgcgggcgcggccctccttgttcctcccctccagctccttcctgtccatcaccttgcgggcgaccagcgccgtcgccgcgcccctgacctgggcgaggtagaccctgccgatgtcccccgccccgacccgcttgaggaagcgaatgtcgaagagcgcgacggccccaagccgggccggcgtggtggtggtggtgttggtgaaggtggtggtgccggtgaacccggtgaaggcgaaccgggagcgggagcggtcggaggaggcgaagctgaggctctgcagctcgtcggccgccggatcgggctcgccgccgggaggcattgcaatgtgctgtggtgtggtgggtggtgttggaaatggcggaggcagaggaggagatggatgggttggtgcgttgcgtttttaatttgaagcggagaggtgaggaggcggaggttgacgacgatgggctgggccggatcatccgcgtccgttccgcgcttgattttttttttattttgtttttctggatttccgggcccctgttctccgggatgtgatcaaggaacaccaacattgctaatttgcagcttgatccgattattaaatagatatttaactatctttactcttatacgcgtggtatttaacaatttaccatcagacccacatgtcataaatacataaggatccacttgtcattgacatatgagcagtgacaaatgcagctttaaaatatagatgggacggagaatagagatgttcactccataagagcaggtataatagctctattaagttggcttcaaaacctgataatcagcctaatctgagattagggaaagaaattcaccaagaatgaaacaaggcgcttgttttagcgccggcgcttgcatagcgccccacaccatatagctcgcatgcagccaggagagacaataaaaaatatgttatgtgggtcccaacagctgatgtatccatacaagtatttaatgtatgtatgctttaaccaaggcagctcataactaacttgtagttagcttgttgtataagttagctctacttgacatgacaaaattttagagcttgctgctagctgcactattaatcttgctctaagagcaatcgaacaaaacacatatcgtatttatagtcaatcgcataattatctcgatcattgtttgtggcgtgtgtatgttttgaagaaacaaactaatttgttggacgttcacaccttgttatacctaattttgatagcccatgactgctataaaggggtagggggtcttggggtgtagagcgatacgggttgtagctgggtcggtcgatctactctgcctaatgggtagatccgcccctgcatatgagtagcaaattgttaaacgtcaaattaaaaagtgataaatagttaaatgctcaattattaaatccttgctcaacgatgaggagtttttcttccaaatacactcatctcatcaaaataaaattctatacatacaccatattcctattaacgttttttattggtttggatatgtctgttttaaatgtctccctatcgatgtgtatgttacatttcataaaaaagaaaaattagctgtaaacgcgctgagtcgaaaactcgaactcggataggaatgttttaccataagaaagatatccaattgagctcgctcagcgcgtgaacgctgcggaagtttttgatacgtaattgcaaatccaataacgattcatggctcaagagaatggaaggtttaaggttgacgtcgatgagttcaatcaaatcaaccggaagaacattgtgcaaaaatcaaataaacaagcagaagcagcagccgcggcgaatgcacggaatctggcaaataaaggcgaaattatttgaggttggcagtttgcgtttgaaatcagacgtagcagggtacgcagccagggaggctactggctatagcaatggctgcagtttgtgaatggattggcctgcattgcgtggttggtgtggaatggattcgaaggcgtgagtccaagtgtagccgggacaaccgactggaccaaaggaagggtttgcttgagaagcatgtgatatctgcagcttcactcaaaatttaaaattcatttaaacagtgtaataatatgcagactaaaaaaatggcagtttataaatctagaaaataaactaaaaatcagaaattgcgtttttccatttttcagtttctccagattcttataagtctttttttttgaactaaaggcaaagcttgcctattcattgaatatagatggcaaatttacaggtaaggaaaaagtaatattagattcttataagttacttcctccgtcccataatataagggattttgagtttttatttacactgtttgaccactcgtcttattcaaaaaaattatacaaatataaaaaacgaaaagttgtgcttaaagtactttagagtaagtaaaaaaaaaaataaataataattccaaaattttttgaataagacgggtggtcaaacagtacaagtaaaatctcaaaatctcttatattatgagacagagggagtagctaccaactagctatttatcataattttaaactatttcaaacatgatcgaagaaaagtcctttatgatcgattgagctacgattgataaaccatagaaacataagcaaagcaaccaaaaaaaatagtttataagtaaaaatttttacatttatattcttaatggtttaaaaaccaaggctgaaaaattgaatatgatggaaaaactaatgttagattcaattttaaattttggttacgaagataagccagcaagaaaacgataaaagccgatgagctcctccccattgcagaccttttttctcttacttttcttttaaacagagtgttctaaaaatctcaaggtcccatgttaggattggcgtatcatatatttttaaaacaatgatgattggatggatgtgtcgggggttcagttcaggagttggtgtgatagtctgatactctgaaatggggtcggtttcttcaagacaaggccatatgttttacaattcagaggttcatcgatcatcgaccgatatgcaagcctcagaggacccctcgcacaaagtctgagaggatcaattaaatcgaagtcaatctattattgtctgattgtctcggtgagagtagtcttgagacatcgaagacaaaaatgttgggcaacttgcattgggctaagccacgcaggagacaggcagaatcaactggtaacaagtttgaggctgcaaattatacctgcaatgttggatgatgcttctacagtgtttgtgggggaggttgttacactccatggccgatcaggatccggtgtagttgcagtctgtaactgaactagcaccacatgatagcaaatcaagggttcaggttgatgcataactgtagcacctattcattgtagtaaaatttattaggccattttggatactaccaaaataatgtgccctaccaatttattggtagcttgaatagtaatgttggatgtttggattgtagccaataatttggggtctgttcactttgttgccaaaaaaaaaaaccttaccaaattttgacattgctaaaattttggcaacttaccaaaattttgacaggatatcttatatagttaccaaaatttggcagcaaactaaatgtagccacttttttgacaactttaccaaaatttagtaaggttgaaaatgacatcaaagtgaacaggtccttggtaatgcctcaattgaacttgacagttggcactaatctagaactttctcctctgtaacatcaaattttggcttcatgttggtagtaatccaaacatatgcattgcaaccttatcataccaaaatttaccaaagatttgatacggtagcaaaccaaacctatccattattttacgtttcttgttgcaacgaatctggactgttggatcaaaacacaaatggccgagcggtatgtagttcagacattttgtacttgaggttaggggctgtaataggcccaatacaaagcaactctgaactcgcagaacccaacccagtagtaaaataggctgaaaatgaacactacaagaacaggcaccacaagaagcccaaaagaaagatcctgcaaatttgtggccccaaaacaccaaggaaaaagtacaccgaaggtccctcaacttgtcatcgggataaaaaacgtcctcgaaccgcaaaaccatacatgcgagatcccttaactatacaaaaccggtcacccgaggtccctcggtggttttgaccccggttttggtctacgtggcggctgagtcagcgtgggacccacgtgggccccacatgtcagttggccacgtcatcactctctcccctcctctccctttctcctctctctctcactcttctcctgtctgggtaggcagctggggaggacgtcggtgggttgctgccttcggtggggcgaggagggagagggcgagggcgtcggcggccggcgacgggcgacacgacgacggcggctggcgactggcgacgcgccgccgccattgctctcgtccgccattgcagaagccacaggcacggaggcggaccgccatcgagggatgaggtaggcaagcaaggggggcggggaggccggcgtcgacctcctcaccggccgtgacgtcgccatcaagtccttccccaaccggcgacgtggcggccagcgaggggagcaaggcatcggcgggggagcaaggcgtcggcggcggtgaggcggttcttggccgcggccagcttgacccggagtttgaggttagaaatcaacacgaagaatcaatcaagaagcattcagattagcacattccaattggcaacctataaacgaaagagtgctcctaataatcaagcaaaaaatgtgagaggttcaacctctgaggttagaaatcaacatgaagaaagaagcattcggattagcacattccaatttgcaacctaaatgaaattgtactaataatcaagcaaaaaaaaaaggaagtgagaaaccaaatgggatggatggatggagtactgactcggtctggcggatcttgtcgaagaaatgggcgtcgtagacaccggcggcgtcggcgaagtggacgacgccggagaagtagtgcttgtcgacgtgggcgagcgcggcgttgcgccgccgccgctcccggccgcccgaccgcatcgtcgtcaccactatcagcatccacctcgacacgctgccctcctactcctcgtcgctcacgtccaccaccgcgccgttcccgaccccggccgccttcgccgccgccgcatccggcacaaggctcacctgctggttcacggcgacgtgggacgcggcaagctggtggtgcggctggaataggagaagaacaagtagcgcgaagaaggagaacagcgggcagcgtgacgcggcgacgaggacgacggcgcccaagcccgctcgccctgcgggcgccgcgaagaacttcatggtgccaacgatctccgcggcggcggcaagccaggcgcatcgtcgggaggcacgaatcctacggggacgacggcttcccaatcttcaccgagaccaagtgcacatcggcgccgcgtcgtcgccgccgccgccgccttgctcccctgctctcgtgtcgtcgccgtcgccgtcgccgccgccgccggccgccggacctcctctcccgtctcgccccgtcggtctcctccccacccgtcggccggcggcgccggcctacccacagcaccagagagaagagtgagagagagaagaggaagggagaggaggggaaagagagaggaactgacgtggacaggctgacatgtggggcccacgtgggtcccacgctgactcagcgtcacgtcgggctaccggttttatatagttaagggactccgcatatctggttttgcggtttgagtactttttttttttatcccgatgacaagttgagggaccttcggtgtaatttttccaaacaccaatggatattatggacttttggcctttcaacagttaattattgcttttataaactttgttttgaatctcacaaacacttcgggggtgtagctcagatggtagagcgctcgcttagcatgcgagaggtacggggatcgataccccgcatctccaacgtttttaaacaaatttatatttttttcctgaaatttcttaaatccattttccccccgaatcatattatctgctaagctggaattaaatttcatgactccatttttttcctcctgaattggggagttgaattgcattaattttctttattttttttctcttactagaaaaaatacttgtgcgttgcaacggacgaatgctattttaatcttattattgttatataatttagatatggtaaaattcactgtggaaattcgcttggatttttctttttttgaaaatcatgagctgcaattaggagtctggcattcatctcaagttagcatgcaagttttttaaaaaagatttcttatacgacttcttttgtatttacaaaaacaaacaaacttaaaatccgactcaaacacggatgacattccaaaatactagaaaaacatcttcaatttttataatggtaaataattgcattacgtgctaagctagaattaactacttattactagttccttttctcctggaattgtttttaaaaatttcttaactcctttttctgaactgtgaagttgaattgcattatcagttaagctggtatgcctttaacagttaaaagtaaatttcacaaaacatagattttagaacactcgtaacacaaaacccatgtattatgatttgttttgaaaaccccaaggttttagggaaaatttttaagaaaaccttatgtttaagtttatatcatttttttgttaacccatatatttgtgcataataattggaaaaaataatatgagatatttctaagtatatatacatgttagtcttattttaacgagcgtcatttattggtaatatgattaatgtttatatgtataagttaccagttaatatgttattgttagtggggttatgttgtgttttttcaatcttccaatgtaagaggaaaatgttaaagtacatgggagggatatgtattttgtgcctactaatgcagacatatactactaaaaatatcatatacaatgatgaaattatgagtatttgagataaacataagttttttaaaaacatttttaaaccagggttccttgaaacaaaccataatatctggaattatgcactacatgtgtctcaaattattttgtgaaattactctttaattaccttattactagttttcaaaaaattatataatctgtctttaattcaattaattagactgcttataatttatagggactagttttttttcacacgcaccaaactctatctaacccattccactttgatatatataaaaaaataaattctacaaaactattcgatcaaaactatcgctttactatactttaactaggcgcttcacaatactagaaacaacaacaaaaaatataaaacaaaacaacaattttattccctacatgtctatgatatgtgaacctaatttggatagcacaagtatctcatatgcgtatgacagatggacccaatgacgttggagatataaaattgtagttttatgataaaatcatatactattgttgtattgttgcagtagcccagctaaagttaaacataccggcagttttagctttatacaatttactatataaaaaccatactcgaaaaataaaatccaccatctccattctctccttactcccaagtgacacgaattacggctattttttcagtgataggtgtatccactgacatatgagacattcataatgactttattaatataaagatatatcgatctaatcttttggagatactcatactgtcatacatatatggtatactttcttcatcacataaaaagcccaatcactatgtccagaatcatctttaaaattggattcttttttgatgaagagaacatatcctatcttactttaaagctataacccactaattccaaagctcaacgtacaaacataccacctcacaatccactagcaacaattacatacaaaacttatataagcatgcaacatcatctataattcattaaaatcaacatccaatcatcatccttcacattattttcacaatatttttaacatatatatatccattattttttataatatttaatatatattcatctatacaatcaaagtgtgggatatcatattttatttacaatctcatacaaagtctactaattttatttaacaaacgagttttatttgttgttaatagctaatatatttttttacttttagcttaattattaaaagatactaaaaattacttagtaattcccgtaacaaagcgtggggaatcacctattatatacacatttatatatggtattgtgactagtgacttgtgagtgtctgtatttcgaaaaaaaagaaaaaaaaacagaaatggaatccacgcgccccaaaatgcaagtgcgcaacacacaagagcccaaatcgagagagaggagaggagagaggagtccagcgagagtccatccatccacccctcgtgacgtgagggggccgcaccgccgctcgccgctcgccgctaccccatccgccgccgccggccgccgacgaggttcgggggggcgcgatggcgtcgggggtgtcgacgagcatggtgctgacgctgctcggcttctgcggcagcgtcctcttcatcgtcttcgtctgcacccgcttcgcttgctccctcctccgccgccaccgccgccgccgccgcgcccgcctccccgccgcctcctcccacttcctctcctccgtttacgtcgtcgaccaccaccgccacctccccccctccggcctcgaccccgccaccgtcgccgccttccccacccgcgccttcctcggtgctgccccacgcggacacgcctcggcctcctcctcctcctcctcctccgacgccgccgcccagtaagtgctcctccctcttcccccgcaacgatcgcgattccccgcgtcccgtgcaatgccttcgcactgcagcattgcgttgcgtgaaatctaagcttcgaatctacagtgttgttgttgttgttgttgcggtgatgatgcttggcttagagcgcgtgcttttctcgtcggtttggttatccgcattgtggggggttcgaattcgttcttctccgggtgaatcgatcccaacgattgcagttcgaatgtgaacttggatgatattctattgagcacgtttcagttggtaggatcgagtcggtgaccgggggattgaatgcccgctgaattagggcattgtagttgcgggggcgccctcatacgagtgaggaaaaggggatctatcaactattatggattttatattatatgtttgagattttctgtttgagcacatgtcactgtcagtgtttagttgagattctcctggatgtccacttactggatgactactgtttttatgagtttaggtgtttttagatctgtgaagctcttcttcgtagtcgatggatgatactagcatagaagcatgcatctatgttcgttaggtgttcttctatgagcgccgaatcttcacatattatttgaaatttgaattcttctcaacatactagtactgagtatgtcattctccgggcggatatgccaacatgacatgattcagtttctattgttgaatgcaatagtttcttaaacggtatgagcgaatttgggttctacaaatttacatcatttgcaagtatatattgttaatgattataatagatgacctgaactgagaaacaacaattgagacttactcccttttattttcataaaaggtaatattgcctcctgcccaacattttccaatttaatgtttcgcaagcacgtggttgcctccaacccctaatatcttcttggtaaggcagtcatagataactgctacttaaaatcctgaagaaaaaacaccgccttgcaatgaagtttgaagtaccaagacgttgtccttgagtattttgattgattgtttagtatcaaataagttatcatgtggatgttagtgcctaatagaaacagtatgacttttttagtaccatagtgttgattgttgtgtttaattggagattgactattgaatcgtgagatccctgaaaactcgaattattaccaaacagctaagatcattaggtcaatcacataacagaatgcagacattaagttctgttgaataagtcgaggaggaaggatgaggcactgtcatcaagtaggttaaaccctcacctgtgcttgatgggatggaagcttggattaggttggttgtgcgatgtgtatctaaagaagctacagagatgcttctgttaatcatatattcatattggcgctattcgctatagtggttttgctgtatcaaataagaggtttccatgtttggcatcatccattgtgggattgtattttatagttaaagtgttgataaactgttgtcaactctgataaatactactagtatctgaattgtgatttgtgtttctataggtgattgttagcattttcccaattacaccaatattatattctgaatcatttccttccattgttggcaggtgtgttgtctgtcttgcagactatgaagagaaagacgtacttcgtattcttccttactgtggccacaattttcatgcgttgtgcatagatatttggttgatgcagcactcaacatgcccggtttgtagaatttcattgtgtgactaccctgatagcaagcagacaatgtctcctctaccaagtgaagtgataatacctccatgttcccctgaaccatcaaggtcagatcaatgcaattgcctgtttgtcggcacggggcattcaccaaggacatctcaggttcttataaatgaacctgaccagtcgaatcggacattatatagtccatcagtggaaggggataacaacttgccatcatctgaagttaatcctcctggtgaaattaacaaccaaacaatgaaaaagcatgtggagaatcatcgtattcaagacagatcatgatctacctagctaagatcctgcaagtgactgttgtgcagtctgctgtcttcagggtaaactacatgtaaaattataagcagcaatacaggtggattcatggatggctgttataggacataggttactttgaaggatgtaaatatgagaaaattgttcaggtttcttgttagaaaacacatttatttgttaatcatattcaagggctcattgcattaaatagcttgtctcacttattgcatcccgactgatgaattgttgttgtcaacagcagtacatctgcaaaatcacaaagagaagtagctgtcaatacaatcagaaaacaggaggagggcatcttgattagttcatggatcagggtatgagaggaacacaatgtagctgtctcactcatgtagtcatgcaaaaattctccctgaacagcatcaagatcagcgaccgatttgccatcttgtctgtgactgtatctacttggaagcaagttagtcagacatcagcacagtgccattcatacggtaactgcagcagcatgtggctccaatgtcctatttttgttaagagtctgatgctgccatggtaaagtgcctgagattagttggtcaagcactcaaagcatgataatggtgggagccagcacaatgctacataactctgaatctctgatccaagatctgaagattaaagtccagattatgatctctcctctgaaaaccaaatcttgcagggccaggagaacagcctatggttgtccacgcaacgatgtcggctggcccaatcatggcctcctgctagatctaaactgtgtggctgatcaaaccagcaggcagcagcaatggttcatcacttcatcttccctgctgcctttgcaacagtgtgggggctggactgtgcagacatgattcaatcaagtgtactgccatgaaaggccttaataagttttacagtgattcctgtcggtggtggtggccctcaccggagcagatgcagagctcttcactcactcactcactcactcactcactctgcccttaaaatggtggccagcagcatggtgtgatgatcacactctcctgcaaaggcacttcacctggaggtgtagtgtgaggagagctttttctttgcaccttttggttttttggagcttcagcaatgggggaggtcaagcatctttgcctggtgaagttcaaggaagaggtcttggtggatgacatcctgcaaggcatgaccaagcttgtctcggagatggacatggtgaaatccttcgagtggtattgcatcaaccagtgctgttatatttagactatagttttgttttctaaatctgcaggttctgaggcagaatacctcttaactagataacatgcctaagatcacttgtttttagcagctaaatgaacttgtaagtttgtttatccttgagagttcagacaactaattagatttttgacttgttttctgctctaaatctaggttcagcagaaagtgtgacatatgcctaagatcactagttcttttagcaactaaatgagcttgtattttcatttgaggctttaaactgttaagagacattgtgcaaacacattggatctgtaatctcttttttttcagggggaaggatgtgttgaaccaggagatgctgacacagggcttcactcatgtcttctcgctgaccttcgcgagctctgaagatctgacgacctacatgagccacgagagacaccaggagttcgccggcacgttcatggcggcgatcgacaaggtcgtcgtcgtcgacttccccgtcgtcgcctccaagcctgcaccaccggcggcaccggcggcggcggcgtgatgatgacgacatcaactgtccatcaagcatccatccgccatggcatcaaccattgcatcattgttccaagtactttcaggtatccatccatccatctacacacgcagatagctgtgatagatgtaccttaggttccattattgcatgtttctgctgcttcagtgttgagctggtgtagcttagctaaagctgtaatgcagctctatcccgtgcattccgttcaaagcttgttcggttattcttggaataaatttcggtgatcttttggttgctgtgacttaattacttttgccttttttccttttcggtgttaatgatggagtgacagattcctaaatagtttttatgattcacttgtgcttaaacttttgattgagagcaggtttgcaatgacccaggtttggtggttaattactcgtagtacaaaggtaaacagtgagatgttatcagtgctttcatgtgaggccatttacatcggcatttaaattccatctaaagaggagcgatattactactctctttctttctttcccctttttcccttttcatttgagagatgtttggtgctatgtcgatcaaaatcgacaaagttgaccttttgaaatcaaaatatgccctataaaaaaaaaatcaatggagcaagtatccttgtagccttcaaaggaagctatgggcaaattgtcatagcatttacgaatgaaaagggaaaaatagagggcaaaaggggggaccaagttgaagcacttcaccgaatggagatttaacatgagagaaaaaaaatggtgttatatcatatggacatatatacatatggtatttttcatgtttattggtgtgcctaataccaaactgatgtttggcagtaatatataatggccatcctgcgtatggcactatcacaatcgtgatgtaaaattgatggaccatttgcatatttcgatggctcaggatgatgagagcagtgataatatatgccactagctgaaagatgcgtactatataataaattgatatcatgggcggtgattttgatagttttacaactctctaatttcttccatggaatcgatacaaatgtgtaaccagtacattagtgacatgtacacttggaattgacccaagagagaaagcaaaacagaattcagaatttcagatagtgaaagagtgagcccgttgcttttgtttcaaaaaacttgcatgccttaaccttacgagacattagctacccaaacactcaacagacaggagtaaatcatcgagttctcgagacgtgcattaaccttacgagacattagctacccaaacactcaacagacaggagtaaatcatcgagttctcgagacgtgcagcaacgaagattgaatgatgggtctgagattatcttaaaggtaaatgcagaggttaaatcactggaacagtatgatcactgccagaaaaatccagcatatatacattacagtgtcgccatatcatcagcctatacgttgcataccttgaaagcaatgcataataaatcgtgaaagcaacaactgaatttggccaacctccaaccaagccatagtaataaacaaccaaagataaggtcagatggcttgccggcgttgatctaatccagttgataaagatagggattctctcctgcttcattccctgcgcttagattcctaatcagttccggtaaaagttaataattattcagggttattttggtgatcagatggttacaacagaaagccagggagataaattatggttgagcatatgtaagaaatactaataaagacattgtcgtatgctattgtagcaagcgtacaagaagggagaatacagaataagggacaagtttgtcgccatgtaccaacacggttgcttggcaaatatagtttagtgtagagctgatgattgagacaatactatcacatgtgggggtgatatcaccatcaaccctttcctccccccaaaattctgttggcaatttggcatcaaatggaagaacagattaagaaaatccaggggaaaaaacagaaccaccaggggaaggaaggatccaggccaactcattctctcgtgaggagaagcagcagcagcagaaaagcaaaaggtctcatctcacgagttgtaccgtgaagcaaacaccaaacagttgtacacccgatgctagtgtgcagctgggaccaaaggtgaaatctgggaatgccattacgcctacacagtgtagagtgtagaagaccatgtgcttcaccagctatactatgcatacagccttggactctatggtagagcaatacaatataaagtagccaagattagttggaccagagcaacaactgatggaagcagatgagtgttaactggtgaacaacatatgcaagatgtagcaggacatggcaatcataagataaaactgatgtaatcaatatgcaatgtcaggaatcagtaccagagatctcaattgcaacagttaagccgcacagtatgtatgagatgtatcgaccgtgcaagagatttcgatggcacagtgcaagaacttaagctgtggcttccctttgttgaattgcagatttgcagtacacggtatgcggtggtatacacacacacggctcggtagcagtacaaaaataatgcaagtcaccctatcagaaattcagaatcactgcagtgctgcattgcataagggcaataaaagagtaaatgcaatgcgtgattttaaattttacatcaagcataaaccagcgcttcacaatccattttctggctgcaccacctcatgcagcacagcttaattaacagaattaaaacacactctaaattgctttctgttgttgtttgttaactgtacggacacaataccaaactaacaattattcagaaaagatgaagaaataaaagaagaggatcctacactacacacacaccaatctcatcaatgtatatgccctgttcatgatcttgtgttttttttctccccaacatgaaaaatctaacacctaagttgcaataaacaacaaccacacatcattttgcttttgctttgatggtttggtaaagaattgagaccaccaaattctcccaatggagacagacagtaaccagagcagtgaacagatttgacctcttggagaagaagaagatggcgttcgtcagggtggcgacttgaacgcctgcacgatgagggagaatcccggcgcggcggcctcctcctccagccataggcggctctcgagcgcgctcctcgcccggagcatcaccaccgcgcagcccggcggctcccggaaccaccacccgtggaggtcccacatcacgtcgacgggggcgccgtcgacgaacaccgtctggttcccccggaagttccagcgcagccggcacgcctgcaccgcgcgcttgccgtcgacgcacacccacagctcgtcccctccgccgccggagccgggggcggcgggcgcgcagctgacgctgacctcgtgctcgggcccgccctccgcgaaccggacgcgcgcggcgtgcatcgccgccgggtcggacaccacgacgcgctccacgcgcgagacgggcgcgacgcgggcgcgcgggatctggccctcgaacttagccttgacgaactccgccgccaggtcgcccaccgcgagcaccacctccgcgctggccaccgccaccacgtagtacccggacaccggctccggcgacgacgccgcggggtcgtaccgcgcggcggtgagatcccagaacagcgcgagcggcgggggcgggggcggcgtggtagtaccggactcatcaccaccacccccgttctcgtcgccggagctggagcccgaggggagggagcgggagcccctcctccgtcggagctggatggcgcgggcggtgggcgacggcgcgaacgacagcgtggggccgagcggggagtgtccccacgtgaggcggagctgcagcggcggcgcgggggccgcgagcagggtggcgcggtaggagacggtgacggagagcgtcggggaggaggaggaggcggtggtggaggaggaggaggagcaggtggagacgcgggtggaggacggcgcggtgcacgccgcgacgtcggcgacgcggacggctccgtcgccgatgcaggaggcgaagtcccgcacggacgacgggagcagcaggcttgacgcgctcaccattcccgctaccgcggcgagatctgcggcggcggaggcggaggcggcggcggcgaagaggaggaggaggaggtggggctagtagagtagaggttacggtggtggaggagtggaactcataatagcggaggcggagacggcggcgaggctgctcaactggtaactgccggagcagaggttggggaggaggaagcctttaagtctgcctgagacgatgacgaccgttggatcatcaactcgcgcgacgtggaccgtccgatcgaccgtacaggagtgcgagtggagatgtttttttccggaatcacgtgggaaaaaataccccttggatataataataaattaaattcgcgtgaaattcctgtgttgtaatatactaatgacaaaaaaaatgagaaaacaatcttttcacccatttatgcacgacaagtaaacccgatctcgaccgcattctcttctctcttttttttagcgtcattctacctttttcacctctttttaattagctatatgtgatttgattttactcttacgattacacatacacacgtactaacgtgcaaacctttctgtattccatctcttatcacatgtttaaagaaatgaaaactagagaaaaatctttagcttccctgaaatcctatcaaaagaaaaacgatgattctactacgtccttaccgacaataagcaagcctaatcagacgagaaagtaccgtcacccatttatccacaagtaatctagatctcgaccgcacaatcttctttttagcttcgagtaaatcaatttttttttaaaattattatgagggcttttggtgggtccgttcatcctttgggcatgcaggggaggaggggccataccatgatgatggtgccatgatgcatttggcgcacgaagatagatggattagacggcgtcgccatccagctgcagtcacgagtggttgggaggatggggcaggaggggtgacgaggaggaggatgcgatgagatgatgagctgcataacatgggagaacaactgttgaggcaaaatgcatgtgtctccatgcaaccacggaggagaatgggacgctctcggacagagtgttggacgagtcggagtgagagggcaaaaattggttgcaatgaactgagtagcatgtcaatactgactataaatctagacacatgcagcatgtcatgtgtgtccagattcgtagttagggtttacctttttttttggggacggactagtagttaggctaagttcctactctctccgtcccactttaagtgcaaacatgattttacgtgcccaactttgatcgtctgttttatttaaaaaaattttaataaaatttagaaacataagtcgtgcataaaatactattcatattttaacatctcataacaataaaaatactaattataaaaaaatttcaaataaaacaaacgataaaagttggatacggaaactcatggttccacttaaaataggacggatggagtaatttaaaaaggctacatccaaccggaaaatacgtactccctacgtccaaaaaaaaaggcaaaccgtgggttcccgtgccaacgtttgactgtctgtcttatatgaaatttttttataattagtattttcattgttgttgttagatgataaaacatgattaatactttatgcgtgacttattttttttaatttttttcataacttttcaaataagacgaacagtcaaacgttgaacacagaaaccagggtttgtctttttttttttgacggagggagtagactttttaagttcctaattaaaaaaaagaaaagatcatcacctgcttgtgcggcttctcttcaccttcacgagtcactggagtcaggtcatctgggtacagacagaataccgccactgatcctgacatggctgcctctccaatcctgtgggttcaggaaattttccaaggtcagaacttgagctataaaattatactaaaatatttaatataataataggaaatgtagcgatttcagctcttacactttgtgcgcagatgccgctcgttctgacattaaaaaaagaatatggtagaataaaaccggaacgggacaaaccctcacctccctcataacttaaatgaaacaaatactagcatattgaaaactttgaggtcaaatggtctgaggacacatgtattatggcatctttcatctttatttccatgtgctagtagtgttttcttcactgtgagctgacttttgtgcaggcaatgggggcatagtttcagtagtagtaacaaaattagcttaacatgaagatgaaagtagaggcaatatatgttggatgagaccgatcaacctggggagatggaaccggtggatcatgcatttggtcatggtccctggtgacatgtatgatgatgcaaaaggaacggtactacgcatcagtacggtcatacatcaaagcataggccatcaccaccaaccctctcaagattcacaaatccaatggaatactatgccaggtttgtcaccttgttacctacaggttttaatcataaaccaaaaagggtttcacctccccaattattgaggattaactaagtaaccaaacgaacgtcgtggaaagcgtgatggtgaattagaaatgaagcaaaaagaacttgtcccccttgtctcttgggctcaagtctgaatttctctgaaagttgcccgtattgctgttgagagatgattcaacaatgaaggaaccagcacaatcactgtactattcgctcttaaatagcaaaactccaacgcacacatggcagatgggggggggggtgtggggcagcggaaaaaagggttgcacggaaatgtgaccgtaatctcatcaatttgcacccttttcacctgatcattgcgtttaacccactaactgaaagaatacgccagattatagagaacgaatgggctaacctgctgtgcttatgctgaccctgcagagcagatggcccattggtccatgaataatgaatcagtctgatcagagatgcgagaatacaaaatagtatgggttataaaaatgctgaactgaagtatactaaattgagtcatgggaggacaatctgctttggggtgtgagagtgtgattcattcatcgggcacggaaaaccaggcacttgatcccagaggcattagaaaattggagcaaggtttgttgactttgtttttagattcgatgagaaaaaaagggctgtcccttgcattaagttggtaatggagaaatgggacactcacctgaaaataaggaaagcaaaggatccctgaaaatgatagacagcagttctctttagctttcgacaaccggggaagaacaaaaatcaaatgttaacacagcaagttaataggttttttcatctgatacatcagatagggtggctcttcacacaacgatctacatgattcaatccagctggcaagaagataaatgtattgccagaaagtggaagaggcaaatagtctacttgtatgttttaataactgaagatgaccaatgtacactgaacacggtttcttttcttactttcttttttttttctctttttgactaaactaggacaacttgacaatgcaaatattataagtacagaaaacacaaaagaggcatacgtggtaaagctgaaatgagacattcagctgacagcaagggaacaaggaaccctgaaaatcatcgaccgcaatttgttagttttcaaccagcaaaaacaaaataatatacttaagtttataatgtctattttgtgatactccgataatgtgggtcttcacacggaatgatctacagctccagtggatttagtccagttggcaagagcataaacgactgcattgccaactgccaacaaaacgaagaggcaaacagtaatatatcatgctgcatgatatttttagcagcataaccatcaaaccgtgtgtagcggggacagtttcttttgtctttttgttaaactaggaaaagataacgctgcagtttttaaagatacagcaagcacaagttgacgtaggaggcatttatgtttctaatctactgaacaagctgctagataatattatgcagttcgagtgaatatatataactctaactgactgcaacaaggcagttgacgagagagtacaaagccttctctgatcatacctactaaaaataagagagaaatattggataaaaattcagatttccaaataaaggcataccagttgaaaacaaacttgtcttcttctgtgcagttgaagttggaacatccccatgctagctgcaagttgaaattgctcaaaataataatctgctgatcagatcagtgtgagaagtttccattccatgatgggcccattgtttagcttgacattaaagaatccttcaacagtaatatgattccattctatactaccttgccaaaactgaaatcaagttgacgcacccacaattaccgagtaggggagtaacataaactggcattgtcttggaactctacagataagttgtactgcccatacggataggtaaattgttagtgctcatcattatacccttttggggaagccattgatgtatatggcttcatattagtagcctaaagcatgagataaccccatcttgaacagtttacagtacctgcagtaggattaggacctttctggcaacaagaaataggtatccttatgtgcattgaatagggtacatttcccttcatgagtcagttatccaagatcagtaggaaaatatgatggtacactcatcaagagaggcaaagtcaaacaaaaagagacatctagcttacatgctaaaccttaagttaaatatgagactaaactgatgcctattttttggaccgctttaatatggttcattccacagaacaggcaaaactccatctcgtaaatcaagaaaatcaagtgattttggaacctagccatgcatcggtaagccattatgctgcagaaataaatatataactaccatgaaattgagtactgcatgtgcagataaacactccctatttgagcttgactctgatgaactgaagtgttgttggcacaaaaatgatgagtttggtaactacagtacagttagctataaaaatgaaaccatggttgccaacgaaaaggacacagtaggtacatgtttatgagttctgagacagtatatattggatggtccagaactattaatgatgggaatatggttcttctctgcttgatataaacatctaccaactatgcaaaagttcctgcataaaatgtagacacaggaaaagatagcagagaagtcccagcggcccggacagctcacaatacctaggttgcaaattaagcattgtctctgcagttgtttgcatcacttgtattgtactcacaggttgcagatgtacagaagcccgttgggactcgtatgcaaccttactgtgattaatagtcaatacaaacttcatagtagatcacaaaccgactcttcaggatcgtcaatcacctcgccagtcgccaccattgctcacacttcaagttcgaacccgatgtgaatctgagctccagcatgcatctttttacgttcaaagttgtgcccacctctttcttatcctctccatatgcttcaccataacacctcaagataattccttgtttgagctctcacctaaatctcttctatccaaatgagaaatatcttcgcatatgatagtcatataatctcctgccccttgcaggcgcagataacaccaagggccgaacccaacttacagaaagaacaaggcagacaatgtagatagaggaagacacctacaaacatagtgatagtgtccatttcatgctgcgtaccaggccctttgtccatggaagattgtctgcaccgacgcagctcttgactgcagaagcagtctaatgagccctgttttcttatgacacaatgacagccatggccttccctgtagtacaacagatttatggttacagtatggcttgcccatggtgagggtgacacacacatcattgcggtttacagtactgagtctactgactgaaccggaaaacttttgtaccttaatcatataggtctgtgcagttgatgcaatggtgatttcattaacagagaccgcttctgctctaatctaagaaatgtaaatttaaaaattaaaacttacgattcagtttgtaagaaaatatgaattactgtttatgttaacaaaattgtgtatcaggaatgaagtagtgaacacgcccacatacctggaacacgccaacctcgtggttgtgacagaaattaggcagcagcaacaccattcaccatggactcaatcacccaatgcctgacgcgagcagcagagagaactgcaatcatgcccgctgcagcgagtagtccaaaggtggcacactggatgagggaaacggcagccgcagggatcagcatagaggacgccaatgagcgtggtgacaggatggacgaggcgaaggcaacatgctcccgtggaaggcagccagccggctgggccggcgaggaagatactcaaacagcggtaacacaatggtggtggatatgaaatgatgtttacatataaacagtatgatacttttactgtttagcttcagaaaaaaaggttatttacatattccttttgtttgaaagaaggatgctatttacatatcagatctacagatattaatcaagatgccagtatgtacatcagtataagatattgacatacttagctttcctgaaggatgttacaccagaacattaccttgcaggaagttagaactcttcatcagtttccatggtcctggtaataggtattgaccatcttcctagatgggctgtgtaatttgtgcatctgacaacacctcttccttttggtccatctgggaaatcgatcacactgatgctgccatcgtctagatgaaaagatgacatgtagtccatcgttaaatccagacacctgcaaatcaatgctagatttatacccggatgtcctacgaccaccagaattctttctgaagtatcatcttgcaactcatttagcaaggcttgccatgcagctttcgactggttccatagcccctccagagttttgtattccatgctgcccagccacccagactgagctatttctccaaagctctacagaagaaaaccaagtgttatttgaacaccccacgaaatgcagggagctattaaaatttccaggtaaccaagcaaccagccagtatgtacataagatgggatagctttagcaagaagaatatggtggctggcaagcactcattatagatctgatcactaaatgttgtgctttgcattatctttgcaaatattgatctccaaaaagtgttttcaatctttcccaggctagggtgccttgcgtgggggtgatggtgtgttttgggttcctttgtgggtgtcaacttggtgtgtctgcctggtagaggcgctattagtatagtgtaaaacactactctctttaatgaataggcagatagccctgccatctattgcaagtgtggattttcaaggcatgtacaggatcttcaaatattctatgcactagtaaagctactgtgacagaagccatggaacgtggaaatggtctaaccttttgctttgtttggaaggcatcatcaatttctagttctagcagtttcttcatttccacataacgaggcacacagtcagcacctaagcaatctgcagcctcttgaacctacaattcactctactatggttagatcaagcaggtaataacaataaaacgataatgcattggactaaactttgcaaattgttcagacttcagaatgtagttacctcgcatatagtagtagcagtatcaaatgctgcaacttgtgggctacagagaataccatttaccttttgatctaaaagtagttctgcagtcttctgagactgaaaacatttggccagtaatgagcttaggttttagttagaataatgaaatatacagtttgcaatacaaagaagaaaattacctgtataatcccaagcatgttaagcggtgcataccccattccactgacaccaatctgtaatagaaacagtgtaattacatacataagcagcaaagctcaacaggtaaatattgtctacctgggggtactctttacagaaatataataaaaacctttccttatacaacttatactcgaatttttaatttagttttttagtacaatacttgaacaaatgagattgattcacttaatttcccaaattaaatttaaagaactacaaagcagacctccaggaaaatagtaggtggctcgtattgatccataaaaggtgcataaatttagccagttttagagcacaggttaagatagttaaggtcatgggttcaaatcccttcattaccgttttaaggatttcttaaggtatcccttctatacttgaaatcaatgtacacagtttctccagtgaattatctttgctttcacattttgatccatagaaaaagcgctttttttttcatgcaagcatggatgcacaaatgagaatatatacctctgcactgttctgtgtagctccttgacatgctaggataatcctcttgcttgtctttctccctgcagaacttcctgaggcaacaggagaatttggcgtctgcaaacatggaaacacaattaaatcctatatttactggttttccacctgtagttctgttttgacacaaaattattttattttacttatccagaagatggtacgaaacttgcattaggcaaggcatactactaaaaggaaaaaaaaaacatccatccaactgaaagttacacacatgcacacacacacctgatttaagcggttaaggcatacagctggaggccctccaccagcctgaggggtgaaatccagcacactagcaccacaattgctctgaagtagaatccgaaagtactctgtgccaagtcctaaatgcgaaaaccagtaaaccagagatcaattgggcacaaccttggaactatagaatcaacagcaaagcctagtggcaccaacccaacgaagaggcaacaagagcctggttcactgcattatgtgcaacaacaagcaccgacttgccctcatgtgccaggatcctctcccagcagttctgtgcgcggtcccagagctcccgcactgggtagtgcccatcaatgctgaagttggccgcgttcttctgccactgccggtagataactccatacctctccttcccttcattcttcaacaatccctgcaaatattcagacagtgataccaaccaagcatacatccgttcaggcatttgcacgaacatcctgtgagcaacctaatacccgagaagtatcccaacctggaaggagtagagatcgatctcgcggaggtcagagtccgggatgaggtcgtcgtcgcggtcggcccagatgatctcggcggtgcggcgggagcgggcgagcgggctggtgaagcaggcgtcgaaggagtcggagaggagcatgaggcgggaggtctccgcctgcgactcgcccttgggcgttagcacggagatgtcggagctcccctggatccgcccctccgcgttccaggtgctctgcccgtgccgcaccagcaccacccgcttcgcctcccgcagcggcggcagccgctcccccggacgagggttcggggatctctccagttcccgcacgctcgagcagcggacgcggagggctgatccaccgaccttcctccggcgagcggcggccgccgccgccgctggtgagggagcgaggaggagcatgggtgaagcgagatgggattttttttgttgttagactcggaaaagggttgtgtggtttgggttgggtttcccgcgaagatttttggcattttgccataggaagaggtggaagcgtactaaccaaattacgcgtttggactcattaggcgtacagtggtaacaaattcaggccatgtttagtttcatgcccaaattttttttatcgtatacggacatacatttgaaatattaaatgtagacaaataataaaacagattatagatttcgtctgtaaactgcgagacgaatctattaaacctaattaatccgtcatagcaaatgtttactgtagcaccatattatcaaattatggcgtaattaggcttaaaagattcgtctcgcaatttacatgcaaattgtgcaattttttttcgtccacatttaatgctccatgcatatatccaaacatttgatgtgacggaatttttggatgtttgaagggaactaaacacagcctcaattgatgtcttctgcactacaaactctgcatttctgaaggataagagattcagagcagggttcgacttaccgccggtaaccgcgcggttaccgcggttactgggcttactgcgggggtacggtaatataaaataccgcggtaacctcctcaaattcaaataaatttaaaaaataatttgaatttttgataaattttgcgcggtttcatacggtttttcacggttaccgcgcggtaaccttgcttaccgctggggcgcgataaccccggccccggcggtttgggaaaccctgattcagagtactcattcaattccaatgacctacatgctcatgctcattgttttttttaaaaaaatattgtttttcgttctggctttacaaccaattattataaaggttgtgctatgaataactgcgaaaaatttacagcttcattaaaaacaataaaaactacttggtatacctatatcactcataaggacatcattctttcggatacactcaacctcaagttgctatgcaaggtataatagctcacatccgacaattaaatttacaggtaacctcattactaagtacttcttaatgtgattttgaaactatgccgatgaccagatagcacttaaacagaggctaggagatggacaaggctgtcataagcattcaatttaagatggaggctgaacttatatcaagttcaagtccacctcggactacaggaacaatctgcattagaatcatcgcccggatttcattcggactctgctcttgacgttttacatatgtatggaaagctaatgagatcatctttccaatgaatatggtctcacataaaaattccttccaagtcaacggtaatcatcaaaacaaaacgacgtccagaatctatcatagtgacgcgtcatagtctttggacccgttggggcttgtatcgtgtcgaagtccaataggaatgcatatagggatccaaggtcaaccctagaatcaatattgtcgacgtttgatgtcgtgactacggtatttggacagtatggggatcgttggtactagggtatacgcgagactgaggtaaaagagatggggataaggatttttatacaggttcgggcccctgaattgtcaggtaataaccctacatcctgttggccgaagccggtattgctcttattcaccataatcacaccagtataatatttggggtagtctatctaactgttgtcgacatggcgatctgaaggtctgactcgtagtcgacaacagggtagtcttcctcctcgaatctgtgtccggcgagatcagagatagcgctttcgtctctcctgacagtatccggagacaccgtaggggactagccgtgcttatccctgaaatcgatatccggcgtcttgtcttggtgtatgttggcttgtattggctttgtggtgtctatgttgcccgtgtcttctatggtgggtgtgttgattgtctcttctatggtgggtatgtggattgtctcttctcctcctagggggccttgtatttatacccataggtgtccccttgtccaagtagaactagggaaaccaatatggatacaatccgagtagtccttgtcgtttccatgtagaactctggttgtcttcccttatccggaactcttcatatatccgcaggttgtttccgtatagtacatagtatgtggtgggttctgccgagatttagtcaactactattatgtatgtggtatccataaccctgacagtagcccccgacttcaatgcaaatgagcgagttcatattctcaaccgcagaccttggaggaactgttatcgagctcacatgaccgttctcgatgagtccagagataacgttagacttcctttatcagcctcgtgcgggcacctaaagggtttgtctgagtcaatctctgacgtcaaccaagaaagtacagagcatgcgactaagtctcttgtcttgctgtaatcgagaatttggattgaatttaagaaattttatctcggcaggttcaccatcttttcattccgtattccttgtcgagatccaccaaccgttctcgagtaatcgagtaggcgtagagtctgtaacggggccttgtcaacatttgtcgtactcgccttagtcgatcttgatgtagaatcatagagacatggagtcttcgataatgtcgaatagaattttcctgaaatcaatactcaggaaagaatattagatagaaatagccccccagcgaatgctcaaaggatgacatgttataatatgtatggaaaaccgaaaatgaattaaacttacagaccaatgttttgtgtatgagcgtctactcttttaccgacttcgatcagtcagtttgttgagttatacactctccctagcccccagccttgtcgtcggagaatcgttctcggaggataaggctcttggacctttgacctgcatcggttgaacaagcactgatcctagcccccacccgtgaagttggaaaatccatttccgattacatggcttggttaatacgcacggcgagaactcttacacgaccagatcttacatggtctttcatctttgaaggatccgacaaggccttatctgctctgggcgtccccagccgaagttcccttaggttcctcggaggccttgtcaagacggcgtaaagggacattaggataggtttcaacgctaggtgtctttgtggtaagggatctctgggtaaaacacttggcgatattgtgtacctgatatcaactttgttgaagtagaggtaatgggagaatcgctacacctctggtcaagaaccaggtaatagtcgtaactcaaccattagaagtaaatgtacgagagatcgctacgattgactagttgagaaccaatgagtaggtgtctctcgatcatttgaagttgtggtacgaggaccgctgcgttattgctgtagtcgtacctcgaccatctgaggttgcggtgcgagagattgctacgtactggttcgaggaccagcgaacgtgtagaatcatctctcgaacaccaatggaggttgcggtgcgagagattgctacgtactggttcgagaaccagcgagcgagtagaatcatctctcgaacaccaatggaagtttgcggtgcgagagattgctacgtactggttcgagaaccagcgagcgagtagaatcatctctcgaacaccaatggaagtttgcggtgcgagagattgctacgtactggtttgagaaccagcgagcgagtagaatcatctctcgaacaccaatagaagtttgcgtctcgaacaccaatagaagtttgcggtgcgggagattgctacgtactggttcgagaacagcgagcgagtagaatcatctctcgaacaccaatggaagttgcggtgcgagagattgctacgtactggttcgagaaccagcgagcgagtagaatcatctctcgaacaccaatggaagtgctagagttggtttattacatgtgcgtctcatgtggccagcatgactcacacacccaacttgtagcatatccggatgtccgttcgcaatcatgtcgggtgatcaagctgaccgcgttcgcgaggaattgtccgttaacaaccttttctcgagtagtccagccatggccggtgctatgagataggtcgtcggtcttcgttggcaggttgggcgcgacgactctgcattcgtcgagatcgttctcgataatgcggtgtacttgaccacaacctactcgagtgctcaattgttcctgaaaaatattttctagaagacaagatatatagcagataatatcgagtattctctgctagcattatcaggatataaagagcagatgtaaatattaggtattatgtaaaccgtaaacaagcatgatttatacagaagaaaatagagcgagcctccagcattaaaccgttgtcggcctaacaccggaaacactcgcataatagatattgtataaaaaacatgctctaggtaaacataataaattatagatctaacaatattgtatgatctgaaaaataggtacgataaattgcatataaaataatgcgtacctgtgtagatatatgctggatatatctacgaaattagtagattaacttgaaaattaacctactaaatacctttggtttgcccagatggcatatacacatataactaaagtcaccatgcatgtatgccgtatggatgtgtgttgtctgatctttgaatctgagttgagccacgtgtgcatgtgcagttggtaggaaatcggtaattttgttgaccgtgtatcccttgacttacgtggcctcgcaagtctcttgtcacggcaagggataattagagtccgattcccacacagcatacgagcacacgtagtcgtctaggattcaggggatgagtcgtccgatttcctcggtgatggcgttgatctggcggctagatggtcaaccgatcggctctagtgaattttcagagcagacactgtgacccgaagatatagctggcgccgacgaagtagtgaactattgtcctccacggtcagctcaagtactccgattggtgaggtagatcaatttgttgacgatgatgatctcgatctcgtcgggggaacgtacttcgttcgggttagatctcccagagccgaagttgtcgagtaacttgttgtcggagaatccatctcttaaacccatctcgtcgaaaacctgaagcaccaaaatcccactacctggcgcgccactgtcgacgtttaatgttgcgactacggtatttggacagtatggggatcgttggtactagggtatacgcgagactgaggtaaaagagatggggatgatgatttttatataggttcgggcccctgaattgtcaggtaataaccctacatcctgttggccgaagccggtattgctcttattcaccataatcacaccagtacaatatttgaggtagcctatctaactgttgtcgacatggcggtctgaaggtctgactcgtagtcgacaacagggtagtcttcctcctcgaatccatgcccggcgagatcagagatagcgctttcgtctctcctgacagtatccggagacaccgtaggggactagccgtgcttatccctgaaatcgatatccggcgtcttgtcttggcgtatgttggcttgtattggctttgtggcgtctatgttgcccgtgtcttctatggtgggtgtgttgattgtctcttctatggtgggtatgtggattgtctcttctcctcctagggggccttgtatttatacctataggtgtcccttgtccaagtagaactagggaaaccaatatggatacaatccgagtagtccttgtcgtttccatgtagaactctggttgtcttcccttatccgaaactcctcatatatccgcaggttgtttccgtatagtatatggtatgtggtgggtcatgccgagatttagtcaactactattaggtatgtggtatccataaccctgacaaatatattaagtagtgatcattgagtgaaggttgagttttgtttagtatttctaccattgcagtttcaccgttcatcggtttatggaattccaatttcaagtttttgattaatcattcatctgcaattgagttgttgtctttcttgttattgcttgtgttattcgaatctgcacgcagggattagcttttctagcaaggctgatcgggttttggcataaccagatgagacatgatactatgattgcatagtttggatcgtgtcgattggaaaccgaatcgtgtgcgccaagttttcgccaaatcgatagttgtcctcacttgacagaagatcaggcatcccgtggcaatcaaccacctaaggtagatattttcatttatggttggccggcgtatatataatctctgtaccaacaacttataagttatatacagtttttatctttctcaaatcagaaaatcaaaatccctgaaattagcggacgattctcgtcgatcgaatttcatagattttggtctctttggtcatgttaatagattgatcattctattgtattttctctttgcgagtatacaggtgataacaatacattttggtctgtactttttgcagaagcagaactacgtgttggcatccatataatggtaaaattcgaacagaaaaaacaaaatctgtacaagcaatcacaaatcctaacccaaaataaaccctatccaaaactacagtgcagctattttcttcaagaaacacacactgggcaagaattcacaagccatacaagctgttcgtctgatccatggatggatcacgacttgaacgagctgtttgagcttcccatggacttgaggtccttgtacggccccgacgacgtcagctcctgctccatccccccggcgcgccgccgccgccgccgtctctgccacagccggtgacccacgtacgctccggcgacggccaggctcgccaggatcagcgacagcgccgccgtcacggccttcgcgccgggcgacatgccccgccgcgtcgagctccgcggcggcctcctgaccttgaagtagcccaccttccggtcgtcggcctcgtacaccatcgtctccacggggaagtcgaggaggtagcagtagccgctcgcgccgctgtgcaccgcgccccagcagctgcagttgccggcgcacgcctgctcgcactgctccgccgtcgcgttcgcctcgaacggcagccgctccttgtacgccacggacacccgcttcagccggacctcgtcgaacacctggccgccgtcgctgtcgccgtcgccgcagaggtcggtggtttcctcggcgctgcacggtggggaggtcgcggtgctgttggtgaggcactggcacttggcctcgccgccgccggggacgcacaggccgtacgcgccgcacgaggtcggcagctcgcacggcgccgtgatggccttgtagtcggcggtccatgccttggcgtcgtcggtccagtagtacgcgcggaggttgccgtcgtcctccagcgtcatccgccggaacgcgccggtgaggttctgcacgaacgtgtcgaacgacagcacgtcgaccttctcgccgctgccctggaggtacagcccgaagaagccccggccgtcgaggcagccgtacaccggcggctgcgtggcgttctccggctgcgcctcgagcgccgtgtgctgccagtacatcggcgtcgccctcccgccgtagaactccatgtgcagcgacatgtacgtcttggcgagccgcagcgcgaagcggcggttcccggagatgagcggcggcgacgacacggtgaggttctggtccaggacgagcgtgtccgacgggttgtcgaagctctgccacgccggcgcgtctccgcgaaccgccggacgacgaggttggacgagttgagcagcacgacggtgtcgccgatggcgttcagcgtctgccacagcacgccggcggcgtcgtcggcgccggcgaggacgaggccggtgtcgaaggtgagcgtcgccgggcgcgaccagtccccgacgcgcgccggcgtggcgcgccagaccgggaatgacgaggcgaggtgcaccacggcgaggtccagcgacgccgcgccgacgcggaggaacccgaaggcgaaggcgccgttggccgcgtacagcaccggctcgaacggcgccggcgcgtccggcgaatgcctcgccgtgaagccattcgacagctgcgtgacgcgcccatctcccttggcgccgtcgacgacggcaaccatcaccggcgacgccacgcagagcgccgccactactccggcgatcgccggatcacctttgtctaacctcatttcatcgacacgacaaaagaaacctcaaacgactcggatttcggacagagtagcgcacactacatacatagtcatatataagcatcacaagaagaaggtcaacggccggtgagaaatgagaatgcacctccatttggaataaatccacggccaaattaattaaagaatgagaattaacatgccaatggaaacctttgcatcatctgcaagctgtagttaagttgggactaatctagtggcagccatgcatgcagtgtgtgtatgaactgtccaaaagtcaacccttcgtttctctgcctaccattatctgattctctctccgttgaatggcccattaggatcagtagtaaacgtggtaaaagatttgatattgcttggtggattgctgcttgttcatacttcacatatgtgcagcaactagcaattgttaaacattcaggtgtcgacatcattcagttcatcagacaaagtgattaaccggtgagatctcttgtttgtgcaggcgtttacttagtttagcttgcttgcagatgcatatcggtgtgccgagtatttgttaaatctgaatgtccagttgacctcgaacggcttgaaaagaactcaaataatgtaaaatatattcctcagattgtttattgagcaaatcagtcacctgtcatataaggatatgtaatattcaccgtatggcatttgcagatttcttttctctgttggaaatctcaaccaagacttgtatatgaatgaagattgaagagtcctgtgtgccatttcaattcctcggttttcgaataattatcgctattcagtattactctctctctctttgacgtaccgtagagaaattagggatatggtttttctacacctaggtgtacactaggttacaatgaacgtaaattctagtatgattgtattcataacgctgcacacttcaataatataacatttttctaagtttttttttcccaagagaataaacagtcaaagtttgagattgaataataacattgagttactattcgagaacggaggtggtaataagacaagccaaaattttctgcaaagaaatgatcaaatgaagtactagaagtacatggtttctagagaagtccttactggaattgctttaagttgactttccaaagttgggaaattgcaccctttttttttctaaggaagaacatatgctgagctttatttggatattggaatctaatggttctccccatgttataagatatggaatcactttggaaaatgaagagctacagctttggggtcaacttcatgtcttcaatcccctcttgccggccgtatgtacaaggtgcttaaacttcatgtctatgatccaagttagattaggtgcttaaactctaaggttgcagtgtattgcaggattgaaagaatgccaattccattagattctacaacgggtacaaatttacaagctgttactgcagcatgtaagtataattgttgccatattaatttgttctgtggtctgaagtctaaacagttctgtagtatagtgaaagagcacacgaagcatgtagtagaaaaagagcacacaaaattcatcagagcttcagatgaccaatacatgtaacaatcagttccaattttatttctttcatgtcaaatttcaaactctcatattcaaataacccatataaaccaataatcaggcgaagtaaaaaagaagtatcgaatcagttcaagaaaaaataattatggccttttcacatttcctttttatttttgagaaacacatttcaattttttaggaaggccagatggctcgacttgtattgaaactctgagagccagactgccagatagggctaaaataaataatagtatatcacatggtagaagagaattaatttataatggagagggaggaaaaaaaactctcatatattaaatattagtattcatcgcgctgtattttcacaaaaaaaaacagtttcttcttttttctacattgtactgtcaataaaaattgcgtttgattaacaactaaggtgcttgtccgtcgggcgcgtcgtcttggtcgtcgtcgtcggcggcgggcagcttatggcggcacagcgggcagaagcggctccgcgccagccagtcggcgaggcacgcatggtggaagctgtgcccgtacgagcacggcatcacgctgatgtcatcgcccacctcgtaatcctcgatgcatatcacgcattgcgccgcagccccgccgccgcccccgcagccgtgctt

SEQ ID NO: 5129 - DNA, 4198 bp, Oryza sativa
ccaaggatatatttatatgcgggatccttgtagtgcagtttgtttaaatatcaattactcattggatggaaataatgtagtgaggaagccaggaagttaaaaaccatttcacaaatagcatgcaatattaccaacggtctaatagatgccgctctggcccagatgtatcctgcccatttgcttcgagcatgttccttagttcagcagttgacacatgcttcttaagttcatccttcaatttccaaagtgtgtcactctgctctttaagcttttcttgaagatcagaagaattagcattggaatcatgtgatacaacagctttccctttatcttctgctgtgccttctgatatactcctgattatcttgggagctttgcagtcgtgtatatcattctgattattcttgcgcttggaacccttagaagatgtttgcccttgagaaacaacaatacaaaatatcaagtcagattacgaagtggcgcgaagaaaatttgatgcccatgtttcattacctgagctgggggcatctttcttaacaagatcaagaacagctcttttatcctcatgcgacaggatctcccagcctgagaaattctcaacagttgcagctggggacatctccagaaaacagctggcgtgataccaaccttgcccttcaagcttagatgaaacacgaacctagacaaacaaataataatactattacagaaacaacttagagtgaagacaaagaccatgtttttacattacaagttgccatatcacagttacaattcatatgttttcaaaacatacattattagctaagtgcatgactaatagtacttctggatcatcaaacattttcctgtatataattctccacggtaattattgtaattcattaggagtactcaactaggagtgtggatgaataagaaatatgaacataataaatactcttccaattaatacatttgcaggttacttcatttgataaagtaaacttaacacaaaattcagagttctaatgcttgctagtggcacgtagcagagtaactacaaaataaatgggaaactgtggcctttaggctttctggtcacttggaattccagtgcaaaagcttgggcattatatgcaacatgatgcaggccacagggaatagggtacagaaaagaacctatggtgtccctgcgtatcagaaccatacatttcccagatgcaagttcagaaaataaaagaacatgccaatggcatagtggtagggaagctatttaacctccccagctacaagtgttcaagtgctaggaccaagtcgggtatccatttcatccttagtgagcgctaaagttcatgttctaaataaataaagtatagaacaacaaagtaacatgcagaattttggacaatacagtatttttcccagggagtaactataaggaataggaaacatgttatgattaattattcttacatgctgcatcaaggttcattcaagaatgtgaaacttctgattatctatgattgttagctgaatgctcatataagactgtaaggtgttaatcatcaagaggaggttattttcatgactataatttgaaaagcaacaaagtacaaacataaaattttcatggcataaaacttcctatcctcaagggacgaattagaaagcatataaaaaattaatagatcaaaagatacagaccgttcccttttttatcttttcaccacaccgtctacaggaagtacgggcagatttagcaacctcaatggtgcatttatctgaaatagcagctgcagaacttgcagtagctggtgcacttccaacataatttcttatcttctcttggtcatcccatctgagtgtgtctattccttcaacatcatcaacactaatttgaaatgaagaatcgacactttgagttaggtcagatttccaatagatgcaataaagattaataaaccataatactatagcgtgaaactcatgcaaacagtaaaagataaagttgcatacgattttatctggtttttcttactgaggatgcaactggcatggttccacatctgaaaaagagaaaagggcactaaaattaattggaagtggtcaattcgtaaaattgatatggaaagatatgtcatataaccatcgagttttctcttctgcaccatcgagaatctaccatgaccaaaaaaaagttccaaacagttatagttcttgaataaaacaattactataaacatagaaaaggtacaacgttataaacactccatattaaagaacatggtcaggtaaaaaataagggccatcacagaaaataaaaagatatggtcaggtgaaaaatggcatgcagatccaaaagtaccccctaagttgccctaaacgatcctacatttcccagtgaaataatttgagtgtctagtccacataaccacatgagtactgagttgatccgaccaaaagaaataaagattcattatccaaatgtgcaatataaaaaatgaaaaatagaataaggactcccctccaagttttatcttgcctaatacaggtaagcacttataatacacatgcacccacaaaacaattacaagaggcaaactagaaaataaagcgggcaaacgaatacctagattataatttgcaaactacacatcagataagaacaaaaacagattagcgaacacactagattactaacattgtcattggttgccccattgccatgctaaaagcctaaaacagcacaaccaactggcaggtccgcataataactaatatatcaaacaacttaggaccattgccatgctaaaagcctaaaacagcacaaccaactggcaggtccgcataataactaatatatcaaacaacttaggagaaataccagttaaattgcatatgtcaaagttggtgcccacaaaagcacctctatctattcttgcgttacacatatagattgcataatggattagaaacagcaataaacccaatgctggaattgacggatcatcgacaaatcgacagagcaccaaaccaaatgcatcaagaactccgcattcgaagaagattggttcgatcataccccacaaaatcatgcgaaattaccctcagaaacatatttttttcgggcatcaagatttaaaaccaaccacccaccaaagcagaagattcttatggcaaatgcccgcaaaacccacattagcaatgcacatcaagatgaaaaccaaccacccatgaaagcagaagattcttgtggcagatgaccacaaaacccacacccgcaatgcaaatcaggatgaaaaccgatcacccatcaatccagaaaattctcagaatccaaaccaacctacaaaaaaccctcaagaacacgatgcctgccacaccaaaaccctaccctcccagaccctaaagatcaaagcaagattcatcaactgaacggagaaagatcgtcggcgaggagagcgggtggagggagaggatacggacgggcattaatccgtcgaactgcgtggcctggaccatcttgccgagccggagctggtccttcccgatgggggacctgcacgacttgcacgaggaccgcccggacttggcgtactccgccttccaggccttgggcggcgccgccattccgccggccggtgcggctggtgccctcttcctcccttcccctccgccgcttcttggcttgtcctagggcctagaaagaacccacacaacgagaaaggagaaagggaagggaaaggcctgatgatgatgaggtgtaaaaacgttaaaaaggaaaaaaaaaatctcccctcgaaaatttggggcgagttgagttaatttgatggtttttcttttaaaaccctgtgccatatcctccccgaatgtgtattctcatatgccatttttcttacgggctttacggactgtttggatgggttaactgtatgatttctcacgttttgccacgaaaattactaagtatttctcaatatttttttcgacaattaagctaaaagtaaaagaaaaaaaataataaaacatcagagtttatcagtacttatcataaaacaaacagatgatacctgcgttttaatgtgaaacatattgataactatatgtttaatactataaaaatgatagatagatttgtgagaggtgataactggatatgattgcatgttgatttgtagaattaaataaattgtaaatgatgttgtatatttgcatg

SEQ ID NO: 5130 - DNA, 2754 bp, Oryza sativa
cctgcagcccgcctgcttactgtctccttctttcccgaagaagtctatttcttgtccctcgcctcttttcttttagcccagacaaaagtctgtttcaccttcctatcgctacagtactccttctatctctggacagaacccgagctcctgtgcccactgcccatgcaactcgacgcccccgcttcctctgtagaatccgttgcatcccgtgactcgtttcccaaattggttgaagggatttcttcccttatcctcctctttctttcccctcaagaatcggagcaaatcccatcgtatatcgcttggattcgaagcggagttcatctcctattttcccggcgaaccttaaccaatccgccgccaaatcctcacgggtccgagcctatttcctccacctttgcctataaatagcagtatcaatacctcctcttccgtttctatctttttccagagcttttccctaaccttagccgcctgcccgcgctcgtctcctcgctccgccgccggccgccgctccagtcggtcgtagccgtcgactccgacatctccggtcagcgccgtcgcctccaatgggaccaaagcgaagagtggaagaccggccaccatctgcccgaagccgaagaccccgggaagcccttcgtcgccgttaaggccgagttcgccgtcgcgttttgatcttcggcgaagccccgctgctcctcccgtcgtcgcccagcttcgtcgccacctccgttgggttcgaaaggaggagctgcaccccggccacccctccgttgccgccgctcgttgtcggaaagccgccgtcgccgccgtcccgatctcatcgccgcctctacctcgccgccggccgtcttccgttgtcgttcgtcgtcgtgccgcccctcggtgagctcccgtcgtcgtgctctttcttccggtatcctcgatttgcgccgccgagccctagatcgccggcgatcgttggaagcccctgtccgtgatgacatcatcgctgacgtcagcgcccgttttccttttctaagataaatcgtaaatccttttctgtatataaggctaaaatcagattaatcttgtaaaattcataactaaatcatatgaagtcagaataaggctgtttaagtctctaaattcatctaaaatcatgatctacatgtttatttagtttatatgtactgtttatttggagtttcttagtctttttcctcgttttgtgtattagctcatcgtttccgttgttgcgaagattcgtgagtgcgtcggaagtgttcaagaagattaattgaagaccgattattgcaaggcaagtcacatagatcccaaacacaactcctttgagcatgttgatcctatatttaaattctctatttatttcaactgtgtatttattttcgaatgtcaccggtggtgtgaacttatacctttgctacggccaatttgcattgattaccttattccttgataccttgggatacaatttgactagttggcctcatataatggttcaattagatatattagtatagttacttagatatgcttagaaacattagtgtggctgtgtttgcaaccccatgttcccagcccctctccatcgttttccgttttccgagcgcacgtttttcaaactactaaacaatgtgttttttgcaaaaagtttctatacgaaagttgcttaaaaaaatcaaattaatccatttttgaaaaaaaatagctaatacttaattaatcatacgctaatggatcgctccattttccgtgcggaggcactatgttcccaagctgaacatgcgaacacagcctaaagcttcactattacctaaagctggatatttaaaggtagctcacgatgataaatcgtgttatgataatcaattgataattaaaacttgataatggtgggttgtgagcgtatagttttgatggtcgtgctcatgacaattaaggatcggttcgcgagctactgttgtgaaacattaaccatgccaaccacaagctagcatgggtaacggcatttccttttgtatagtataattcattatggggcgccagactgtgaagtggcgagaagtccgtgggggtcgctggggagtccatgcctctggtaattgagggggtgattatgatccaggaacggtgcgttgtggtggattgtgttatgcgaggggtactgtcacagctcctttccgaggtatcgtggtggtattgaggcgcatggcaacgtgttgtggggctgtcttgtgggtacagtgatacattggcaacgtgttgtggggctgtcttgtgggtacagtgatacattgatacatctctggccagagtaaaactattcgaatagccttgcccgtagttatgggcgggtctaacaatgttttcgtgattagtctcacactgatgctataactggtaataatttgcttagatcctggtttggaatggtacattcctggtttggagttagatctgtacagccgggtatggttgttaaggatggttgggcctgtgcagcatgggtgtgctgtacagtgttgattaatattgatgattaattactctactgttttactattctcaaatatttgctaaatgctgcttttgcaaataagccctatattatgccatcctttggtatccttgtgcacttgcatatttgctgtgtggcatgcggagtattccatgtactcaccttgcaataatcaatcaaacctcaattgaggaagttgcgaaggagaagacgtttggcttataccccagttg

SEQ ID NO: 5131 - DNA, 6462 bp, Oryza sativa
  unsure (1)..(6462): unsure at all n locations
catacaagtatggagcatgatgatgaaaaaaagagaaaaagaaaaaaaaagagatagccatgcactctcccaaatttcaaaagagaaaataaatggaggagatatacaaaaggagttattgttattagtatttccccttttccacccacaaatttaccatacacatacacatgcacattcttgacggccagaaagtatgtcttgtatttccgtggatccattatttgacttttgcaatatatgtgatacaagtaatgctctactcttttccacaccctgagctccacataaacattattagatagtaggaaaagaaaaggcacaatcatatgcctttgtgaggaatcatacacttagagcgatcgagagaatcaatggaggagcacggcaaagttataattttgtgttacttgaaaaaccccaattcgttcttcatgaaaagttaaggtgacttgagtcaagattttttcatttctcaattgcccagtatcgcatggtagacactagaaagacccacaagtacatgtatggctttgaataatttgtttgcatgattattagtaaggaagtcataactctattgtagagtccatagccttcactccggacgagcaaaggttaagtgtgtgggtgttttgacggtccttaaatcataatatctgactgtcaataccttcatataatgaactaaaatatggtatccaacttagtggtagggattattactaatcatttccactagtgttggtgaaatatgtgtatgcaggtatttaaggagaaaacagactcgtcatgcgacaaaatgaacctttgcacattccggacgtgtttacactgattggagggcccatatgtcaatgaaaactgcttagaattgggccaaaacatagtatatgatgttgggggcccattaagctacctcccagccgaagaggcggccgggaggagggttttccggttcggccgaaccaccagttcggctgaacccattttatggccgttgatcgccatcttccacgtgtacgctcctgatcacttcccaatggctgttgtggggcatttccgacaattcccatcaatgtaaccttcatttggagcctataaaaggaggagctcactctcatttccaacacacaactttgagctgaattacaagaggctctattgtatcttttgtgcattagaataagagtaaattgcatcactggtacacgaacttattaggtgggtgcaatctagtgcacgaacttgttaaatgctcgttttggtgcatgaacttgtctggtgtgtgtggagaaaggcgaaaagaatactatatggctaatcttattgatttaggggccgattaggatactatgtaaacatatatctgagaaggtttctattagacatacacctctttagtaaaaatagaatggatatactgatcgtagaaaaagattaaagaaaccgagcaatgatataagggttagaaatatatgaaattcatcgtttccatggtgaaggataaagtagagatcaaatttataaatattgcatgtcttatgaatactcactacacgtctgtatgtcacatcctaatcaacatctgcttcataaaattaacattgccaagctattttagtctcattcgcacaaactagacaagttcgtgtgccgaaacgagcattttacaagtttatgtactaaataagctctggaggggtgcccggaagtttggcgctccctccaacttctttctcgacgagtgtagctttctaggaggaattctggaggagtaccggagctgtcggtacactctgctccgggttcggagaaacttctattaagtaagcattcgtgttcctttcttatgttatttaattacttagtctaaataagatatatttcccctttgcgggttcattgtttagtattcgtactaagtgctctagtactaggactctaaataaagaaggaagttcctgtacaagtactatagtagtaattaataacttagatgtggtgtctaggttagagattacctttgtttgttgtgtaacccacggatttgttagaggtaggcggcaggtggtgacagccctgaatctcatcccagtaatcctccatgttcggatacatcataaagctatagctgaaaccacactggcagactagcaggggtcggtgcccgaagcagcagataggaaattacctttaacttagcgtagataattaaaacacatagaaagtcttctctagcctagctagcaaagtagcagataggaaattacctttaacttagcgtagataattaaaacacatagaaagtcttctctagcctagccagcaacctatagttattgtccttggatagtcttagccttaggtagattacacatgttccctgagttcaatatccttttggggtcatccgaaggtgaagtgctatagcggtattccatgcgctttcggatttatctatagtcataagaaataccaacactcggttaggtccgatcatctatcttagtcaatatacctatacaatcacaatgttgtttagatacatttgttatatccatcactttatacatgatttatcgacattattgggtttactcgttgctataaacttaatgctgtatcggtttagtctgatctagccaggtaactcatgtatactgttttatcggtgtgctagtcgataagttatctttacaacggattttccagccaatgtatgctttaaccatggagcttacatttaatattttgtatcaatatcggccgattggttcattagacatctacttcatcatattatcatcggccgattggattgtttgttcaagttcttccattgtatttatctaagtgtcagaatctacatcgactagtgtcgacattggctattatcgctacatcggcttattggccgatcggctctatgatcatcaatttatttatctaactgacacgctcgcatctcatcaaaaatttaggacctgcactgaagctaaacagatttcccaggccttcgtgtttttggcatcaacagtgcctgaagcatttggtagagttttagctttaacttaagttagctagttgaatccataggaatcctctctagcctatcctatcattagttgttgtccttggttgaatcccattcttatatatacacgcatgttccttgcaattcaatacccttagaatactctgaggtgaagtgctacagtgatatacgtgcgcttgcggatttatatgtgactgtatcaagtaccaataaggagacagcnnnnnnnnnnnnnnnnnnnnnnnnnnnttaagccctcggcaggcacacgaccgagccacccgacgcgtcgtcgccacacggcaccgatgctcgcgcttcgccgctgcacggccacgtgctcaccgttaccacatggccgcaccgcacagccctgtcgtgacatcctgtccatccaccgtccgtcaccccgccgcatggctgcgccgccattatttggccacgctaccggctctgcaccactctagccgctgcgcctccccggccatgtgtcgagccaacaggaagaagaagaaaaggaaagagaaccggaaaagaaaggaaagaaaggggaaaaaaatgaaagaatcttctggttttgcaaaaaggtcgtggcagttttgggaaattaagcgcatatttttcagcagtggaaattttgcgattaaaacccaagagctttatgaaaatgtatatacaccctagaaatttgcaaaatcaatgaaaaagcatattatcgcataatagagccacgtgattttgaatttgatcccgaccttgcaagttgaggcacttttattgttgatgtttatgattaagaaatttatttattgtatttatgattattgattatttgtaatgcttttattacctttaattaatatttttaaggtaaaatgtatagatttgcatagaatatattggaattatttgcgggaattgatgtcgtaggctctccagatcttacattatatttcagagatgaagtgaataaatcaattcatcaaacaagcataataaagtatttgatgcctcaagagaagaatattagagacattgctgggcctttagcctaccagtcaacttcagcctgagatgtgctcgtcaaaccactcgaaggcggcgaccagatgtgttacacattcagtagacttgacaaaatggctaaagatctacaacatgtcaaatattcttaactcatactcatgtgaatctagttcccaggatgtgcactagattcacactttcatcttaagcatggaaatacatagcaagatacatttaagacgaaagtgatcacaaattacaactacttaatagatacatgggccgaccgaccaaatatagatatatcagagaacagcggaagcttgactacccaaacacaagcacaccgactaggggtttacccccaataagttcaagtcctagaagaagcagtcgaaaaacccgcattactcaacttaatctaaacatacaacctgcacaaatagatatttcaacatagcaggagtcagtacattatttctattcaaaggagcgcaatatgcagttcaattttagcataaatcaagttttgtttcacaatacttttgtaaaggagttgatgattcaattaatcaaaacatttttgtaagttcataataaatatcattatatcatcataagcatactcttgttgtcttccttgacaacaagtcatataatcatcatcacactcacacaactcaatacatttcacccattccaaatccaagtttcataacacattttaaaacataagtctatactcatgacactttaccaagcactcatgaccgtgagcatggctaattgattagtttttagactctgcagagtttgtatagctttatccacatgaggtgaatcgctctagtttgtctggtagccatcggtaccaccacactttacatattgagtgggtttacaggtcacaacgaggcttttacattaagtattgtataatccttgcataagcatgatgactgttgtttcacactaagttgtcacagcctgattttccgtatcaggatttataaattatttaataaattattaatagaatttatattaaatgttcattaatttacaagtgaagttaaatgtgggaaataaaatttcctaaatgttgtcgaatggacaacaatgccacatcgaaaggcgtgattctctcaacagtagttggaatgtaaaagcaattgtattgattcgtaaatttttttggggatccccccattacatggccctagaggtctatttatagccttagcacaagcctggaccttctagggtttagggttacagaggatttaacatggttgcccttatgaaacagacatttacatgggtatgcagtgtcatttgcacatatgggcctttaatgggctgataggctgctggtctatagcaaacaggcctaaaaggccgggggcggcctgttgggcctccttgatgccgaacttgtcatggcaaagtctttgtagttcgcccgagatgcctttactttcggagtaccgatgcggctttccagccttcgccatcttcgcttattgctttcaccataaggcttgcctgaatggtcttgacggctttggcttgaatccttgctggtactatggtttcggcaggtccggccgaagggcttcatggcatgcctccaacaagcccctcacgggcaagggtgagtaaggagcttcggccgagaccgtgcaaactatacggtatggcttgaggctccccctttcggccgatgttcctgtcgaaacctctttttagactcctgcagaaaaaatatgaacactggtgttcgcctttcgagaatggtgaagctgtattatgacactgggtgattatattttgccaagtttgtctgctttgcgtgattcttaacttgtattttttttctttcccttttttccctattgttttagcggggatttcgccgaaagtcatgtgttcagccccctttcggggattggcgaaaagatttgttgacttttcagctttcgacttccattttcgactcgtagcattttgcgctgggaaaaacgcttatgttttgcgtaagttgaatgtaacggtgtttggtatctttattccgaaacaagctgtcgcggtttcaaagttcggcgagcgatgcttctgccgattcgtttcgccccccctggtgttttcatcgatcaagcgttcgccttttatgtagctatgtggttgtcaaaatggcgaattggaggtgaagacatcctggtcgaaccttagaggattacgaccggtgccacatccagcgccgcgatgacattgccacactttggttagacttcgaaatgactaatcgtcaagctgctttcgcttgacgtcggtgtgtatttcgcctccttccccccttaaagtcgtgtatagtatag

SEQ ID NO: 5132 - DNA, 5579 bp, Oryza sativa
tgaaaatggtggtagaaatacatgaagggctgtgcggagcccatcaagcaccaagatcagttgcatcgaaggtgataagacaatgagtatattggcctacgatcatcaaagacatagagaagtacattaagacatgtaaggcatgccaaaaatttggtgcaacgtcaaaagcaccaccaagagagttgcaaccaattccaccagtttggccaattccaccaagagcaaaaggagatttacgttttgtcattgtggcaattgagtatttcacaaggtggattgaagcagaggcagtagcacgaatcacatctgcttcggtacaaagattcgtttggaagaatatcatatgccgatttggaatacccaaggataatggaaaacgatccgagtcaggaaagttcaaagatatgtgtaaatgtcttaacctgcaaatcaactttgcttctgtgggtcatcctcgaacaaatggtgccgttgaaagagcaaatgagaaatagtagaagccataaagaaaaggctggaaggttctgccaaaggaaaatggccagaagatctgttgtcaatcctttgggctttaagaacaacagttgttcgatcaactggcatgactccattcaggctaatatatggagatgaggcaatgacaccaagcgaggtgggagcgaattcacctcgaattgtgtttgatcaaaaagacgaagaaggaagggaaatcaccttggaaatgttgcacgagataagagtggaagcattagacaaaatggcaaaaaacacagaagaaaccaaaagctattacaacaaaaaagtgaaaatcaggcaaatagaagaaggtgatttggccctcaagaaaacactaaatgaagtggctgttggaaggaccattcatagtaaaaagaaagttaaaacaggagcatacaagctggcacacctcgatggagaagaattaaagcatacttgggaatgctgtttccttgaagaagttctatgtgtaaaaaataagaaaaggaggaggaaaaaaaggagaaaaaaaaagggggaaacatgttgctcgaaatgtacaataccgaaccaccttgtaaaatctcttttcttctcggtgttatacatataaacaggacgtagggtgtatcaataatggatggtatatggtgttgcgaatcaagaaaatcctccgcacgcttcggagaagaaaagccaactcgataacaaatcgagaaaatactccgcacgctacggagaggaaaatccaacttgataacaaatcgagaaaatcatccgcacgcttcggagaagaaaagccaactcgataacaaatcgagaaaatcctccgcacgctttggagaggaaaatccaactagataacaaatcgagaaaatcctccgcacgcttcggagaggaaaatccaacacgataacaaatcgagaaaatcctccgcacgcttcggagaagaaaagccaacttgacaacaggtcaaaaagcactccacgcagttcgacaagttttaccttcgcccaaaaacctaacgataaaacgctcgaacacccttatccgattcgagcaaacagtggaaaattccacgcgatgaggtaaagcgtgatttcgacctcgtcactccttcgaaaggtaagaaggacggcggttttcgaacaagttttaccttcgtccaaaaacctaacgataaagcgttcgaacacccttatctgattcgagcaaaaagtggaaaattccacgcaacgaggtaaagcgtgattttaacctcgtcgctccttcgaaaggtaaggaggacggcggttttcgaacaagttttaccttcgtccaaaaacctagcgataaagcgctcgaacactcatatccgattcgagcggaaagtggaaaattccacgcgacgaggtaaagcgtgatttcgacctcgtcgctccttcgaaaggtaaggaggacggcggttttcgaacaagttttaccttcgtccaaaaacctaacgatgaagtgcttaaacactcatatccgattcgagcggaaagtggaaaattccacgcaacgaggtaaaacgtgatttcgacctcgtcgctccttcgaaaggtaaggaggacggcggttttcgaacaagttttaccttcgtccaaaaacctaatgataaagcgcccgaacactcatatccgattcgagtggaaagtggaaaattccatgcgacgaggtaaagtgcgatttcgacctcgtcactccttcgaaaggtaaggaggacggcggttttcgaacaagttttaccatcgtccaaaaaccaaaaaaacgatgaaacactcaaacactcataaccgattcgagcagaaagtggaaattccatgcgacaagataaagtgcgatttcgacctcgtcactccttcgaaaggaaagggggacggcggttttcaaaaaccaaagctaaacgctcgaattcttttctgattcgagtctttgcggaataaaaggaaaagaaaaaggaaaaatgacattgagaggagaaggcattcccgtgtaagggacaattgagtagcgccttttccatattctaagttgacgctcagatggtctaaaagtttgccaaaagttaatgctgctcgaagcattattcgaacgctgttttctaaactcgacaacgaagtcacgcaaactaccatctcgatgttctctttgccattggaaaaattttaaagaaaaaatacaagtgtcatcgtaatgtatttccttctcttcatcatcacatttagttgctttagaaaagagcaacttctcgtgtgttcgaaatgcaacgagcttcatgtttcgagttgaatgatacttgttgcgtcgaaccacaacttttcggttcaaataaacctgcttccccgacaaaaacgaaatgatgatgaagcacaggcatacagagaaaatagcaaatggtacccaaccacagaaaatatacataattaagttcccaaccacaataggttcgacggagcaaaagaacaagcgttttcgaccatatccaaaaagttttccaagttagttttccctaaaataacttcacacctgtgaatcagatttgtgagcgtcaccaccgttgtctggttgactcgaagaggattgtgcggtgtgtgagctcgaagccaacgatgcttagagagaagcaagggtatcttcatagcctttctttttccagtaccaaacttgaaaagctttgactacagatcaaactgccgcatggtgttgagcaaactttgacataaatgtgcatattcaatacataaagaatatgtatacatataacaatatatatatatatatatatataataaacaaataaatgcataatgactgacaagaataaccgctttcgaacttcaaaattttctatcctagtgtttttcgactgaataggaggacggcggttctcccctagcttttgattcgaacacggtttcggccgaaaacacacttcgcccttacccgtgaggggcttgttgtagctaggggtcaccaccgttcctctctattcggcccaaaacactgtagaggaagagattgggtaagattgagtttttattctaagtatccgagtggcaaatggtcattcgaacaaggaaatggtaaaatgttgttcgagttggaaaacactattcgagtcggaaaataccgttcgagtgagtccttgtcactaagtctcattatccgttttgcgtatttcctgagttaataacaggtcagctgtcacgcccagaaattaactagcaatttccgaacttatttgtgcattaaatcctcgtccaggaatcagccgaggtacacaaactgacaattaatatacagattcatcataataataacgtaaatacttacaaaagaaaagaaaaatagcagcggaattacagtctagcgaagctccggctccactcccacaggcagctcaactgaggtataagccaaacgtcttctccttcgcaacttgtcttcaactgaggtttgattgattattgcaaggtgagcatatgacatactcagcaagccacacagcaaatatgcaagtgcacaaggataccaaaggatggcataatatagggttcatttgcaaaagcagcatttagaaaatatttaagaattgtaaaacagtagagtaattaatcatcaatattaatcaacactgaacagcacacccatgctgcacaggcccaaccatcctgaacaaccatacccggctgcacagatctatctccaaaccaggaatgtaccattccaaaccaggagctaaattaattaccatcaattaccacattattattaatgagtagtgtaggactaatcacgaaagacattgttcgacccgcccataaccgcgggcacggctattcgaatagttttactctggccagaggtgtaccactgtacccacaagacacaactccacaatatgtcaccatatcatcatgtgcccatgctaaacatgtcaccatttgtgtagttgtgacaagacccctcgcatatgtcaactcaaagcagtgcaccgttcctagatcgtagtcaccccctcaaaaaccagaggcatggactccccagcgacccccgtgggcttatctccgccacttctcagtctggcactccacgatgagccttgctatgcaaagtgtccagccgttgcccattctggcttgtggttgacacggttaatgtttcacaaccgaaactcgtgaaccggtccttaattgtcatgagcactaccatcaaaaccatgtgctcacaacccaccattatcaagttttagttggcacattaattaattcaccaatcacgattaaccatcgtgagctatcattaaatctctaccattaagtaatagtgaaacattagttatcccaattatgtgctaatgtttctaagcatggctaagcaattatatctaacatctagctgaaccaatatataaagctcaactagtcaaattataataacccaatgtatcaaggaatagtgtaatcaatgcaaattggccatacaaaggaataagttcacaccacccggtgacattcgaaaataaatgcacagttgaaataaataaagaatttaaatatacgatcaacatggtcaaaggaattgtgtttgggatctgtgtgacttgccttgcaataacgggtcttcaattagtcttcttgaacacttccggcgcactcgagaaccttcgaaacgacggaaacgacaagctaacacgcaaaacgaggaaaaagactaataaaaaccaaataaacaatacataagaagtaaacaaacatgtagataatagttttagatgaattaggagacttgaacggcctcactctgacttcatatgaattaattatgaattttacaagatttaatctaattaaagcccatttaaaaaaattaaataaatttaattcaatttatggataattttaatatgtagatctttattttatacaacttttgcaacttgaaccacattaaactgagttacaatgaattagttatgaatttttaaagattaaaccggattaaagcatttatatagattttaattgaattatgacgcaataatgaattatttttgaaaa

SEQ ID NO: 5133 - DNA, 21899 bp, Oryza sativa
agcttacaaaagagaagaaaaaagctactagagccatacccgaactcttccgaagacttccgaactcctgatttctactctattcctattccaccagctagatactactaaactaaacttgagagaaatgagagagctattgcttgaggtgtgtgttgaagtgaagagagtgaactccttaaataggcaggtaatgatggttatggcggttggaaaggtcggtaataccctccaatggccatagggagtgaatctccaccgttccctcaaaaccctacatccatcggcgctggcataggttcggccgaaccctaggctggcccaaccagcccacaagttggctggtggcctccttaggtgttcctcttcatagacttggcccagtgtgtcgtgtcatttttgagttcttggcccattcatacataagtctggttctcgacatcgtccgattgatttatcgtttgtgttgatgtcgattctcctccactttattgtcattctctacaaaaggttattaaacctaatactagtggaatattattgttctaacatatttatgcattgcaagcatcactagttctcctctattttggtaatattgacggtcgaaattgattgataacgaccgtcaacaaaaccccccaagcttaaacctttgctcgtcccgagtgaaggacgaaaggaaacaaggacttgcttgttgatcaggagttgcaactatgctgcatatctcaaagacacaggtgcaaggtatatatactctctctcagattaaataatctttggcacggtggcttacccttacccctgattcccacgagacgctgcttctccttgccttgagaagttgaaagatagaatagcaagttagagtaccaatcacccaatctttattcaactcttattccggaagttttcaaatgattttgcaaaagaaagccaagttcctcaaatgattcactcagtctctccaagtgtatcaatttgaattcctcaccaaattgttgccttttttattcctactctaaggttttatatgtggagctcggtagggatcaaacatggcatacttgcattcacatttattactaagtcaaaaacttagactaaagcagataactaaacatactcaagatcaagatcgtgcaaaatgtgtgtgtggtatatggtggaaatggtacatgaagaaaaataaagaaaatgcttctcctttgtgcttactttcttctcccaaaaatccttcttttattgcttaggagagggcatggctacattttttttatttcaacatcatgctcatgcttgatggagcataactttatttctcataaccatgcctttccctccattttttttaggagaagaaagcacatgaaagcgtggagagtttattttggtggtaaaatggaaatggaatattgcttagctccttgtgtaggagtttagcatgtgcatatgtgtgggtgtatgatcttgatcatagagcatgagaagtacctacacgagtcacaagagtttgacaaagttcaatggaatgacaagtaaccaaaatgtatatggtttaatcatgatagcacatttttggctttagtaggaatttatatcaaatgaggaattctcaatttatcattttgaaaaacaaaacatctggaattcaagtcaaactagtatcagggtcatagcaactcatatttactatctcatatctcgcaacaacctagacttagatcagcaagtgcagcccatttacctcaggttcccggataattgttggctacttatatttaacctttgagagagcatttaccaagaaaccatatataagagatataaaatagagcaactattcatcatctcaacaaagagaactagcttgtcttacctagcatgactcaaacctatcctatctttttggtatattctattttgcaaatttttatattgtttttatttttataagatgcaattggaaagggaaatatgcaatgtgatacaagttaccttagtagggggagcgatgtctcccccctaagcttggctttcgctcagggtacttgataaggattgaatccctgaaaacgaaagtacgcctgaaggtcatcgtgctgttgctgcatcatgttgttgatgttggcaaactgagcatcagcagattgttgccattcttgtgtttgagctatgtgttccgtgaggttgtactgaatctcccccgtctgcatatcaagggtgtccattctcctagttatttcacccaagtcccaacgagaggaactcgagcgacattcacttggagatggaggcgcaccacttgacctgggaggttgattgtccccccattggatatcatgaggcgcatgccacaggtcctcactggcagttgcccaggttgagactccgatgctatggcgtggagcttgggtccatccgggtgcatccccagttggtgcccaacctgcctcatacatctgcacgggtgttgaggatgatgaactctctcgttcgttccttgtcatgctgcgcgtctccctgtatgttccacctgcacgagattcttctatggtctgcaggggaatggttagttcacgacagtgtaggattatggatatcattcgttctaggtttcttgcaaattggagcaccagaaatatctttccaaaacctatttttctcgaacccagaaattcctttctggtgatcgattttacaggaatcgtgaaaaccaagaagtgtacttaagcctttccatgtgagtgtgaactcattacggaaaaagtgaaaagaaataccatctactatttctttcaaagtgcacagaaattgcaaagtaagcaaacaagaaccaagctcatctaccatagcaaatctctgccaaccaaaagctttccaaatagaacaaaattcaacatccatacctatcattttcagcaactccggtgagtattctcgcgtgtgagcatactcccggtcgctcagcatgtagtaggcttgtctctcccgatcactgacaagatcgaggtcggtgtcgttccggagtcgtcacggagcttcggcgtcttccatcgagacatcggctgatgaacgagtactagactcgtcatgatgacttgatgaagagccggaccctttgaacagacgagacaatcgcctcctcatactgcacaatggggcaagaatggactaactcggcgggggttaggaatgacaagagtttcacccgccggttagattcaccaaagcaacttgtatgtatgcaactaaatatttgaatttgagggaaactatcaaagcttgaatgaacttgagagcaaactttggagagggaatgaaaatgtgttgaaatggggtggaattccctctctcagccggctggcttttatagggtacccacaacagtcagaaatgacatgtgggacccactagccgttaccctgccaaaagcggcaggtagccgttgcctggctggttcgactgaaccagggtgttcggccgaacccctggtgggcccaaccggccccacttttagccgttggattccaacggtcagtgtagtcatggcatagcgaattttcgttggaaatattattttggtttgctctgaaaaattcatttgaagaatttcctcaaaattcaaaaatcctaaatgcaattttgaaattcaaatatgtgatgatgcaaaaattcaaattgttgaaagtaaatatgcggatacataccaatttacttgttggtgaaggttgcgtcgtttaaagtccaacgtgcaagactgtacctcctttcggttcagtgcccggattttccacccgtctccggaggtgatggagcggacatctttggcttttccttccacaccttctttggttttggtgcggaagacggcttcttttgagccagctgctctaacttcttggccagtataggtgattttaccggcgtcttccaataacggttcctgggcatcgttgtttccttttccaggaaattctacatgaatttcaccaggctgttctccgttcccacgtcaatgttggctcctgcggtgctaaggaacggacgccccaggatgagtggtgtctccttccccgtgtccatgtccagcaccacaaaatcaaccgggatgaagaaatcccgtatcttgactggcacaatctccgctacccctgccgggtaacggactaatgaatcagccagttggaggcgcatcggtgttggtgccaacaccgtgaagttgagtttgtcgaagacgtcttttggcatgacgctgacactggctccaaggtcacacaaggcctggtcgaattgttgtgccacgatcgagcaggtgatcgtaggacaccccgggtctttcatcttctccaggaggttgtggagtatcaggttgctgcattgttccgtcagcttgaccacctccgttgttgggagcggtctcttgttgttgagtatatctttgagataacaggcgtatgtcggtacttgcattgcgtccaacaatggcacgttgatgtggatcttctggattacttcaacaaaacgagcgaactgttcgtctacatacggtttcctaatccgttaaggaaatggcagcaactatgtgtcgcagtactcttgcggcacggtcttttctggctgaacctccttgtcagccgtgtcattagatggtgcttcgtttgataatccattagttcctgcagggttaggatacgacggatcacgagtggacttacctcccctcgtcgtgatcgccttgacattttcaatgtaggagtcgggttgccccggaatcctcccagtttcagttgcagggactaaggatgccagctgagctaactggatttctatcattttattaaagctcagctgattttgaaaagcagaagcaaagccctctagtttgacattgatgttttctaggtccttgtcattggcagcaagccttttgcttaatgcatcagtagttctagcttgcacgaaaacgagattgtaacaccccaggtaaccacgtacctagagtgccacaccataaatcactcaaaccactaacttccaaaattattagaaatttcggcagagcctccccttcaacaactaaaagtctatctttgattgccaattatttagaggtaataaacaatatctacgaagtcaatctcatggaccataggccacacttgttccacttataataaactttctgagtaactagaacgaaagcattatcctcaaaaactgccctgaacatcaatagatcctgaattttctaagaaactcaaacattcaaagtaaatgaattaaatccactcaataaaaaatcaatgtgttgggtgcgtgtaattgaaaagaaataattcgaatatggaaggtcaagcaacaaaacaaacaacatgataatatgggcgtggttggtcaaggagggctggttagaaaagttaccgttattgttacctccttgataatatgggcgtggttggttccacccctaacctccatgtggacggtacccgttgttgttgcccatgtacatcgcctcctcacgggtttccgggctgtcattcccagaatgacctatgttgccacagacctcacacgtgacgtgagagtccaaggccttgacggtgccttgtggccatttctcatggtcgtccaagcgtttcatgaggaggtccagcttggcagcaagtaattccatctccttgacggtgtgcatgcctcactgacgggtctggagtcgttcctcgctccaacccatattggagaccatcttctctattagttcaaaggctccttgaactgttttagagaagaaggcccctccagctgccgcgtccaggtgatcgcgggacattggggtgagtccattgtaaaaattctgcaggatcagccagtcgtccatcccatgatgaggacaggcggccacgtactcctgcagtcgttcccatgtttctagaatagactcgtcccttgtctgctagaaactagaaatccttccacgaagggcattggttttgtccatcgggaagaatttcaagaggaatgatgtagagcatttgttccaggtgttgacagcagcacggttggcataaaaccactgcttcgctctcccgagaagggagaacggaaacagtcgcagcctgacggcgtcgggactgatgcccttgatggtgtacgtgctacaaatctctaggaactgttgcagatgagcattggcatcctcattaggcttgccacagaacgggctagcctgcgccatcatgataaggctggacttcaagtcgaaatccacgtcccctatgttgacctgtggcccaatggccacatagtcagcagagagagcagcgaactcgcgaagagtcttgttggccatagtcttgaaggtcggtggcgctggtacggctggtttctctgtcggtagagttttctgcggagcaacaactcgcggcttgacgctccggatgaaagcttctgcattttctttgaagttttccggcaggttgaaaccagtcatgcactaccctgttttcacaacaaacagtgaaaacaaccaaggttagcctgcaaaggaaaatgattatacagaggtaaatataaagtattagttcaagtaatctctattatgaatcttctcgggcaacggcgccagaaatgcttgttggtatttcttaacgacattactagaaatataattcccagcaatggcgcagaaatactcctggtatattatggttacagaattcatccgcaagcgcacagatataccattgtagcatttcacccgagagtattccaagggtatcgtatttattttatcccgtgggaagatcatgtagagagagcttgactaataatttatatgttacttatgataatcatattctaagcaggggttaagataatccaagggtagaatgacacacaagcattattactcattctcataatatattatcttatcttagtggaaagaaaagagaaagaaaatctattcctatacttctaatacacatagtatacatacattctagttaactggtatactagctaataccctctatccgatgccctcctggtacttcgagaagccacccctgactgccgagttccttacgacagcccatcatgaccatacaaccagggctaaatacggaggaataccctccctaggaaattaacttaggattatataccggcgcggaggaatacccgtactgagctatcaccatcagcggcccacctctcatccgcaatatataaccccaaataatgatatcccgtaatctagacaccacgcctaaactatcagatacttctctaatatcatcgtcatgacatagaggaattgcataagcaaacattatacccgcaccaaagcatcttccagataagctagccgtatattcagtataacatgaacataatgtaaagtaggtactcatatactcggaaagtatttcaataccataaatgtatttagaagagtattctaataaaagtacaaagcttacaaaagagaagagaaaagctactagagccatacccgaactcttccgaagacttccgaactcctgatttctactctattcctattccaccagctagatactactaaactaaacttgagagaaatgagagagctatttcttgaggtgtgtgttgaagtgaagagagtgaactccttaaataggcaggtaatgacggttatggtggttggaaaggtcggtaataccctccaacagccatagggagtgaatctccaccgttccctcaaaaccctgcatccatcggcgctggcataggttcggccgaaccctgggctgtcccaaccagcccacaagttggctggtggcctcctctggtgttcctcttcgtagacttgtgaattttggcccagtgtgtcgtgtcatttttgagttctcggcccattcatacataagtctggttctcgacatcgtccgattgatttatcgtttgtgttgatgtcgattctcctccactttattgtcattctctgcaaaaggttagtaaacctactactagtggaatattattattctaacatatttattcattgcaagcatcactagttctcctctattttggtaatatcaacagatacgtctggtgaaaacagaggaagaggtactatcatactcaaagtcactaaaagtacccaactgaataaaaagggaggcagttgagatctggcaagtggtatggagcctcataataaacacttcccatcaaggaagaaaatcagcagttagagtacacacaacgctggtacactaagaggatcatgcccacatcaaaaagcattaagcaagaagaagaaacatatgaaaaatgcatatcctcgtatatctatggatactcgcatagagtctcatacaaccaatagaagttaacaatgagacctattatgggcaatgtttcctttagacagtaaaacttattggcaatcaaccaggagttgaatggaattaatcaactagaagttcaaaaaaaaaacaacctgaatatagacaacactgaagataaaatctggatgcttttcaggagcttggattggacacttgcataacagtacataaaaaagtacttagtcctaaaccaatatgtaatgtatataataatctataaagaattgaagaagcgaactcgttcattttgaatttgaatttgatttgaaattgaaatgtttggctgaatctaaatcacgcttagacttgcagctaaaaaatatgatagatggaagcttagtacatcagtccaaccacacttagaaagtgatcaaggtgcatggctttggagtagtcaattatagctaaaattgggacgaaattccaaacacgagtgtgtgatagcagcactcgaatacttggctaatcgggactaaaccgaattaagtatcattgaactatacatagccttggcatggctttgagagatggttacatcgctccagcaatcgtggttcgaaaattatctcaaccccattattttatttgaaaataatgtagcgtatgacacacaatgcaaatgagttcacatgaacaaactcactcaaagcatatgaacctcccaagttcttctatgcacatgaattgcatataaacaacgaaatattgcatgctaagttatgtgaaaatcttgctgattttatcactggtcattgttgacatcttctcgaatagatgtgtccaaggaaccagaacaatgagacttgtaagaatgtaaaatttaaggggagaatttcactgattcattcagaatcttaatatagaaaattcaaatacccaacaaatcaatttagaaagattgaacgaagaattggatgaattgtactctttttcccttgataagttattactggagtttcttatcaaggtttttaatgagacaattcgtgtgacaccgcatgaattttttgtagagttttgatgcacaagcatcacacaatgagagcacggagggagtgttagggaaccagcggcccatgaagagcggatcactaaatatgaaaggtggatgaggctatacctataaatagtggggaagagatgatagattgtacacttaaaaggatgaaagaatgaatgaaaagctgcccctccatatatcttgtgtctcagcacctctgaactatgcatgtagcaagactacgcatataacagatgggttgtataatacacacaacgggttacactaatattaatttccccaaacaccatagggaacagctgaagatcagcttgccatgtcatcaatttttgcataaacgcctctagttttcaggtgataatacgtacgtccgcagtctcttgtcatgcatttcgaccgttatcatatactcttgcagttaattgatttaacttagcatttatatcatgtaaatgcgaaagaaaaatagagtaagggcacgtacaacggcattaattagccggctctctccagtgccacataggcaaatcagatgacgtggaagagagatgatcgatgagagagaaacaacgatgctatctgtgacatcgttgaagcatcggctcctctcgcgcaaaaaacgagcagacttgaggagagccctccgttgtagaatcggtttccagcagagccgtgcctccagatccaacgtaaaaattgcgcgcggaagaaatttggcgcgggtgagggatcgggatacgggagggcgggaatcggaccagagatgcgcgccatccaatttcttcgaccccaaatatggcgctgaaatcggcagatcgggttccagtccaatacgtcgccgctacgctcctccacctcgctgctgccttggatcctccacctcgccaccaacctttcccctccacctcgccgccgacgttgctcctcaatcactcactccatcggcgttggctgtatggctgggagacggacaaaggtggcatcggtgcctgagacatcctccgtcggtaccaacacctccggcttctgcttcacctcaactgatgcccccgccgcctttggtacctttcctccctatcttggaatacctcccttctctgcatctaggataagcgcggctgcgacgggtggccatatttccccatctccttcatggatacagacagacaaaagctcagataaagctgctacgccggatttgtcctcgccacatgcaaatatgcagagctggtaaccacaaatcccagcaataatctctactatcttacgaagattcagttctgcaagttttttgttctctgaatgaaattattaaacggttgccatgttctaaacttgatatattttctgaaaatacaatgagtaaatcagtccaagattttctgaaatacatcgttcaaagcagtccatataaattgacagataaatattggtatataatccataaggttactgtttgttcatataggtctgtacagattaagttattgtacatctttggccatgctgaaactgaagagacctatagttgccatgttatgttatttctctgtacaaactaaggtttctatattttttgggagtatgtcacaccttaaaaatcctaaatatataaattgttgtttaattggaattattagaatttattttaaaagcctagaagagaagatctaattttaattaataaattccaatataaaatggggccagataaaatttcattaaatactttgcttaattctataattcctagatttttctgggatttatttgagctaaggaagtatttttaataaatggaattgcatttcatgaataatttaaattgaaaaaggtttttttaaaatcctcttttggctttgggccgaaagtcggcccaaaaccttctctctctctctcctggcccaatccggcccgcagccgagccgcccgctcgcgctcgtgtccgcccgctgataggtggggcccacctgtcagggctgtcgtcttcctccggccgcccgccgcccgaaccctagcgtcgcgccgccgccgtctccttccaaatccggccacccctttccgtttccgatgaaattagtagaggggaaatgatcttcggaatccactctaccttttcccttttggaaacatcgtctaaatcgctttggaaatccgtggattcgagtttgattcggatcgatctctctcctccgaaccctagactttccatcgcgtcgccggtcgccgtgggccttcgccgccgcctccttgcccctttaaaaggacccccaagcccgccgctacctgccgccacccttgcctttgcccgccgccgtcggtagcgccctagcaccgtgcagccgtgcgctgccgtcgccgccgttcgtccagccgtgcgccgccgccgctccggtcgtcgtcgtcactcgggaaggccgccgtcgtgatcgccaagccatcgccgacctcgtccgcccctccgtcgtcgccgtaggccgccggaacaccgtcgccgttgtgaagccgaaggtcgccgccgcttcttcctcaacgccgtcgccgttcgttgatcttccgccgttgttttggtcaccggtgagttcgccgcgtcgccctctacgtgttggtgtcttccgttcgcgtcgtcgcgccgtcgttcgccgacgagcttgcgcgcccgagccgccgccggtgatgacgtcatcgccgacgtcatcgttgccgtccgtcgtagaccggtcatagaccgttggatcttggccatccgttttggataggatcgatctcggccgtttgtttccgtgagccgccgccgtgcacccggtccaccgcgaaccctagccgctgacgcaataattcccttttccttttcaaaaataattcattattgcgtcataattcaattaaaatccatataagtgttttaatccgatttaacctttaaaaattcataactaattcatcttagctcggatttagttggttcaagtctctaaatttttctaaaatagagatctacatgttaaaaatatccacatgcactgttcatgcttgtttatgtgctgttttggtgtttttgctcttttctgtttagattccaacgtttccggagagttcgttttcgcaggagaagaatttgaagagttccaaggccagcaaggcaagtcacacagatcccaaacaaccttttgagcatgttgatcccgtttaaagctattgtttctattcaactattgcatttattttcgaatgtcattgggtggaattaacctattgtttgttatagcccttttgttcttgattattttattccttgataccttgggttattataacttgactagttgggctttatatattggttcaactagatattagatacgattgcttagcaatgcttagaaacattagcacactattgggataacttatgactcactattatttaatgatggcttaatgatagttcacgatggtcaatcgtgattggttaattaattacttgccaactaaaacttgataatggtgggttgtgagcacatggttttgagagtcgtgctcatgacaattaaggaccggttcacgagtttcggttgtgaaacattaaccgtgccaaccacaagctagcgtgggcaacggctttaccttttgtatagcatggttcattgcggagcaccagtctgagaagtggcggagataagcccacgggggtcgctggggagtccatgccttgtttataagggggtgattatgatccaggaaaggtgcgctgtggtggattgtgttgtgcgggggtactgtcacagctcctttccgaggtaccgtggtggtattgaggcacatggtgacatgttgtggggctgtgtcttgtgggtacagtggtacatctctggccagagtaaaactattcgaatagtcgtgctcgcggttatgggcaggtctaacaatgtctttcgtgattagtttcacacttctcaccataataaaagatgctataactggtaataatttgtttagctcctggtttgaaatggtatattcctggtttggagatagaactgtgcagccgggatggttgttcagaatggttgggcctatgcaacagggtatgttgtatagcgttggattaatattgtttaattattacttaactattttattaaattctgaaatgtttattaaatgctgtttatgcaaatgaaaccctactatgccatcctttgttatcctgtgcactttcatatttgctgcgtggcttgctgagtatgtcatatactcaccttgcaatcattcatcagaggaagagttctacagtggtgctgatggtgtggaggattaggtgtagccctggtcaagctgcctgtggagtggagtcgtctgcgctgtttatcttattttttccgctgcttagatctttattgattgagaggaactatctacctctgtaatgacattttattcgcttattaattagagtaataattgtactctattatcaatttgttctaagcacgacttagtagatcaaacttaactgatgcagcactaagtatgaaaagaaacataatatctagacaatcaagccgttgactgagttttcatggtggtagatgtctaagctaatctaatctagcaacgcgatttagccgataccggcagaaaccctaaaacgagaagcagccgatagagctaaattgatatgctaagactagattaacaaagacatatgataaataggtaggcgaatatatcatccaaaccagagcaatccaagaggtcgaatgtactgatgcagccttgaacgacgccgacgtagacgatacaattgcctaggccgacggaacattggacttaccccttcgccggagatcgaacaccgatgcagccccgcgtcaggtgccaagtcccgccggatgataaaataaagtagaaaaggtaaaaggtggcgatgcgccgaattgtattgatctgtggagatagattacatataccccgggtgtacatatttatacccattggttgatacaagtccttgtcggacaagaaagaaactttcctaaagataaaaggaaaagataaagtccttataggacactaaacacactttcctaaagataaaaggaaactaacaaactattcctaattaatagataacttaccatgccgcattctctttgaactcggtctcttctggataagcttcctttagtagatcaatttccttaaccgaatatagcaagaatccgacaactgacgacttgaaaactctcattggctaatctcaggacttcgaagccgatgctgactctaagccgatgactactccgggcttaccaaatttcactgttaacattaaggcactgaaattgtgagcttcttgcaggggaaatggtacacaccgacctggaggattcatgagtttttttcacaatcagccaaatatatctcaacattacaattttgccggcacgccttcacactacacaccattacatgctaatggttcttcaccaccacttgctaatggtggttcttctatgccgcttgcaacacccactccacccccatttactgggaatcaggaccatgtcaatgttgatagtgatgatgacactagtgtcgctcggaccaaattgaagctaaattggacccaagaggaggatgttagactggtgagaatgatgcagattttacttgatttgcattgtgaatatgtgtgcataattacactttcttttgttatctttgtagatgatcttggttgaacaattcaatggacccaattaatgggaatgataagaaggctgaaaaatattggggagatgttgctacagaatacaataaaaccacaccacagaatagatggagaagcccaaagcaagccaaggagcgttggcacaaactcaacacacggacggatctgttccaaggctgttggttgaaggctaagcgcacatatactagtggttactctgaccaaatgtggattgacatggcccataagttcaatgaggccgataacaaaaaattaggatggttcgttctaatagatgtatggtacgcatgccgtgatcagcctaagtggaatgcatataatgatgcactcaagagagatctaaaaggaagtcgtctaataacagatgttgaagaaaccccacggccaatcggacaaaaagctgctaaaagagctgcacgtgaaagcaagggaaagtccaacgatatttctgatgctgaagagatatacaagttagaccaagtccaatctgatattcacacaagacgcatgaagatgatggaaatgcaagagaagttatctagtcgtcaggttcaatcatcaaagctttctcaacttgctgcacgagaaaatagattagcaacaaaggaaactaagtgtttacacccaaatttggcacctaggattaaaataggaaggattgccaaaatttggaagtctaccggtttcctccgagtgggccggtctgaccgccgtgtgttgggcggtcagaccgccggttgagggccggtcagaccggcggtgtgtggccggtctgaccggcagggccgagtccgattgtgtttcgtctagtctcgaggtttccttgctcgggaaggcatgtttcgggtttcctttggtttctaccccgagttggacatggaggagggcctgtatagggcaagaccaacccctatataagggacatggccggttcattgtaaaaaaatctaatctactatcaatcaatcgaatcgttttttcatattactttttagttttctcttagtttgtccatctttgtcggtttgcaccgtacaccgtacgccgacactgcgagagtgcgacacctctttgtaggtttgtcctgaaaaccttccttttgcccacgagacgggtagtaatctagaaatctgctccgctagctggtttagttatcaaaacccatcttaatttggccctttggctagatcgagttggttggcgactccatatcaccgcaaggcgtttaggtgttgcgatcgtgcttgtcgacttgtcacaaaaagttaccaacacgatttttggcgactccgctagggaagtcctatggccggtaattggattatcgccctgagataacatgttttatgcttttaggttcatgtatgttcaccaaaaaggcaggggggcatgtgtttacacccaaatttggcacctatggacgaaataggggaaaattgccaaagtttggaaagtgacgggtttccttcacagggccggtcagaccataggtgtgtgggcggtctgaccggctagtagggccggtctgaccgcaggtatgtgggcggtcagaccggcagggcccgagtccgagtctgttttcgtagggtctcgggtttccttgctcaggaaggcatgtttcgtgtttcctttggtttttatcccgagttggacgtggagaagggcctgtagagggcaagaccaacccctatataagggacaaggccggttcattgtaaaaaatctaatctactatcaatcaatcgaatcgttttttcatattgcttttagttttctcttagtttgtccatctttgtcggtttgcgccgtaaaccgtccgccgacgttgcgagagtgcgacacctctttgtaggtttgtcctgaaaaccttccgttttgcccacgagacgggtagttatctagaaatcggctccgctagccggtttagttatcaaaacccatctaggtttagctctttgctagatcgaggtggttggcgactctaggatcaccgcaaggctttaggtgctgcgatcgtgcttgtcaacttgtcacaaaaagttgccaacatgatttttggcgactccactggggacgggatccgttcatcgtcaactgaacttcgacttcgccatgacgaagccgccatccaagacagaggtggagccatccaatatgatcccggtcacattggatgacttcgaaggagaagatcgtaaagctatgtaggagtacatcaacgagctcacacgggaggcgttgatgagggcaagcactaggacccgtcaaggcgtaatcatcaagcccggaccacgtcctaagctcgctcccggctcggtaagcaatgatgaggtatcacaatctatccaacaacaaattgaatctacaatagattcatctatgattatttttaaagatcagttagatgcaacttttgagggtaaatttgatgagtttttaagggttaaattcggccctcttttggccgatcacatggtgaaaaataaagcctcttccactgctaaccaacctcctataggtcaaaccgaaggaacggtgtatacggccggtccgaccggccagacggccggtcagaccgggtattaccccggcagtcagaccgggactcaggccggtccgaccgcgcctcttgacgccggtcagatcgggcattgggccggtcagaccagcgcaattattcctatacaggggatagatcctatgactaatgctagttatttgtatcatcttagaacatttgattcccctgtatctactgctacgagtagtccccaagttcccccacatgttcccaatgcttataacgatgttgctaggggatatcctcccgatactagacaaggccaatataataatattgcgccacaaacacaacctattaggccaccaaatccaccgccaaatcaacaagggcctaataatatggaggatataattagtgatattatgaggaatagattcgggatcaaaactaggaatcgtgctagaacttacaaaaagccgtatcctgattattatgataatgtgccgtttcctcgtaattatagagttcccgaatttgccaagtttaatggtgaggatggtaagaccacatgggagcatgtaggtcaatttttggcgcaatgtggtgaggctaatagtgatacttttaaattgcgcttgttttctttatctttgtccggtaatgcttttacatggtttacttctttaccggcaaaatctattcatacttgggctcaattagaagaaaaatttcatgattatttctatactggagaaactgagcttaggttatgtgatttgacatcggttaagcaaaaatacaatgaatctgtcattgattatattaagagatttagggatgttagaaaccgatgttatactttgaatataactgatagagatttggctggtcttgcttttaatggtttaattgctcctcttagagaaagactagatggccaagaatttcttgatgttagtcaactcatgcaaagggctctggctcaagaaagtcgggttaaggataataaaaaatttgctagaccatttgacaaaaagcctaatgttaatgtagttgattaccctgaggctagtgatagtgaggaagagggtgatcatgatatttatgttgccgaatggtcatggactaataaaaataagccttttgtttgttctaacttaatgccgactccacgaaagatcggcaaagtgaggttaaatatagttttgatgtggccaagtgtgataagatctttgattatcttttgcaagaaaaacaaattagattacctaaaggccatgtcataccatctcaagaagagttgaaacgtcgagcatattgtaaatggcatgattctcattctcactctactaatgattgcaatgtgtttcgacgacaggttcaatcggccatagatgaaggacgattgaagttcaccaatggttccaagatgaagcttgatgatgatccttttccggtgaacacaattaatttcaatgataagaaggtgttgattcggccggagcaagccgaatctactaagggaaaggaagtggtcattggtgaaccgaggcctaagatgatagtgccaaagaagccggaggtgggtgtttggaaagaaaataagagtggagcttcgacttctaaggcccctaggaagaccaaggtgacttttgatatgctcttggagaaatatgagaggcaaggtggtgagaagattcgcaacagagggaaaagaccaagatcacctcctagggagcgatttggtcattcaccaagacggtcgcattcaccttcatatcatcatccacaagacatgtcatggggtccctatccaaagccgccgccgggttatccttatccctacttcaagccatggggggcaacgccgccaatgtacaattatatgcctccaatgcaattcaaccaagggtggggaggaccaaggaggccaatccatgagcgtctgtcttcaccaaacaatagccggttttatggtaagaatcgggctaatgaagaaaagagggaaggaaagcgcgtcaagatggaggaaaggacttcggaggtgattactatcaaagtggggtctcatgatgtgccaataccttctggagatggagttggagtgtccccgaacaagaaatccgaagccggtaccagctcctcgcagtcggccggtctgaccaggccttctggctggtctgaccgcggccatacggccggtctgaccgccgacctgacgacggtccgaccgacgcctcaggccggtctgaccacgcgccacatgtcggtctgaccggcgcgtctggccggtctgaccggtggtctacggccggtctgaccgggctccagcgccggtttgatgagagggctgcaataggcgatgtgagggcttcatcgtcttcaaacaagattaatagagggcattatttacctcctggaacagagccgaatcctaggtggatgcctaaggatttgacggctacgcaaaagagaaggttgcaacgtcttcgggcccaagaactaagagagaaaaaggccgaagaacaaagagataaaaggttcaatgagttgcgaccaccactggtatggaggcctaaatccatagagaaggaaaaaccgattgatgtagaggagaaggaagaacaatcggttaacaagggtgaatcgtctccaaaagaagacatggatatcaacatggtatgtatgttgtctatggtgttttatgctatggataaagccgaggttgctcaactttcattaggtcctaaagatgtggtttttgagaagcccgatgagtcaaaccgtcacatgaagcctctctatctcaaaggccatgttgatgggaagccggtctctaggatgctagtggatggaggtgccgccgtgaacttgatgccgtactcgttattcaagaagttggagcgtgaggatgatgagttgaagaagaccaacatgattctcaatggcttcaacggtgaaccaacggaggcgaagggtatcttttcggcggagcttaccgtggggaacaagacgctaccaaccgctttcttcatcgtcgatgtgcaaggtaactacaatgttattttgggtcgttgttggatccatgccaattgttgtgtgccttctaccttggatcaatgtttaattcaatggaacggcgatgatgttgagattgttcaagtggatacatcggccgaggttgcaatggccgatgctacttttgaatggcgtcatgggaatatccaatgcctatcggggagggatctttctagctatgattttcttagcatctccgatggccaatttgtacctatctctgtaaagccggctagtgtagcacggctaagccatataaatttgtataatgagtaaagaggctaatttagagtggttacaaaagagggtgcaagaatatcggtctacaaagaacgatattggtgaaaccgttgaggattttgaggaaatagagaagcttggaaaagggtttacatcggccgatcctttggaagaagtagacataggtgatggaactaaaccaaggccgacttttgtaaacaaaaatatgagagccgattataaggttaaagtaatcgagctacttaaagagtatgttgattgctttgcatgggagtaccatgagatgccgggtcttagccgtgagcttgttgagcatcggcttccaattaaaccgggttttaggccttataagcaaccacctcgtcgttttaatcatttactatatgaccgggtcaaaaaggagattgatcggttgttgaaggcggggtttattaggccatgtcgttatgcggagtgggtatctagcatagtcccggtggagaagaaggggagtggtaagattagagtttgcatagattttagagatttaaataaagctactcccaaagatgaatatcctatgcctatagccgacatgatgattaatgatgcctcgggtcataaggtgattagctttttagatggtaatgccggctacaatcaaatctttatggcggaagaggatatgtacaagacagcttttaggtgcccgggatttgttggtttgtttgagtgggttctcatgacttttgggttgaagaatgccggtgcaacatatcaaagggcaatgaatttgatctttcatgatttgttaggtattatcctagagatctatattgatgatattgttgtcaaatcggatggtat

SEQ ID NO: 5134 - DNA, 10009 bp, Oryza sativa
atatgcgtccagaaacgcttaagtatttgcataagtcaagtgtagcgatgatcggtatgttttccaaaaacgagctgtcgcggtttcaacgttcggcgagttgtgcttcggccgattcgtatcgcccccgtggcgtttttgtcgatcaaacgtttaccttggggtttttccaaaaatatcatacacaaaaaaggcgaagacacccatgaattttatatgactgagcgtcagtttgcaattgcccagcctcgacgcagcataatcctcgtttttccttcttcaccgctttaaattttttttgtgttgatctaacaactagcgatgaagaagatgctcaagggggtagtcctttgccattgaggactgcttttgctgatgaatcggatgtaaagtccgaatccattttggcgggcaatggaatttatctataacttgtgctttttggcaaataaatggggtgtggtgcgtgttgcggctgttcggctcgtactttcccctttttgcctttggcaaaggtatttttaggtactttaatcgttttgaccgttgccgcctttcggtctttttagtactttgacctttttaattgttaccggctttcggtcttttctttagtgctgctagggttttgcctttcatccctttcggctgccccgtttgtctacgggtgtgcaaccgatgcgaactcgatttcaagttttagcccctcgcacatttcattggacttctcggagtcaaaccgcttgttattgccggtaatgaactctttcggaacactgaatcggcagaaaatgtttttccgaacagatttttacactagtgccgaaggtactgccttagcccatcgaaggcggcttgacactcaggtgtccaattgagtttgccggccccttggaccatcttgaaaaatgataaatctctttcggctactcttgggagcaactccttatctcattttcgcccccagcccttgtcgccgtaactcgctggtactgtggcgaaaggcgtgggtgtggcgaaacctcttcgcccgcagcccttgacgccgtgccttattggcactatggcgaagggcgtgggtgggcgaaacctcttcgcccgcagcccttgacgccgtgccttattggcactatggcgaagggcgtgggtgtggcgaaacctcttcgcccacagcccttgacgccgtgccttattggcactatggcgaagggcgtggcgtgtggcgaaaggtgtccagagccttgggcggcttcgaagccccccagcttggacttaactcactttcgcctctagcccttgtcgccgtacctcgcgggtactgtgacgaaagggtgtgagtgtggcgaaaggtgtcccatttcgccgtttcggcctggattccccacggacggcgccagctgttgtcgaatggacaacaatgccacgtcgaaaggcgtggttctctcaacagtagttggaatgtaaaagcaattgtattgattcgtaaaattttttggggatccccccattacatggccctagaggtctatttatagccttagcataagcttggaccttctagggtttagggttacaaaggattttacatggttgcccttatgaaagggacatttacatgggtatgcagtgtcatttgcacatatgggcctttaatgggctgataggctgggcctggtctatagcaaacgggcctaaaaggggcggcctattgggcctccttgatgccgaacttgtcatggcgaagtctttgtagttcgcccgagatgccttcgcccgagatgcctttactttcggagtaccgacgcggctttcctgcctacgccatcttcgcttatggctttcgccataaggcttcgcctaaatggtcttgacggctttggcttgaatccttgctggtactatggtttcggcaggtccggtcgaagggcttcatggcatgcctccaacactaaacataaagcatggctggatttaatttttattaaattctccatgattaattatactctctgaaattttctcgaatttttcagagctcaattcctaattttaataatacaaagaacagttcagtaattagttaatcgataaattaatcattaatgatctagttataattatgttaaatgcttttcttgtttaaaaatccttaaattataaattgttgtttaaaaggaattattagaaataatcttaaaagcctaaaagagaagatctaattttaatttgctaaatctcaatataaaagtgagctaaataaaattttgttaagtacttctcttgtttctatagttcctatatgtttctaggatttatttgagcaaaggaagtatttttaataaacggaatatcatttcatgaataatttaaatagaaaaaggttttaaatctctcttttggctttgggccgaaagtcagcctaagtctctctctcccttccccttggcctgctcgtgctcggcccaagccggcccataccgccgcgcccctccctcctctctccctttcactgacaggtggggcccacctgtcagtcgtcttcaacctccggccgctcctagccgcgccgcaagccgccgcctccttccaaattcggccgcttccttccttctccggccgaattgatagaggggaaattatccacgggatctcctctttcctttctctttaggaatcttcggctaattttgtttggaaatcattggattcgagctcgattcggatcatctctctccccctaaccctagaccttccatctacttgccgccggccatgggcctccatcgccgcctcttagcccctataaaaggacccccgggacctcctcttttcgccgccaccttcgccctagcccgccatcgcttgtagcgctgcctccgcgtcaacccttgcgccgccattgccgccgcaagtccagccaagcgccgccgctgctccagtcgtcgccgtcgctcaggaaggccgtcgccaggttcgcaaggtcgccgtcgtccttgtcccgtcctccgtttccgccgaagactaccggagcgctgccaccatcgacgacccgaagaccgccgccgcctcgacctcgccgccgtcatcaatcgtcgccgtccgtcgtcatccaaaccgctggtgagttcgccgagccgagctttacgcgtagatgccctccgtttgcaccgccgcgccatcgtttgccgacgagcatagtgtgccgagccgccgccggcgatgacatcatctctgatgtcagcgctttgtcagccgtagaccgtggtagaccggatcgatctcggccgttcgattcggtcaagtttaggtcaattagatcttggccgttggtttcgtggaccgcttctgtgaacctggtttaccgtggacggtctttgatgatgcaataaatcctttttcttttcaaaataattctttattgcgtcataattcaattaaaacccatataaatgctttaatgcggtttaatctttagaaattcataactaattcattgtaactcggtttaatgtggttcaagttgcaaaagttgtataaaataaagatctacatattaaagttatccataaattgtgttaaatttatttaatcctttttaaataagctttaattaggttaaatcttgtaaaatttgtaattaatttatatgaaatcggaatgaggccgttcaagtctctaaattcatctaaaatcatgatctacatgtttgtttactttatgtgtactgtttatttggtttttattagtcttttttctcgttttgcgtgttagcttgtcgtttccgtcgtttcgaaagttcacgagtgcgtcagaagtattcaagaagattaactgaagaccctttattgcaaggcaagtcacacagattccaaacacaattcctttgagcatgttgatcctatatttaaattctctatttatttcaactgtgcatttattttcgaatgtcaccgggtggtgtgaacctgtttctttgttatggccaatttgcattgattaccctatttcttgattacctcgggttataagttgactagttggatttatatattggttcaactagatatattagatgtaattgcttagccatgcttagaaacattagcacacgattgggataactaatatttcactattacttaatgatggatatttaatgatagctcacgatggttaatcgtgattggttaattaattaattaacttgccaactaaaacttgataaaagtgggttgtgagcacatggttttgatggtcgtgctcatgataattaaggaccggttcacgagtttcggttgtgaaacattaaccgtgccaaccacaagccagcgtgggcaacggctttaccttttgtatagcatggttcattgcggggcaccagactgagaagtggcggagataagcccacgggggtcgctggggagtccatgccttgtttataagggggtgattatgatccaggaacagtgcgctgtggtggattgtgttatgcgaggggtactgtcacagttcctttccgaggtaccgtggtggtattgaggcgcatggtggcatgtcgtggggctgtatcttgtgggtacagtggtacacctctggccagagtaaaactattcgaatagccgtgcccgcggttatgggcgggtctaacaatgtctttcgtgattagtctcacacttctcaccataataaatgatgctataactggtaataatttgattagctcctggtttggaatggtacattcctagtttggagatagatctgtacagccgggtatggttgttcaggatggttgggcctgtgcagcatgggtgtgctgttcagtgttgattaatattgatgattaattaatttactgttttataattctcaaatgttggtcattctaactgaagaggtcagtgacaataatcaaaattagtatctctttcgttgctattaccatatgagaatgtgtatctcaacctttgcgaatgttgctatttcagttcatagatttcatcctatagaaatagttgtttgcagaaaaaaattaccgtttccaatggctactattacatttatctctaacgccttcatgtgtagctctccatttctacctagataatcccgcagcaacgcgcagggtattatctagttacttataattgtcagagcccaagcaggggttaaatataatataatatctagcatttcaatctctctttggtatctctatgttactctcagaaatgagtactctaaacgaatgagcacattgacactctttttactacacgaaagattatggtgcacaccatacctctcatagagcaagaatgggtattttcaactatgattcacttataaaaatgacctagagagtacagtaatacggtgcaccaaatttgcaccgaatattgtggaaactcttgatgttctatctaaacatgacgaaagtcgcacgcaagtatcattagtacgcatgcaagaagtatgcctagctagttgataataaaattgtgtaacatataggatagtgtttactagaagagtattgtcttcccaaaccacctagtgtatttacctcaacgaaagaaaaggaaaagtgggagtattacatagttcaaggtgaacaatccacaaccatgtactcatgaatacaaaaagaaaatgatgatcctaatagcatacccatcatgaattgagggggataactcctaccctatttgcatggctaaggatgtagaatctctcatactagaccgcatacgtcctaaaaatttatatcagaatagaaaatctttgccatagttgccaagcaagaagctcgctatgaagttaattaaatgcgacgtatcggaatactttgttgaatcaatctactttgtcatcatttgttgtaattttttagtagaatattgaattgaataaatggttttatccaagtagagcatacacttttccctacaacgaacggttatttctagtataaattagcatatttaaggtatttactattttgttgctattttctagcacatggttataatgctttgaattttgtgtagcactcaaacataaaaaaaaggaatgaattgtggaacgcataaccacaaatagcactttaagataaaaaggtatttccagaagcataaaactggaaatataatgactattgctagaagcaacaactaaatttgttggcctagaaagcatcacagtcatattacctatggagcaattatgcactttgtagaagaattgattgtacaattaaccctcttgaactctctaaaagtgtgacgatttgggctacactatcttttagcaatagatttttggtcatattggtcttagaattataagaatagacattacaactcgtatagttatagcacatatatgcataatttcctaaatcatgaatatttatgtgccagtatgccccaacaggagattaatgcatagaccacataccatgaatgtataattataacatcgaattggattgcatggaatacttaccatcctatttttggtactatatggatagagacgcttctcaagtagtgaacatccaatgcctattcgacaccatatatttgccaagattgatccatcaagagcatataaatttgaacaaatttcactaatcatctttagaagtacacaaggacaatgctagaatagcatttgatgattagtgaactagcagcatgaagtaccaaatatctgcatgaacggactaaatataaactatgaattgtaatacttgctatgtcattgttataatacctgcagtatgaatggacatgtagtcttgaaatcagcggattctgaaagaaaattcagaccattagcatgaacatctgctctgcaactagtactattgcatttactttatttgtgtgcatattccactatcatagtgcattgcaaaagactctctccgaaagtcaaaaactttgaatgaaaatagttatgaagcctaaattccttaactatatgtatcattgatggtggacccaaatcacacggatgaaatgcatggagatcgagctatatgtatcacttgttctctccatgcacatattgatatattcatatataatattttcatgtgattgacatatgcatgtgagactaatgttttgtttgagtcttatcgcttgtttagtctatttacgttgaggacgtggagatgatgaaggtatgcatttattttaatatctatatttgataaatgccttctatttttgtataggaaaagctcccaatgtttcatctctatttatgcatactcttgcttcacacaaatattccgtatgcatacatttagggggagcaaatcctataccttagttatgcatgtatttgatctaagttattcactttaatttaattgggatctttatatttgagtatatgacacttgtggtgttgattaatactcatcacttatccatattcttttatatacgtgattggttggtcaacatgtgaaggttgacaaccagatcattgggactaataattttattgagttgaataagagaaataggtcccaaggattacaaaggtgttgatgctcatgtgatatcattacacctaaaattaacaagaatgacaaagtggagatattgaagatgtgggatacgaaatggctactatggcaagacggtgaagggcaagcgatgctcggtcacgatggaccatgcggcggtgaagggcaagcaaggggcttggcgccgaagaaccaaatccggtggtgaagggcgagtgacggctttgtcatgatggatcgtgcgaggccatttgaagctacaagtaaccgcatcaatcatttgaagactatatggtgaaacggtttcggcattgcgtcccttaagacaatgaaagaaagatggaaagaaggcatttctattggtataatttttttcatatttacatttgagtttaggaatgctgtactattaaaagggatgcaacgtcgaggtgtttgtgtatgtctcggtactcaaagtgacctatcatagtgctaccttgagagaaacccaagctttaacctatccttttgagtggttttagaccttgttcttggttgagttgcgtagtcctctaagtgagctttgcatagagtctaagatcatcaaaaacggactcccgagcaaaaagttatggtcattttactctgtgctttccggaagttccgaaaaattattggaagttccgaaaattccagtctttgcctccaacagctagttttttaggggctcgggtatataaactcctccatccctcctttgagtggctgctgttcttgtacagtattagacacatccaaagccaaatagccatccccatttccctacctttatggtgtctctttgtgagagggatttgagaaggggagagagttggattgagagattgagaagttgagagctagtgagcttcactctatactttgagcactcaagttcatagcaagcaaatcttcgattgtatttgttactcttggtaaggtctcctagacggctaggcatcgccggtgagcacccaaggttgtggtgtgccacggaaagtttgtgaaggcttcgatttcgcctccgcaagggaagaaatcaagagtgaaaccgaggagtgcatttgtgcaacctcatgaggaaagggttgaaataggcccggcccttgtggctcctcaacggagacgtaggattcgtggatctgaactttgggaagcaaatcatgcgtctcctctcttggtttgcccattcttgcattctcttatattgtgcttgagcttgcttttacccgatctacttgcatacttaattgatttagttggtgaacttatatcttgcttagatatcttatttgtcaccttttgattcatatacattttgtttgtttgaggtacaagttcatagctagtgttttattccgttgtccgcctaacttttcggttgagaccggaacttcgaatcccataccggaagttccgatttgaatcgaaagttctcatcattccaatatgctattaagttgtgataatttttaggaacgcctattcacccctctctaggcgacatcaaggtcctttcaattacaccagaagtgtacgaaaagaattgaaactactaaatcactttatgattacttttgtgattgtgaagagtttgactagttgcataattgaaatgcaccgaaggagggtgaaataccgaagaaagtaaagctatccctcatcttgtctagaggccccaggtaaaaataataggacaagaaactccgactcttcacaccacctaagtaacttgagactgttggtatttcttaacgacattactagaaatataattcccagcaatggtgcagaaatactcctggtatattatggttacagaattcatccgcaagcgcacggatataccattgtagcatttcaccccgagagtattccaagggtatcgtatttattttatcccgtgggaagatcatgtagagagagcttgactaataatttatatgttacttgtgataatcatattctaagcaggggttaagataatccaatggtagaatgacacacaagcattattactcattctcataatatattatcttagcttagtggaaagaaaagagaaagaaaatctattcctatacgtctaatacacatagcatatatacattctagttaactggtatactagctaataccctctatctgatgccctcctggtacttcaagaagccacccctgactgccgagttccttacgaaagcccatcatgaccatacaaccggggctaaatacggaggaataccctccccaagaaattaacttaggattatataccggcgcggaggaatacccgtactgagttgtcaccatcagcggcccacctctcatccgcaatatataaccccaaataatgatatcccgtaatctagacaccacgcctaaactaccagatacttctctaatatcatcgtcatgacatagaggaattgcataagcaaa

SEQ ID NO: 5135 - DNA, 21520 bp, Oryza sativa
attatgcaatcaataatgtttgtcttccttgaattatacataaaaaattcagacctaaatactattgaacaatttttgcctgaaaacaaatatcttaagtgctgcctgactttgaaatttctctgcacacatcaaatttttaaaatgtgttttttagaaagaaaaggtatagccacttttaaggaaataataattgtatacatgaaccagattacaaaagaaccaaagcaaatagtgtgcaatcattaggttacggtgacaattctgaattccactaagcgatcagtatcacaaaccctataaccaggatgttacaactgggatttgggatccagaaagcaagcagaaaataaatctagcgacaaaaaattacatagatgaccaattggggtcttggggaacaactatcctgacaaatttcgtacactagtaccattcatcatcagttataatcgtaccctcctctatcaagtagcatcggccaactggccaaggatatatttatatgcgggatccttgtagtgcagtttgtttaaatatcaattactcattggatggaaataatgtagtgcaggaagccaggaagttaaaaaccatttcacaaatagcatgcaatattaccaacggtctaatagatgccgctctggcccagatgtatcctgcccatttgcttcgagcatgttccttagttcagcagttgacacatgcttcttaagttcatccttcaatttccaaagtgtgtcactctgctctttaagcttttcttgaagatcagaagaattagcattggaatcatgtgatacaacagctttccctttatcttctgctgtgccttctgatatactcctgattatcttgggagctttgcagtcgtgtatatcattctgattattcttgcgcttggaacccttagaagatgtttgtccttgagaaacaacaatacaaaatatcaagtcagattacgaagtggcgcgaagaaaatttgatgcccatgtttcattacctgagctgggggcatctttcttaacaagatcaagaacagctcttttatcctcatgcgacaggatctcccagcctgagaaattctcaacagttgcagctggggacatctccagaaaacagctggcgtgataccaaccttgcccttcaagcttagatgaaacacgaacctagacaaacaaataataatactattacagaaacaacttagagtgaagacaaagaccatgtttttacattacaagttgccatatcacagttacaattcatatgttttcaaaacatacattattagctaagtgcatgactaatagtacttctggatcatcaaacattttcctgtatataattctccacggtaattattgtaattcattaggagtactcaactaggagtgtggatgaataagaaatatgaacataataaatactcttccaattaatacatttgcaggttacttcatttgataaagtaaacttaacacaaaattcagagttctaatgcttgctagtggcacgtagcagagtaactacaaaataaatgggaaactgtggcctttaggctttctggtcacttggaattccagtgcaaaagcttgggcattatatgcaacatgatgcaggccacagggaatagggtacagaaaagaacctatggtgtccctgcgtatcagaaccatacatttcccagatgcaagttcagaaaataaaagaacatgccaatggcatagtggtagggaagctatttaacctccccagctacaagtgttcaagtgctaggaccaagtcgggtatccatttcatccttagtgagcgctaaagttcatgttctaaataaataaagtatagaacaacaaagtaacatgcagaattttggacaatacagtatttttcccagggagtaactataaggaataggaaacatgttatgattaattattcttacatgctgcatcaaggttcattcaagaatgtgaaacttctgattatctatgattgttagctgaatgctcatataagactgtaaggtgttaatcatcaagaggaggttattttcatgactataatttgaaaagcaacaaagtacaaacataaaattttcatggcataaaacttcctatcctcaagggacgaattagaaagcatataaaaaattaatagatcaaaagatacagaccgttcccttttttatcttttcaccacaccgtctacaggaagtacgggcagatttagcaacctcaatggtgcatttatctgaaatagcagctgcagaacttgcagtagctggtgcacttccaacataatttcttatcttctcttggtcatcccatctgagtgtgtctattccttcaacatcatcaacactaatttgaaatgaagaatcgacactttgagttaggtcagatttccaatagatgcaataaagattaataaaccataatactatagcgtgaaactcatgcaaacagtaaaagataaagttgcatacgattttatctggtttttcttactgaggatgcaactggcatggttccacatctgaaaaagagaaaagggcactaaaattaattggaagtggtcaattcgtaaaattgatatggaaagatatgtcatataaccatcgagttttctcttctgcaccatcgagaatctaccatgaccaaaaaaaagttccaaacagttatagttcttgaataaaacaattactataaacatagaaaaggtacaacgttataaacactccatattaaagaacatggtcaggtaaaaaataagggccatcacagaaaataaaaagatatggtcaggtgaaaaatggcatgcagatccaaaagtaccccctaagttgccctaaacgatcctacatttcccagtgaaataatttgagtgtctagtccacataaccacatgagtactgagttgatccgaccaaaagaaataaagattcattatccaaatgtgcaatataaaaaatgaaaaatagaataaggactcccctccaagttttatcttgcctaatacaggtaagcacttataatacacatgcacccacaaaacaattacaagaggcaaactagaaaataaagcgggcaaacgaatacctagattataatttgcaaactacacatcagataagaacaaaaacagattagcgaacacactagattactaacattgtcattggtatgccccattgccatgctaaaagcctaaaacagcacaaccaactggcaggtccgcataataactaatatatcaaacaacttaggagaaataccagttaaattgcatatgtcaaagttggtgcccacaaaagcacctctatctattcttgcgttacacatatagattgcataatggattagaaacagcaataaacccaatgctggaattgacggatcatcgacaaatcgacagagcaccaaaccaaatgcatcaagaactccgcattcgaagaagattggttcgatcataccccacaaaatcatgcgaaattaccctcagaaacatatttttttcgggcatcaagatttaaaaccaaccacccaccaaagcagaagattcttatggcaaatgcccgcaaaacccacattagcaatgcacatcaagatgaaaaccaaccacccatgaaagcagaagattcttgtggcagatgaccacaaaacccacacccgcaatgcaaatcaggatgaaaaccgatcacccatcaatccagaaaattctcagaatccaaaccaacctacaaaaaaccctcaagaacacgatgcctgccacaccaaaaccctaccctcccagaccctaaagatcaaagcaagattcatcaactgaacggagaaagatcgtcggcgaggagagcgggtggagggagaggatacggacgggcattaatccgtcgaactgcgtggcctggaccatcttgccgagccggagctggtccttcccgatgggggacctgcacgacttgcacgaggaccgcccggacttggcgtactccgccttccaggccttgggcggcgccgccattccgccggccggtgcggctggtgccctcttcctcccttcccctccgccgcttcttggcttgtcctagggcctagaaagaacccacacaacgagaaaggagaaagggaagggaaaggcctgatgatgatgaggtgtaaaaacgttaaaaaggaaaaaaaaaatctcccctcgaaaatttggggcgagttgagttaatttgatggtttttcttttaaaaccctgtgccatatcctccccgaatgtgtattctcatatgccatttttcttacgggctttacggactgtttggatgggttaactgtatgatttctcacgttttgccacgaaaattactaagtatttctcaatatttttttcgacaattaagctaaaagtaaaagaaaaaaaataataaaacattagagtttatcagtacttatcataaaacaaacagatgatacctgcgttttaatgtgaaacatattgataactatatgtttaatactataaaaatgatagatagatttgtgagaggtgataactggatatgattgcatgttgatttgtagaattaaataaattgtaaatgatgttgtatatttgcatgaggttgaatatgtaatttttggtagtgggtaatgatgtggcgtggtagcatgttgaacttagtggactataactttaactttataaaaagtatagattggatccatatcatcgtaaattttctatattagaaaaataccactactattcgtgatattggctgggtgccactgaaattttgtaaaattagatctatgacatcaccgtcacatttttctaattcacatagaaggatgacaactcgtagatccgttttgcattcgctgatctaattacgaaaatgaaatactctctccatcccgttttgtttttgccgttcctggtgaacaccgcaactgtcgacttggagtcgccggcgcaagccgattggggtatctccacacaagatgtgtcgtatcgttccagacagggacaggcaaaagagcaagccatcacgcactagcagtcggcctccacgctcgtcttgtggcctcgtcgttcgcgagacacaagcccgtgcgagctcatcccatcatggtcgagtgcaccttcgtgcatcgagccatcggtcgtcacgctgtcattggccgaccgagccactttttggcatcagccatggagggagagagaagaaaagaaagaaggaagaaagaagaaagaaggaagaagaagaagaagaagaagaaaggaaaggagctatggcttgtagttgcggctgcacccgtgccgttcgcaatgcatgcgtcaagtccgtcgttcaacgcggcaaattcatgttggcagctacgcccattatgcgtcgacatcactgccccttccactagttttggtaaatatacgtatgcaggccatttacggataaaaatgcacccgacatgcgataaaatgaacctcctgctaatcatacatgtgtacaaggattggaaggtgttgatgtgaaaaacacacactggcgaggtttgctttactctagtgcaggtccaaagatttgccttcaggttcagggcgtgctagttagtttgatcctgcaaccaacaagaaacaaagaatccaaagttaaatccataaacgatagcccatcggctggactgccgatgacatatcatttagcaccaagccgatgtaacgcaggtcagatcggcaatgaagtaagtaacgagaaaagagttagatccactcgatcggctgtagatatcaatgatatataatctatattccaagaatatatttaagctaagcgattgggatagatcgggcagtgtgccgagacagtataaattacttgcgcttaaaagtgctttggagtaaagattatacatattcatagcatagctgatagggtaaatctaatgcgtatcgactaatactccgataccactcgttactcattagaataaaccaacaaatttaatatatttcattcaaaagagatcttaatataaagggtagattcagtatgtcgagtaagcatataagtaacgagacaactaaatcaggcaagatcggctgaaaccccaatagtatctctagtagcagtcatgaaacaagctagatattacgattccaggtaatgctttaatggatcaaacttaactgatacaacattaaacatagaaagaagcataaaatttaaacaagtcgatggcaaccttttgaagatggtagatgcactatgtaatctaattcgaagtcagtatctaaccatgtcgactgttttcgatgatagaggctagccgctgaggttaggtagcaagatcgacctagattacatagcatatatgataactcgacgatttatataaacaggattagagtgtcatgaagatgtaagcactaatcccgagaacgcaagccgctataacaagctttacctttttgtcgaaacaagattttggcaatactaaaagggggtggctatcaagctagaaaagtggatgggttcagagacaagggattttatacaggttcaggccttcttaatcaagaagtaataccctactcctgtccggggattgatccgccgagtgtattattgatcgtatgatctgggagaaaatcgtgcccctagaggcacccggacccctccttatataggggaaggggtccgtattacaaagtacaaaccatatccctaacggaataggtaattacagataaaatacaatcgtaaccgactaggatcccgggtatttccttgacatacaagtttggtaattaacccgagtccttttaaagatattctatctatacatgacaccccatacccagtcggatatacatgccgtgtaggaatggggtatccataatctccacagtagcccctgagacctttacagtcgacggaataatcttctctcataatccgaaaagacaatccgagtgctttagcttcatctgttttgatctcccgagtaatataatcaaagactgtgaagggctgaaaaatagaaaaaatcaggtgcatcgactagatgcacctaattaggtgtagccctcgactatatggttagttgaacaaactaagcatatagtcaaggaataaataatccaaccaaccgagtggtttttgataattgttatcaaccaagtgacttgatatcaatatatagcatatgcagtgtgaatcccccaaataatatgatccaagtgatataccgactgctttgcagaatatgatgcgtgcaacctaaagttgacaacatttttggaaattcacatagcaaaacagctataaagaagagcttgatgttgtgaataaagaaatttccaaagtattgggcatacaccatgagcacacttctttaacagatgtgcttaagtccctaaaagacacatgatttcaccacacctgaaaatatatggcatatgtggtgtaacatccgagtaaataaactcgtaaacgatttaccaaccgcctggaaaatgaccacaatatataatcagccaaagccataatattagttaataaaaatgcacacttacgtggcaaaaagcaatgatattatatccaatcaactgctttataaacccaaacaacaccttgactatataaaaaagtcagtagggcagctatgtaaagctttactgtttgacaccttttaagatgcattgtaccaactcctaaaaagttgagtaactgcggtataaaaggattttaaggtattgggcacttgatcacgcgcactttggcctaagcaaaaagtgcctaagtccctaaaagaacgtgataggccacacctgaaaatatgggctgcagacatattaggcctaggccaaaaaatatgccttcgacaccctttaaaggattccaggataaatatctcaaggccaagcatatgcagcatctggtaaacctcccgccgactgctttaatgtgccaaagaaatataaagaaaaacccaagtgagaagcactccaaaggttcataaatcagcacagatgataaaagtccgagtaaaaactctcaaaagacctatcaaatgtggcataaaatctgataaaagacgagtctaaatagcctaggctatgactcatgacataatcaaaataagcatataacatgccgagtggatgactgtattaaaaccagtcatctcaagaaaacccaaacaacctttgcagcctaaaaaggcctacaaaattagtataacacttttatgttatgcacctttttatttgcatcgtagtaattccaaagaattatctaactgcgtcaaaaaggattttaacagcattgggctatactgttgtgagcaagtgttgacgaaacaaaaacaaatgcctaagtccctatggatcacaacttaatcacgctgatagcaaaactgggctgaagtactgtttaggcctaggcccattagtactcccgataccctagcgaaataaacgccaaaatcggagcgtcgtttcgtcttccccgccgagactctcgccactttccccatttcccgctacagtgcaaaaccacaccggcggaagcaagcacaccggcggaagcaagggttaacaaatccactccaatccatcctcctgagctccacaaaaaccctccacgcaaccaccgcaccgaatccccatccatttccagccatatctcggaccaaatcggcatgggacgactggatgttttcttcttcggattggtttgccttggttgtttcccggtcacctctttattgccagattttctagcattatcgccttcatcatcactcagaaccaatttcctcttgcgggagtccgactgactggttgatttcgaggtgtttgtttgagtgtcagactgaatttttggtcctccactcgcctgaccagttcgccagcggggtgatcggcgttgagcaattggaggatccgacttcatcaaagcgaattcctgggtataacatttcgagttttcaattagcttaacagtagataaaggcatgcttttgagaaaggctgaaatgtttgaatacataccggtggagaaggattgaaggcgttgtatggcaccactggcagcaagtgcgaataactaactacaattgcattcgagaagattttatacattctttccttcataaccttgaattcaagagattcaggatcttcacggttggtgtcatgtttgccatcaaatttgaaggctgtacaggatctctctttaattggagctagccggctcttgataaaatgccgggtgatctgttctccttgcagaccttgctccttcagcttcagcatacggtccatcagggcaagcgcctgagcggcttcctctcccattggaagtgagttccaagagtcctgataaactggagggagacaggagtactcggggagtgcaggctcggggttttgtacatagaaccaatttgcatgccagcctttgtttgaggttttgaagggcatggagaaatacttttggctcagagttcccctcaattgaaatccagcccccccaactacgcatggtttactcttgtttggttggggcttgaggaagaagatgcgacggaataaggcaaaatgtggcctgacgtccaaaaaagcttcgcaggcgtgtatgaagttggcgatgtgaactatggagttcgggtttaagtgatgcaaactaatcccatagaaatcaaaaatcccccggaagaatctcgaggttggaagagaaaatccgccatagaagaaatgagaaaataccacgacttcatgtgtgtcgggggtcgggaatgcttcgccgaatgctggacgccatccaatgatctccttcgccagaagaacgccgtgcgccaccatctctttcaaattctcctctgttacatcggagggcgcccactgactctcgaagctttctctctcttccgtcatgaatacgaactggatggtgtgatttggtccgagatatggctggaaatggatggggattcggtgcggtggttgcgtggagggtttttgtggagctcaggaggatggattggagtggatttgttaaccctagcttccgccggtgtggttttgcactgtagcgggaaatggggaaagtggcgagagtctcggcggggaagacgaaacgacgctccgatttgtactgatagcataactcaaactcgtaggaagccatctgacatagatctttctggaaaagactctgaaccgactgacatggagacgggttcttcaaaagaagatcacccgactgcagaagatcacccgagtgacaatcaaccggcgaccgacaatgtagaacccagcaacgagcccccgactgggaaccagtcggccgaaactggggttggtgctaatcaggagcccccgactggaaaccagtcgggtacagaaccaaacaaagatattcctgaagtagaaactcaagctgacagccctcctaaaaaggatgccagcgtcgatctagggtccggctctcttgttaaattacaagggcctactcgtccccgaccggaaataatcacaagtaaacacatcctccgaacccattttgatctgacagactttcttcaattgtttcacctttattcataaatgcctaaggcccaatggtcggcgacgaagaagaagtcctccggatacagtcagctgaggattctcgtccacctattttagtcaaatggtgggacgatgatatgcaaccttagggaatcgtgataaacaagcaaaaggaagatgaggaagtatgcttgctgaaaaaggcactcagccaggctactcgcatcgtaaatataagtctccttatacatagcttcaactatcctgtttcccactttgctcaaatgccgataaattcgcattgcagagaatccatctcaggaacgaggcgaagaccgcgactcttgagaatttagttcctcatcttggaacccttgagaccaccagaaaccagctgcacaaggctaaggagcttgccaggaaaactgagcatgatctgagggatcggatcgccgagcttcaagaatccaactttgaactgagcggttcgtcaaaaggtaaatacaatctatgtctaacttacttatgctgccatccttgtaatatcaattaatcaagaagcaatacagtgcaagccgccaagatatctgaactagaaaagcggatccaaactctggagaatgacaaggccaaattggcgaaacagagggattcggctctgaaagatgttgaaggtactggtgactaatacctcttatctttatgcctactcgttgatataaatctatttacgcagatcgcaaaatcaagtctcaggctcaattcgatgtcttggtcaataaaatcaaaaggcttgaaggggctagggatgaagtcgccaacgctgctaccccactcgtccaagccatgttcttcaataacaatggtccgagtacatttgatgcttccgaaatcttcgacaagctgagaatcgctccggatacatactttaagaatatcaaagaggccggaagtatgggagcaagcctggcgttggcaatgaccaagtctttataaccgaagattgatgttgacaccattgatggatttgcagacgggacgagcgaagaagccgcccttgacctcatcaacgatgcgtagaaagccgccgacaagatagccattgatgtagttgagagattccaggacaacgacctccggccgactggatctaataattccgatgatgagaaaactgatactgattgatattatactgtaacagtgattctgatgatgatgatgatgatggaggcacaatttgtacaatactgatgaatttatgttgtgcttgatatttcaaacttagctcccgatttcttaaaagtttttgtcaaacctttttgagcctaaaacccacaaaagttgttaaaaaactttcagtcctcattgactaagccaaaaaatcaaacaaggcaatgataaatcaagtaagcaaattgaattgataaaagtcacactccattattattatagtagcccccgactgataactcaaggaaaagcttgatgttagcagtcaaagctgaagatacaaaagtaatgcctaagcataaaaacgacgaagatgttcaatattccaagagttgtcgatatgagtaccgtcctcacgcttgagtcgataagaacctggccgagtgacttcagaaattatgaacggtccttcccacaagggagataacttgtgccgatcccgtgtagtttgaatttttctcagaactaggtcgccgactaaaaaagctcgtgagcgaacattgcgattgtgataatgacgcaccccttgcaagtaccgagccgactgaattaaggctgcttcacgggcctcttccagtcggttgatatcatctactcggtcttctccgtagcgctcctcgctgaagttgcgaaatcgtagagattcaaattccacctcactcggaaacattgcttctgctccatagactaggaaaaacggcgactggcccgtagctcgactgggagtggtgcgcagggaccaaagtacggacgacagctgttctacccacttgccggcataaggatgcagtcggtcgaaaactcgcgcttttattccttgaagtaccataccattggcacgttcgacctgtccattgctcatggggtgcgctacggaggcataacaaattttaatgccgaagtcttcacaaaagtctttaaatactccgccggtgaattaagtgccattatcagtgatgatacgattaggtaccccaaaccggtgcacaatgttgatgaagaaatctctagccttgtctgccatgattgtaatgaccggtttagcttcaatccacttggaaaatttgtcaacagccacaaagaggtgagtataaccaccgactgcctttttgaatgggccgaccatgtcaagcccccaaaccgcaaacggccaagacaacaggatggtttgcaactcctgagctggtaaatgagtttgtcgggcgaaaaattgacaaccctcacatgttcacacaattttgtcagtgtcggacacagctgtgggctagaaaaaaccctgccgataagccttgccaacgatggttcgtgcagcagcgtgattaccacagatgcctgaatgtatatcttttagcaattgccttccctcctccaaagacacacagcgttgcaggattcctgatggacttttcttgtacaactcggtctcatgaataacatagagtttgctgcgcctggaaatccgctcggcttcatctttatcttgggggagttcttgtttgatcagaaatcttatgaggggctctctctagtcggcttcaatcatacttacgtcttgagtatccgtggcttcaattgtttctttccttggcacggttggttcgtaaagatgttcaacgaacacgtcggaaggagctacttctcgttttgaaccaaaattagccagtctgtcggctgcctcgttattgtgccgaagaacatgagtgagttcaagtctatcgaatttgtcttccaacttacgtacctcctgccgataagcggtcatgttatcatcaaggcaggaccactctttcatgacttgatcaacaaccaactgagaatctccacgaactatcagacgccgaatgcccaaggagatcgcgatccttaatccgtgaagcagcgactcatattctgccacgttatgggacgcggaaaaatgtatccacaatacgtagctcaatcttttctccagtcggggagattaaaacaaccccggctccagtgcctgaaagcctcttcgacctgtcaaaatgcatggtccaatactccatcttctcctcgggcatgtcttcttggcactcagtccactcggcgacaaattcggctaaagcttgggacttgatcgaagttcgcggcttgaaggatatatctaaagacatcaattctaaggcccactttgcgattcatccatttgcttcgcgattatgaagtatatccccgagtggaaacgatgtgaccaccgtgaccgagtgaccttagaagtagtgagataatttccggacggtaattaaaacaccatataatagcttctgaacccgaggatatcttgtcttggaattagccaaaacctcgctaacgaagtagattggtcgttggactttttgaacatggccttcttcttcacgctcaacaaccaggactgtgcttacaacctgggaagttgccgacatgtataacaacagcggctcttgcggatgtggtgaagctaggactggtggagtagtgagaagttttttgaagtcttcaaaggctttctgtgcttcgagtccccactggaaattgtctgtcttcttcaacagcttgaaaaagggcatcccccgctcgtcgagtcgcgaaacaaacctgctaagcgccgccatgcaaccagtcagcttttggacatctttttgtgagctcggcggtttcatgttgaggatggcgttgattttctccgggttggcttgtatgcctctatgggacaccataaatccaagcagcttccctgacggtactccgaagatgcactttttagggtttagtttcatcctgaaggcgcggatgcttgcaaaggtctcttctagatccgcgatcaaatcatccttctgtttggtcttcacgattacatcatccacataagcttcatcattgcggccgatctgagttgaaaaacatctctggatcatgcgttgataagttgctcctgcgttctttaatccaaagggcatggtgatgtagcagtaggccccgaagggcgtaatgaatgaagtcttcaagcagtaggattcttttagtcggatctgatgatatcctgagtagcaatccaaaaaaactgagtagctcgcagccggccgttgagtcaactacctggtcaatgcgaggtaacccaaaagggtctttgggactagacttgttgaggtcggtataatcgacacacatgcgccattgccccgtcttcttccgaaccaggactgggttagccagccagtcgggatgaaggacttctttgatgaagcccgctgctaacagcttagtcaattcttccttgatcgcatccttcctatcctgtgcgaaacggtggagttgttgcttgataggtttagcgtcttccttaacatgtaaagagtgctcaatcacctctctgggaataccaggcatatcagatggtttccacgcaaagatatctttattattttgaagaaaggtgatgagcgcgctttcctatttacaatctaactcagcgcctattacagcagtcttagtaggatcagagggatctagaggaattttcttggtcttggcgtcgctttctccgctctttggcaccttggttgcaggcacttctccttcgcttgctgtggacgcagccagtcggatttcttctcgagcgagggtgatctcgcgggtctgggccatcttgcagctttccttgtcgcatgtgacggcttatttaatgtcgctccgcagggatatgactcctcgaggaccaggcatcttcatcatcatgtaggtatagtgcgggacagccataaacttggctaacgccgggcgtccgagtatggcatgagacgctgtctcgaaatcagcaacttcaaaacaaacgttttctgtgcggaagttctcccgagtgccgaaagtaaccggaagagtgatctggccaagtggtgtagcagatagccctgggatgactccgtgaaagggcgcattactcggttttaattccgtgcgagggatctgcatgttgtccagagtcttggcgaaaaggatgctgagcgcactgccaccatcgatgagggatctgcgaagcttgacgttgcgaaccacagggtctagtaccagggggtaccgccccgggtggaccactcggtcaggatgatccgagcggtcaaacttgattgtcgtctctgaccaccgaagatattggggcgtgtcgggctggacagcattgatctcccgttcagtcaacttttgctttctcttggattcataagccaggggtccgccaaagatgtggtttagttccttgcgatggtcttgaaaaccagtcggggcatcgtcttcatcatccttcttctttgacgtgctttgatctccgtcagcggtcttgcgtgcgttcttggcgtattgctctgcaaactgtttgtagacgaagcaatctttggccgcgtgattggaatttggatgatgcggatattgggagttcatgatcttatcaaaagtattgacgcgcgaacgttgtcgggaggatggtgtagtggttgccacaagttcctcgggcttacgcttgcgatccttgtgattggtacttccactcccccctgtgttcggcatatttttcttcagcttccaagtggtgcccgactgcttggacgcggtaatagcatcttcggctttggcatactcgttggctttctcgaacatctgcttgaccgtcctgggaggcttgcgcccgaacttgccgactaggtcgtcgtggcgaatgcccttggtgaaggcggcgatgatgacgtcgtcggtgatgtcggagatcttgttgcgttgctcggaaaaacgccggatgtaatctcgaagggattctccggacttctggacaacgttgtagagatcgtctgagtgccagggcgttcaaaggtgccctggaaattggcaatgaagtggtcgcgaagttccgcccaagatccgattgtgccacggggtagcctgtgaagctaggaccgggcagaatctgctagggccataggcaaataattcatcatggctttgctacctcctcctgctgcgcggattgcgagaccgtagacggtgagccaagactccgggttagtggtgccgtcatacttctcgattccactcggcttgaagccggctggccaatccactcgacgcaggttggtcgtgaaggcagcaactccatccacgtcgtcgtcgtagcggtctggtgaatggttgggagcacagcctcttgccgcgcggcgctggttgatggtatcgcgaagatcgatggggtgcctgcgaggtcgttcaactcgacgctccctgtgtcgttcgggaggcgaatggacagatcgctcgtcgtgacccctgctcctgcgactggatcccgcgccgatgacgctgaggcttggttggtgatagtcttgagatcgaagagggggaactcggctgccagtcggcgtgcgggtgcttgcggagttagccgggaccgaggcggcgatcatggtctttgtctggtttaagatgttgacgacgtgatcagcctgattgagcgcgtcttccttgaggagggtgtcgaggagggtgatcgctgcaaccgcgttctgttagggtgtgcggaaaaccgctgtcccgtcgacgacttgttgcccgatgagatctcgtgctcgtcgcccggattccaaggcgcgctgtcgtcgatcctcagcctcctttgcagcccgttcgcgatcttgttgttcacgctgtagtcgttctcgctcttgtcgttgtcattcttcctccagtcggcgacattcagcttcttgtcgtgtgcgttcttcttccgcttctcgggctcagcactgttctgccgtctcgttgttggccatgaatacaccgaaaaagagaggcgtgtagtcgtcctcgtagctgtcgtcgaagttaccgtagtcgtagcgatagccgaagtcgtcgtactcgaggatctccgttggtcgagaactgacgccgggggagctgaggtagcaatccaattcttccgtcgagaccgtcccgagaggctgaaatataacgcctacctccctagaactagattggatcgaagccgaagccggatcccgtctaggtcttcgggtgggagatgccttggtcgtgaagacagcagccagatcatcgggaagtctcatcaggattgggggataggacccatcatcttgatctggtcgtgtccgagtagattggatctcgtacgagtggtttgaagccaactcggcagagatgatcttggggtagacctcggccgagttcggggtaccgaacggggcggagatctgacctcttcccgactggttcgaatccgagtcgaggagagaaatcttgccgaagtcgttggtgatgaagtcgaggctgccgaaccggaacgcctgtccgggagggaagacgaagtcgtcgatgccggagacggaacccatcacactagtcggcgaagaacttgacgctgcccctacctggcgcgccaactgtcgaaacaagatttcggcaatactaaaagggggtggctatcaagctggaaaagtggatgggttcagagacaagagattttatacaggttcaggccttcttaaccaagaagtaataccctactcctgtccggggattgatccgcagagtgtattattgatcgtatgatctgggagaaaatcgtgcccctagaggcacccggacccctccttatataggggaaggggtccgtattacaaagtacaaaccatatccctaacggaatagataattacagataaaatacaatcgtaaccgactaggatcccgggtatttccttgacatacaagtttggtaattaacccgagtccttttaaagatattctatctatacagggcaccccatacccagtcggatatacatgccgtgtaggtatggggtatccataatctccacacttttcgtcggagatcgaaaactatgcagcccaactcgaaagcaagaactcgtcgaaacaatgaaaaaagggtggcgatgcgccgaaagtgttatcgaactgatgttgtttgtttacagggtcctgggttatatttatacccaaaatacatgatatgtccttgccgaacacgactctatctctattacaactcaaaaatacgaacaagtcctgcggactcttaccgaaaatatctataaggaaactattagaatatcctaattaataggtacaattgccttctccggactcaatccacacttggcaatactggtgtagcacttgaaccgatctagacaacaatctcctgatcgccttgccgggatcagttatatcggctcctccttgcccgatttggtagcagccgatgcaacccgtagctgatgtgggttctgtttctgaggctacagatttccaccaaatccactttggttctgacttcggatccaatctttgatttaccaattttgatcattaacacatgcccctcaagtccgtgatatttgcgatgttgcggatgtgctcgattttgtttccgcttgcatctagggtttcttttctgtttcggccgtcaacgcgcccttttaaatagtgtcaaccaccttgaaaatttcacggcgtctcccccgcttcaattgccttggccaaaaacttcccccaatcactccagtaattcgctcagcgactctgcaggcgatcccttgtttcggcggcggcccgacttcggcaatgtcttctgccaatccctcaagcgctccggtggtcgagttccccgaggtaagcaccatcggctaggccctttctgtctctttaccactttgtgctcccttccctgatctcttcttcattctattgtagcacctatcccgtcaagttgcagttcctagcttgcaaaaccagcaccaattctttttggacccaatcagtgacacagatcctactcagtttatcaatgccaagaccaacaaagtcctctttagacggactaaccctattttaggccattggactggtaccttcaagacttggccttcctccaatgtcaaaacttgaccggattggtataggaggatattggctagcgaacagactcactgggatgagcttgggatttcacaatgcctagcccctcaccatagccgatatgaaaaatgatgagcccatgctgtaggcagccgcttacttctggtccaataccttgaatgccttcttgttcggccagggaccgatgactccaactctcttggacgttgtcatgattacgagtttggatgtcacgtcgtcagccaacccaatcagtttgagcaccaaaagctagttttcctataaaaccaagagcattggaggctggtctggctttgttacttcgaacatggggtctggtcttgtaacccctagggaacatgtggccttcctgatgatgtggttacaaaagttcctgttttgtggtccaagttgtgggcctacctccaactggcagcatctggtgtggctctagtggacaagaagcaacttcctttgggcaagtacctcctggtggctctgtatcaaactcttggttctgcatcagctaagactgttgtcgataccgtcatcggcactggtggtccctggtggcttttcgaagtttgtttgaatttgcataccatcaaggtatcaaaaaggtcagccctgactgaagcaagatttccttctgccgacgatccaactgaagatgatgacggaaataaagtttccaccagtcgatgcatgtcctttggagaggcggcatcttatgctggatcacagttgtcggctgagcttttttctgatcggttcggtaatttttgtgatgggtatccaagggactccagaatatggtttgcttatgatcattccgaaaattttgagcttccggctaattttagatttgacaaaatcaatcatgaagttcttacagcagccatttccccctgcatactccctgtcggcatccatcaaggcaggaatatttaggtttcatacgagttctatcatccaacgagcgctgccaggcagcttggaataggccaattgccgattagcttattttttgtagacaagatccaaaccagcggggaaattacatcagctctcatgatggacatgctcttgagcatcccaggaccccctttaggctgtatcaatgatatcgagctagctctgatgaggagctgtcacatcctgattttcgtttcaggttttataaattatttaataaattattttcagaatttatattaaatgttcattaatttacaagtgaatttaaatgtgagaaataaaatttcctaaatataaagcatggctggatttaatttttattaaactctttgtggttaattatactctctagaattttctcgggattttcaggatttttcttgaaattatgttgtagctaggggtcaccaccgttcctctctatttggcccaaaacactgtagaggaagagattgggtaagattgagtttttattctaagtatccgagtggcaaatggtcattcgaacaaggaaacggtaaaatgttgttcgagttggaaaacactattcgagtcggaaaataccgttcgagtgagtccttgtcactaagtctcattatccgttttgagtttttcatgagttaataacaggtcagctatcggataagtcggaaagggtggtcgagatggtaaagactatttgccatggaaaagacccatagtggtggaaaagacccttggtcgaggagaagatccatgttggtgaaaaagactcttggccatgaagaag

SEQ ID NO: 5136 - DNA, 34490 bp, Oryza sativa
  unsure (1)..(34490): unsure at all n locations
acattatttaatatcagatgacataacgatactgtcagcatacccgataggagaggtattgacaaataaggaggtagcaagaaggattacaaaatgggcaatggaacttctaccatttgatttgaagtatacctcgagaacagctataaagtctcaagttctggcagatttttttggcagaatggactcccaatgaggtggaggaaaaggaagaagatgaaaaactatggataatatactctgatggagcatgcaatgccactggcgtaggggcagcagtggttgtaaaaacgccgatgaagcaaacactaaaatattttgcaaagctagttttcccatcaacaaacaacacggcagaatatgaaggggttttattagccatgagaaaggcaagagcactaggggctcgtcgattgataatcaaaactgattcaaagctggtggcaggtcacctttccaaaacatttaaagcaaaagaagagacaatggcaaagtacttggaagaagcaaggctgaatgaaaaacacttccttgggataacagtaaaaactataacaagagaagaaaatggggaagctgatgagcttgcaaaagcagctgccacaggccaaccattggagaattcattcttcgatgtgttaattcaaccaagttatgagaaaagagaagtggcaaacatacatggcgagatagattggagagagtcaattctgaagtatttggttagtgaacaacttccagaaaaagaagaagaagcaagaagaatacagttaatgtcaagaaaatacaaagtgatagaagggcagttgtacaagagtggagtcactacccctttgctaaaatgtgtaacaagagaagaaggaatgaaaatggtggtagaaatacatgaagggctgtgcggagcccatcaagcaccaagatcagttgcatcgaaggtgataagacaatgagtatattggcctactatcatcaaagacatagagaagtacattaagacatgtaaggcatgccaaaaatttggtgcaacgtcaaaagcaccaccaagagagttgcaaccaattccaccagtttggccaattccaccaagagcaaaaggagatttacgttttgtcattgtggcaattgagtatttcacaaggtggattgaagcagaggcagtagcacgaatcacatctgcttcggtacaaagattcgtttggaagaatatcatatgccgatttggaatacccaaggataatggaaaacgatccgagtcaggaaagttcaaagatatgtgtaaatgtcttaacctgcaaatcaactttgcttctgtgggtcatcctcgaacaaatggtgccgttgaaagagccaatgagaaaatagtagaagccataaagaaaaggctggaaggttctgccaaaggaaaatggccagaagatctggtgtcaatcctttgggctttaagaacaacagttgtccaacaactggcatgactccattcaggctaatatatggagatgaggcaatgacaccaagcgaggtgggagcgaattcacctcgaattgtgtttgatcaaaaagacgaagaaggaagggaaatcaccttggaaatgttgcacgagataagagtggaagcattagacaaaatggcaaaaaacacagaagaaaccaaaagctattacaacaaaaaagtgaaaatcaggcaaatagaagaaggtgatttggccctcaagaaaacactaaatgaagtggctgttggaaggaccattcatagtaaaaagaaagttaaaacaggagcatacaagctggcacacctcgatggagaagaattaaagcatacttggaatgctgtttccttgaagaagttctatgtgtaaaaaaaagaaaaggaagaagaaaaaaaagagaaaaaaaaaagggggaaacatgttgctcgaagtgtacaataccgaccaccttgtaagattctcttttcttctcggtgttaatacatataaacaggacgtagggtgttatcaataatggattgtatatgtgtttgcgaatcaagaaaatcctccgcacgcttcggagaagaaaagccaactcgataacaaatcgagaaaatactccgcacgctacggagaggaaaatccaacttgataacaaatcgagaaaatcatccgcacgcttcggagaagaaaagccaactcgataacaaatcgagaaaatcctccgcacgctttggagaggaaaatccaactagataacaaatcgagaaaatcctccgcacgcttcggagaggaaaatccaacacgataacaaatcgagaaaatcctccgcacgcttcggagaagaaaagccaacttgacaacaggttaaaaagcactccacgcagttcgacaagttttaccttcgcccaaaaacctaacgataaaacgctcgaacacccttatccgattcgagcaaacagtggaaaattccacgcgatgaggtaaagcgtgatttcgacctcgtcactccttcgaaaggtaagaaggacggcggttttcgaacaagttttaccttcgtccaaaaacctaacgataaagcgttcgaacacccttatctgattcgagcaaaaagtggaaaattccacgcaacgaggtaaagcgtgattttaacctcgtcgctccttcgaaaggtaaggaggacggcggttttcgaacaagttttaccttcgtccaaaaacctagcgataaagcgctcgaacactcatatccgattcgagcggaaagtggaaaattccacgcgacgaggtaaagcgtgatttcgacctcgtcgctccttcgaaaggtaaggaggacggcggttttcgaacaagttttaccatcgtccaaaaaccaaaataacgatgaaacactcaaacactcataaccgattcgagcagaaagtggaaattccatgcgacaagataaagtgcgattttgacctcgtcactccttcgaaaggaaagggggacggcggttttcaaaaaccaaagctaaacgctcgaattcttttctgattcgagtctttgcggaataaaaggaaaagaaaaaggaaaaatgacattgagaggagaaggcattcccgtgtaagggacaattgagtagcgccttttccatattctaagttgacgctcagatggtctaaaagtttgccaaaagttaatgctgctcgaagcattattcgaacgccgttttctaaactcgacaacgaagtcacgcaaactaccatctcgatgttctctttgccattggaaaaattttaaagaaaaaatacaagtgtcatcgtaatgtatttccttctcttcatcatcacatttagttgctttagaaaagagcaacttctcgtgtgttcgaaatgcaacgagcttcatgtttcgagttgaatgatacttgttgcgtcgaaccacaacttttcggttcaaataaacctgcttccccgacaaaaacgaaatgatgatgaagcacaggcatacagagaaaatagcaaatggtacccaaccacagaaaatatacataattaagttcccaaccacaataggttcgacggagcaaaagaacaagcgttttcgaccatatccaaaaagttttccaagttagttttccctaaaataacttcacacctgtgaatcagatttgtgagcgtcaccaccgttgtctggttgactcgaagaggattgtgcggtgtgtgagctcgaagccaacgatgcttagagagaagcaagggtatcttcatagcctttctttttccagtaccaaacttgaaaagctttgactacagatcaaactgccgcatggtgttgagcaaactttgacataaatgtgcatattcaatacataaagaatatgtatacatataacaatatatatatatatatatatatatatatatatatatatatatatatatatataataaacaaataaatgcataatgactgacaagaataaccgctttcgaacttcaaaattttctatcctagtgtttttcgactgaataggaggacggcggttctcccctagcttttgattcgaacacggtttcggccgaaaacacacttcgcccttacccgtgaggggcttgttgtagctaggggtcaccaccgttcctctctattcggcccaaaacactgtagaggaagagattgggtaagattgagtttttattctaagtatccgagtggcaaatggtcattcgaacaaggaaatggtaaaatgttgttcgagttggaaaacactattcgagtcggaaaataccgttcgagtgagtccttgtcactaagtctcattatccgttttgcgtatttcctgagttaataacaggtcagctgtcacgcccagaaattaactagcaatttccgaacttatttgtgcattaaatcctcgtccaggaatcagccgaggtacacaaactgacaattaatatacagattcatcataataataacgtaaatacttacaaaagaaaagaaaaatagcagcggaattacagtctagcgaagctccggctccactcccacaggcagctcaactgaggtataagccaaacgtcttctccttcgcaacttgtcttcaactgaggtttgattgattattgcaaggtgagcatatgacatactcagcaagccacacagcaaatatgcaagtgcacaagaataccaaaggatggcataatatagggttcatttgcaaaagcagcatttagaaaatatttaagaattgtaaaacagtagagtaattaatcatcaatattaatcaacactgaacagcacacccatgctgcacaggcccaaccatcctgaacaaccatacccggctgcacagatctatctccaaaccaggaatgtaccattccaaaccaggagctaaattaattaccatcaattaccacattattattaatgagtagtgtaggactaatcacgaaagacattgttcgacccgcccataaccgcgggcacggctattcgaatagttttactctggccagaggtgtaccactgtacccacaagacacaactccacaatatgtcaccatatcatcatgtgcccatgctaaacatgtcaccatttgtgtagttgtgacaagacccctcgcatatgtcaactcaaagcagtgcaccgttcctagatcgtagtcaccccctcaaaaaccagaggcatggactccccagcgacccccgtgggcttatctctgccacttctcagtctggcactccacgatgagccttgctatgcaaagtgtccagccgttgcccattctggcttgtggttgacacggttaatgtttcacaaccgaaactcgtgaaccggtccttaattgtcatgagcactaccatcaaaaccatgtgctcacaacccaccattatcaagttttagttggcacattaattaattcaccaatcacgattaaccatcgtgagctatcattaaatctctaccattaagtaatagtgaaacattagttatcccaattatgtgctaatgtttctaagcatggctaagcaattatatctaacatctagctgaaccaatatataaagctcaactagtcaaattataataacccaatgtatcaaggaacagtgtaatcaatgcaaattggccatacaaaggaataagttcacaccacccggtgacattcgaaaataaatgcacagttgaaataaataaagaatttaaatatacgatcaacatggtcaaaggaattgtgtttgggatctgtgtgacttgccttgcaataacgggtcttcaattagtcttcttgaacacttccggcgcactcgagaaccttcgaaacgacggaaacgacaagctaacacgcaaaacgaggaaaaagactaataaaaaccaaataaacaatacataagaagtaaacaaacatgtagataataattttagatgaattaggagacttgaacggcctcactctgacttcatatgaattaattatgaattttacaagatttaatctaattaaagcccatttaaaaaaattaaataaatttaattcaatttatggataattttaatatgtagatctttattttatacaacttttgcaacttgaaccacattaaactgagttacaatgaattagttatgaatttttaaagattaaaccggattaaagcatttatatagattttaattgaattatgacgcaataatgaattatttttgaaaagcaaaagggatttattgcgtcatcaaagatggtccacggtagaccgggtgcatagaggcggtctacgaaaccaacggccgagatctaatctaaacaaaatggacggccaagatcgatctaatccaccacgggtctacggctgacgtcgacgatgacgtcatcgccggtggcggctcggcacctcgtgctcgccggcaatcgatggcgcggcgacgcaaacggagggcaccaacgggtagagggcgacgcggcgaactcaccgagctcttggatgacggcaaacgacgacggatgacgacggcggcgaggtcgaagcggcggcgatgattgggtcaacgacgacggtggtgttccagcgatcttcggcggaaacggaggggtggacgaggtgctgctcctcctcgcgatcccgacggtggcgacgacgaccgaaggtggtggctggaccaacggcgcggcgtggctggaccaacggcagcggtggagagcttcggggcgacggagtcggcggcgctccgatgatctgcggcggaaacggaggacgggacaaggacggcggcgaccttgcgaacctggcgacggccttcccgagtgacggcggcgactagagcagcggcgcggcacggccggactcacggcgacgacggcgacacacgagctaacgcggaggcggcgctacaagcgttggcgggctaaggcgaaggtgacggtggattgaggaggtctcagggatccttttataggggctaggaggcggcgacggaggcccacggcgaccggcagcgagatggaaggttttagggtttggaaagagatgctaaccaaatcggcattgaatccgacgatttccaaacgaattagctcgggtttcctaaagagaaaaggaagaggagatcgaggagattatttcccctcaattgatttggccggagaaggaaggaggcggccggatttggaaggagatcggcggcggcttgcggctacagtcggcggttggtggctggaggaggaagacgacctgacaggtgggtcccacctgtcagcggctgagagagaggagggagggcgcggcggactgggccgaacgggccgggcacgcgcaggccgggggaagggagagagagacttgggccgactttcggcccaaagccaaaagggagattttaaaacctttttctatttaaattattcatgaaatgatattccattgattaaaaatacttccttggctcaaataaattccagaaaaatctaggaactatagaagcaagagaagtatttaacaaaattttatctagcccacttttatattgagatttaacaaattaaaattagatcttctcttttaggcttttaagatcatttctaataattccttttaaacaacaatttataatttaaggatttttaaacaagaaaagcacttaacataattataattagatcattaattgattaactaattactgaactgttctttgtatcatttaggaattgagctctgaaaaatccgagaaaatttcagagggtataattaatcatggagaatttaataaaaattaaatccagccatgctttatatttaggaaattttatttcccacatttaacttcacttgtaaattaatgaacatttaatataaattctaataataatttattaaataatttataaatcctgaaacggaaatcaggctgtgacatcagctaccggataagtcggaaatggtggtcgagatggaaaagactatttgccatggaaaagacccgtagtggtggaaaagacccttagtcgaggagaagatccatgttggtggaaaagactcttggccatgaagaaggcgacttggacaataaagatgccaagagaatattcccagggaccactcaaccactccatctagctggcaccaaaagactataatgacccccataatgtaccaaaatgcccttagggtctgttgatatgcaggggcacgattgtaatttcatgtgggcccaacaaagagcacaattgtaatctcacatgtaaagctgtgtactatatagagcagacaaaaagcctgtagcagacaggacatcttggaatactaaaaatcttgtcactcagggtgtgatcatttggtattcgggctcatttctcaggataggcaggaaaagggtgttttcctgtctatccccaatcttgtccgtgaccttgtgtcacgacaaattattttcaggatttttcttgaaattatttgagcattgtaattatttttaacaattcaaagatcatttccatgattaatttaaatggaaaagtaaataaaattcccttttccttttcgggccagtcttcagcccattcttcctctttgcctgcttactgtctccttctttcccgaagaagtctatttcttgtccctcgcctcttttcttttagcccagacaaaagtctgtttcaccttcctatcgctacagtactccttctatctctggacagaacccgagctcctgtgcccactgcccatgcaactcgacgcccccgcttcctctgtagaatccgttgcatcccgtgactcgtttcccaaattggttgaagggatttcttcccttatcctcctctttctttcccctcaagaatcggagcaaatcccatcgtatatcgcttggattcgaagcggagttcatctcctattttcccggcgaaccttaaccaatccgccgccaaatcctcacgggtccgagcctatttcctccacctttgcctataaatagcagtatcaatacctcctcttccgtttctatctttttccagagcttttccctaaccttagccgcctgcccgcgctcgtctcctcgctccgccgccggccgccgctccagtcggtcgtagccgtcgactccgacatctccggtcagcgccgtcgcctccaatgggaccaaagcgaagagtggaagaccggccaccatctgcccgaagccgaagaccccgggaagcccttcgtcgccgttaaggccgagttcgccgtcgcgttttgatcttcggcgaagccccgctgctcctcccgtcgtcgcccagcttcgtcgccacctccgttgggttcgaaaggaggagctgcaccccggccacccctccgttgccgccgctcgttgtcggaaagccgccgtcgccgccgtcccgatctcatcgccgcctctacctcgccgccggccgtcttccgttgtcgttcgtcgtcgtgccgcccctcggtgagctcccgtcgtcgtgctctttcttccggtatcctcgatttgcgccgccgagccctagatcgccggcgatcgttggaagccgagccgcctgtccgtgatgacatcatcgctgacgtcagcgcccgttttccttttctaagataaatcgtaaatccttttctgtatataaggctaaaatcagattaatcttgtaaaattcataactaaatcatatgaagtcagaataaggctgtttaagtctctaaattcatctaaaatcatgatctacatgtttatttagtttatatgtactgtttatttggagtttcttagtctttttcctcgttttgtgtattagctcatcgtttccgttgttgcgaagattcgtgagtgcgtcggaagtgttcaagaagattaattgaagaccgattattgcaaggcaagtcacatagatcccaaacacaactcctttgagcatgttgatcctatatttaaattctctatttatttcaactgtgtatttattttcgaatgtcaccggtggtgtgaacttatacctttgctacggccaatttgcattgattaccttattccttgataccttgggatacaatttgactagttggcctcatataatggttcaattagatatattagtatagttacttagatatgcttagaaacattagtgtggctgtgtttgcaaccccatgttcccagcccctctccatcgttttccgttttccgagcgcacgtttttcaaactactaaacaatgtgttttttgcaaaaagtttctatacgaaagttgcttaaaaaaatcaaattaatccatttttgaaaaaaaatagctaatacttaattaatcatacgctaatggatcgctccattttccgtgcggaggcactatgttcccaagctgaacatgcgaacacagcctaaagcttcactattacctaaagctggatatttaaaggtagctcacgatgatgaatcgtgttatgataatcaattgataattaaaacttgataatggtgggttgtgagcgtatagttttgatggtcgtgctcatgacaattaaggatcggttcgcgagctactgttgtgaaacattaaccatgccaaccacaagctagcatgggtaacggcatttccttttgtatagtataattcattatggggcgccagactgtgaagtggcgagaagtccgtgggggtcgctggggagtccatgcctctggtaattgagggggtgattatgatccaggaacggtgcgttgtggtggattgtgttatgcgaggggtactgtcacagctcctttccgagatatcgtggtggtattgaggcgcatggcaacgtgttgtggggctgtcttgtgggtacagtgatacattgatacatctctggccagagtaaaactattcgaatagccttgcccgtagttatgggcgggtctaacaatgttttcgtgattagtctcacactgatgctataactggtaataatttgcttagatcctggtttggaatggtacattcctggtttggagttagatctgtacagccgggtatggttgttcaggatggttgggcctgtgcagcatgggtgtgctgtacagtgttgattaatattgatgattaattactctactgttttactattctcaaatatttgctaaatgctgcttttgcaaataagccctatattatgccatcctttggtatccttgtgcacttgcatatttgctgtgtggcatgcggagtattccatgtactcaccttgcaataatcaatcaaacctcaattgaggaagttgcgaaggagaagacgtttggcttataccccagttgagctgcctgtgggagtggagctaaagccatcgctagaccgttaatccgctgctgttttcttttcttttgtaagtatgtaatgttattattacgatggatttgtatattaaattatcagtttgtgcacgtcagctgattcctatacgaggattttatgcacaaataagtttagaaattactagtgaattttcgggcgtgacaggagcacactcttcgatcgatggtgggctgagtggaagaagcatttattccatctatcagcctcaatgttcttcacgataatcttcccggactcgatgcctcaggtacacttttctttttgaaaaattctaaccttgagcaaatgtttaatcgatacttgatctcttttccttgttcgcagaccacagactcctcactgccttacactagccaaagtgggaagccgattaactatgctgcagggattatcccaaatggtggtggactagctccttcagtgatcggctatattgcccccaagacaactaatttactatatggacaaactcatgaaccgattccagttgaaacttgtaaaaggaaaagcactaagcaatcggatgtcaagccatcggctgctaaacctcctgccgcctcgaaaaaggtagcaaagaagcaaaagtttgctgccgatgatctacctcctttggatcgtgatgtagaggaggtcctggagaatgaagaaatagaggaggccattgataatgctgctgctggcatgagtgacaccagggccttatccgcaagccctacgggtcgagctgggacacctccagctggtacaccaagtcccaacaagacgccagatgctccaacaccggcccctaaaagtggtggtatgcatctttcttcacattatcatccgattaagtgtgcatcatatgaatttattgccatttttccagcagacgaagaagccaagggctgctaagaagaagaaatccactccgcctccattggtaaccttaaacttgtgttcttactcctattagttgccacaaaaacttaatctcctcccctttttgcctcagcctcctcgatctccatctcctcgtcggctagcatctagtgagcacaccccgtcggctgtggacagtcatcacttgggaacaccagaacatccacctcttgttgtgcctgttagtactattaaatcttctcatatcggctgcgatattttctttgccaataatcccgatttatcttttctccaggtcttggccaatatgttttcctttgacgttaaacagttcctagatgaagaagaagaggaaaccaccagtggagccttggtccctcttgatgatgatctcaagaccaaactcatggatattgctcaacggctagggagttccttggattccttggttactggctgcgggtcaatcagggccaggtttgaagagatccaccaccagatcccagaagatgaagccgacatcatttccctggctgtatatctagagcaacatcgtttcaagctggaaagggcacaacaaagaatagcagacatgcgcgagagagctaaactggaagcaacaatcgaagctaatcggctcttcattaatgaaaaaaaagtcaagcttgatgagatgatcgtcgggctaggctctactcaagtgaacatagatcggctaaaaaccagggaggccgaactagtagctgagcttgaagcgtgccgatttccctagggctattgaagaacaaacgtctaaattgaggaaatccgtcaagcatctctctgaattgagcaagtccttgaaggtgattcctagtgtcacgcccggaaattcactaataatttccgaacttatttgtacaaaaaaccttcgtctaggaatcagccgaggtacacaaactgacaatttaatatacaaatccatcataataataacgttacatacttacaaaagaaaagaaaacagtagcggaattaatggtctagcgatggcttcagctccactcccacaggcagctcaactggggtataagccaaacgtcttctccttcgcaacttgtcttcaactgaggtttgattgattattgtaaagtgagtacatggaatactccgcaagccacacagcaaatatgcaagtgcacaaggataccaaatgatggcataatatagggctcatttgcaaaagcagcatttagcaaacatttaggggtattaaaacagaagagtaattaatcaataacttttaatcaacactgaacagcacacccatgctgctcaggcccaaccatcctgaacaaccatacctggctatacagatctatctccaaaccaggaatgtaccattccaaaccaggagctaatcaaattattaccagttatagcatcatttattatagtgagaagtgtgagactaatcacgaaagacattgttagacccgcccataaccgcgggcacggctattcgaatagttttactctggccagaggtataccactgtacccacaagacacagccccacaacatgtcaccatgcgcctcaataccaccatggtacctcggaaaggagctgtgacagtacccttcgcacaacacaatccaccacagcgcaccattcctggatcataatcacccccttataaacaaggcatggacttcccagcgacccccgtgggcttatctccgtcacttctcagtctggtgccccgcaatgaaccatgctatacaaaggtaaagtcgttgcccatgctggcttgtggttggtacggttaatgtttcacaaccgaaattcgtgaaccggtccttaattgtcatgagcacgaccatcaaaaccatgtgctcacaacccaccattatcaagttttatttggcagttaattaattcacaatcacgattgaccatcgtgagctagcattaaatatccatcattaagtaatagtgaaacattagttatcccaattgtgtgctaatgtttctaagcatggctaagcaattatatctaatatctagctgaacaaatatataagtccaactagtcaaattatcacccaaggtatcaaagaatagagtaagcaatgcagagtggtcataaaaaaggaataggttcacaccacccggtgacattccaaaataaatgcacagttgaaataaatagagaatttaaatataggatcaacatgctcaaaggaattgtgtttaggatctgtgtgacttgccttgcaataatcggtcttcaattaatcttcttggacacttccgacgcactcgcgaacctttgaaacgacggaaacgacaagctaacacgcaaaatgaggaaaaagactaataaaaaccaaataaatagtacataaaagtaaacaaacgtgtagatcataattttagatgaattatgagacttggacggcctcattctgacttcatatgaattagttatgaattttacaagatttaattccaattaaacctattaaacggagactattccaaattaattaaatcatttacaaatgatttataacggagataaaagattaaagcaacctccggaaaagattggatcatatttggtagatgatatatattaaaaagaaataatatgccactgaaaagaggagaggatttatattgattttggacagctgagattaatcttgaccgagtcgactaagatcggatggcttggattgatctggcaagcgagcctcacgagataccgactcaacgagtcaactccacgtgacacgagatcacccaaatgatcaaccgaaaccggcgaacagaaccggcggctctgaacggctctaaactaaaggacgactcaacacagacgaatgaacgaagcacggggaacacctcgttcgaacgaacgagcgaacgactcaacaacggctgcggctaaaccggtcggctagacacgattcacggtaaagccctagtacgacaaacgataggccggtaggaacctagggttgcacctacggctacacaactcgactaaaagcagcggctaagtttaagcggcacacagctgcgacacggcggcactaagacaacttgactcggctaggcggcggctaggcggaaacacgcagctagggttagggtgacggcacagccggtagcgaccatgcacggctagagcagcagggctgcgagcaaaaacgcaaccggcacggctgcggctgtggcaaagcggcaaacagcggcagcggtagtgatgcatgatagcagcgcggtgacggactgcggctgcgctaagtctaggcctctagggcaacaacgcggcaaagcggcaagcagctgcagctaagcggcttagccggcacacgcgcagcagcggcatggcaagcagctgcggggcaacgcggcaaggcgcgacgccgtagcgactaagcagcggtggctaagaggctcggtagagcgacggcaaaccgcaaccgcacggcgtgcagcagctacgacacagcgacgacgacacacacgtggcttacataaacatctaccctaggaatcggagaggaggcctcaccgggaaacggtagcgaacggagaggaagaggtgacggctacggtccgacgacaacacacggagacgatgacgacgctagagccaaacaagattagattagatggaattaagaccttagggataaactacaccggtgaacgacataggagcggcggttactggcgaaccacggcacaataatgcaaacggagggcaccgggaggtagagaaggcgacggcgattcttaccaacacttacacgatgacgggcagcgacggaagatggccagcgatgagctccgaagggcggcgaggtactgatcaacggtggcgacggcgtttcagcgacgggagacgacaactgaggggtggacgggcttcaccttgctcctgcgaacccaatggagtcgacggcgaccgaaggcgacgacggacgacgacgaacagtgcggctggagacacggcgacgacggcggcgctcgggttcacgacgacgggcaacctccggtgggatttggcgcaaaaaaaccggtggccgaggtagctctcacccttgcgaagccgagggaggcgacggctcaaggcggcactgaccaaaggggcggcgcggctcggctggagatggtggcggcggtggagagagaagacaagcgtggggagagcgattccggcgaccgcggaggacgggacttgaggggataggtagaggacgacgagggggtcctttatataggcacgggagctcgggatcaagcccacatcgacgggaaaaactcgggaaagtttaggatcctcgccggaaaaaggaaagattgatccgcgaaattggaaaggatttccatagaaacttttggggatttcttagggaaattatagaggagattgagaggattccattcccgcaactaatttggaaagaggagcaacgaggaggccggatttggaaggaggagcggcacggctgcacaggctcgggacggctcggctctgtccaggggttgaagacaacactgtagcgagagggaggataaacagacttctatgcgggctgagaggaagggagagaataggagggaatgggctgaatagggcccaagactaggaagaagattttattgcttttccaaataaattaaccaatgagatgatctctcaattgttaaaaatacttccaatgctcaaataattccaagaaaaatcttgaatatacttgaacactctaagtatttaacaatattgaaaccagaccatttaatgattaattcattagttaaataattactgaaatgttctttgtattgttaaaattaggaattgagctccgaaaaatccgagaaaatttcagagagtataattaatcatggagaatttaataaaaattaaattcagccatgatttatatttaggaaattttatttcccacattaacttcacttgtaaattaatgaacatttaatataaattctattaataatatattaaataatttataaatcctgaaacgaaaattcaggctgtgacacctagtaccgatgcagctgacatgcgagttatagacgaaatagaacaaattaggcagcgagctgtatcggccatttataggctcgtatctgggtgaatattcttgtaataggacgacttgggtgacatcattttgctgaatttcctttatatattcgattgtaatgatttccatattcgtcttaactcaaaaagcttcgaaaacccatacgtaaaatttttcaaagatctcagtcccatctgtgtacatatgcccccttaattttgcagtgttgaaaaaaattggcaaaattacattggtctaagggcaatatattcatatatcggccatctaaaggcgatgtaaaaacatcagtatcttatattggcttaaaccaactgatccatagtcctgaaatcttccaagggcgataacacacatatcggccatctagaggtgatgctccacacatcggctatcatgagtcggcacaaacccgccaatcatgcattgacccaaatacttggtaaatatttcttcaagtattttccgttgagtgctcttccgtaaacttctccttcgagaccttgtaacatgtaagctcctttagaaacagacttgtagatccagaaaggtccttcctaattcgatgaccacttgccaaatttattgtcgtgagttcctatcggcaaaatcaacttccaaaccaacttgccttctgtaaaagaattgggcacaactttcttcttataatgacgagcaattatctccttatcctttgttactttttccacaacacgcatcctagactgaaccaactcttttgactcgtccaccatgagattgtgataatcatcggctgttaactcatcttggatagcaatccttctcgagccgatggtactttcccacggtaaaacaacctcatgcccataaacaagcttgtaagtagggacttgaattgatctatgacaagccatccgataagaccacaatgcttcagctaatctggtatgccactgcttaggaaaatcagaaatcttcctcttgatcaacttaatcaaacttttgttagaggcttctgcttacccattagcttgtgcatggtgaggaattgaacaatttaaaccccatgctttttgcaaagatagatccttgatcggttgtaattgtctgtggcacactaaatctatatataatatgttctcaaacaaattggattgcgtccccagaatcaactttcttcaacggaactgcctcaacttattttctaaaatagtcagtagccaccaatataaacttatgtcctttactcgagggtggattaatttagcctatcatatcaatccatcaacctctgaatggccatggtttgattattgtattcattgccgatgctggcgctctctgaatagctccaaatttttgacagccttggcagcctttataatatctgaagcaatcttccaacattgtcggccaaaaatacccaactcaccgaagcagccacttcatcttatgaggcgattggtgagtaccacatataccttcatgtacttcccccatcacaaccttggcttgatcggcactcaacatttgagcaatactctatcaatcgtccgataatacaactcatcatccaatagaacatatttcaaagctttatattgtaatttcctcgaaaccggttgagagggatccttcaaataatcaaatacatgatacctccaatcatcgaccgtaattgtagagacttctatctcaatatctttcaccatcggcttgtatcccgatgcccccctgagccaaatcattagcttctgcattttgctctcgggaaacatgcttcattgtcaccatccgaaaactacccatcaactcttgacacttttcattgtagatcatcaaagtatcgctcttccattcatattccccagccaattggctagtgaccaacaaagaatcgcccatgatttcaacagcatcgacttcaacctcttttagcaactgtaatcccttaagaactgcttcgtacttggcctgattattagttgcataaggtttaatagtataggcaagctcgaaactagccccctaggcgatatgactaccaagccgataccacaaccatgagtgcaaaccgatccatcaaaaaacaatgtccaaggccctatatcaaccaggctgtttgaatcattacgatgctcaacaatgaaatcggctatagcttgccccttaattgccttaggtgattcatctatgagatcaaactctgtcaagtcaaaaatccattttccaactccccccttcaacactggggccgatagcatgtattttacaacatcggccttgcaaactatagtgcattcattggataacaaataatgcctcaatttcgccacttagtttttaatcaagtgctctagtattaggactctggataaagaaagaagtttctacgcgatgatagagtagtaattaataacttagacgtggtgtctaggttagtctgttaccttcgtttgttgtgtgctccacagaaagtgaggtaggtagcgggtggtgacagccatgtccgtcctttgtatccctccatgtttggatacatcaaatagctcaacgccaattttttgtaagattctttagtggatttggtaaggaaagaaattgatcactcgatggaagcctatccagaaaagaccgagtttaagaaggaatcatgaagactatggtatgacaatttagttctatctattaattagacaggatttaataattttccgctacaatctttaggaagttttgtctagtgtccgatcaggacttgtattgttccttctatctttaggaaacttgtgtcgtgcccgatatagaacttgtatctacccgtgggtataaatatgtccacccagggtcattgtaatttatctcacaaatcaatgcaactactctcggcgcatcgccaccctcttttctatggtttttatcaccagcgtaacttgtcacctgacgcacggctacatcacttcgatctccatcgaaggggtgagccctaagttccactggccaggcaattgatctgctatattggcgttgtttaaggctacatcgttttgctctcttggattgctttggtttggttggtatacttgtctatccgacatttcaattctatctttaattgcattgtgtctagagaggcatcgatttagttgggattatctcggtgttgacggtccttaaatcataatatctgaccgtcaatacctgcatataatgaactaaaatatggtattcaacttagtggtagggattattattaatcatttccactagtattggtgaaatatgtgtatgcaggtattttaaggagaaaacagacccgtcatgcgacaaaatgaacctccgcacattcaggagtttacatggactggagggcccatatgtcaatgaaaaccatttaggggccaaaacatagtatatgatgttgggggcccattaagctacctcccagccgcctctgggaggagggttttctgagttcggccgaacccattttgtggtcattgatcgtcatcttccacgtgtacgctcctgatcacttcccactggcggttgcggggcatttccgacaattcccatcaatgtaaccatcatttggagcctataaaaggaggagctcactctcatttccaacacacaactttgagctgaactacaagatgctctattgtatcttttgttcattagaataaggtagagagtgaggggaagctctggaggggtgcccggaagaagttttccttctaggagtaattctggaggagtaccggagctgtcgatacactctgctctgggttcggagaaacttcttctgttaagtaagcatttgtgttcatttttatgttatttaattacttagtctaagtaaaatatatttcactctttgcgggttcattgtttagtattcttactaagttctctagtaccaggactccggataaagaaggaagttcatgtacaagtactagagtagtaattaataacttagacgtgatgtctagcttagagattagcttttttaattgtgtatcccatggatttgtcagaggtaggcggcaggtggcgacagccctgaatcccgtcccagtaatcctccacgtttggatacatcatagagctatagccggaactacgctggcagaccagtaggggtcggtgcccgaagcaacagataggaaattacctttaacttagcgtagataattaaaatacatagaaagtcatctctagcctagctagcctacctatagttgttgtccttagatagtcttagtcttaggtagattacacacattctttgagtttgatatccttttggagtcatccgaaggtgaactgctatagcggtattccgtgcgcttgcggatttatctgtggtcataagaaataccaacaagcatttctggcgccgttgccggggaacggttgctaatttgttcgagtctaggtcatcctcgtatctttatttttatttcttcttctcttatttctttccttgatggagcaacccacaattcaaaccctttctgctccttgggctgatctttgtgagccgtcctgttcttcaaaaccaatcctttcggatggctacgaaatcggtcctggctttatagccatgatttgagagcaaaccttctctggtagtattggtgaaaacccgtacttccatcttcgggactttgagctagtgtgttcatgtctatccatcataggcatgacacatggaactctcaagtggaagttgtttcctttttctcatagagataaagcgaagcaatggtacattatttctgtcaataatgtgaatggtacattaaattccacggtgaatgggaggagctaaagtgcaaattctgccttgctttctttccattaacccgtgtaattaatcttcgattagacatcctctctttccgacagaatgagaaggaatctctcggtttagcctgggccagattctcattgttaactcaatctggcccagacttgtctttaccagaccatgtgttgttataacattttcggtacgggttagacaaggagtctgccgcaaatctctgtatttccgccgcaggatcgttcgcacacaagagaaccgccgaaggaagagaactcctagatctcatcttagagagcgattctttctgccgcagcgaagtcgtcctggaggtcgagattacccatgaggaacgtctgcacgtggagtcggaacccgactcaactgtcgaatcctcattccagttgctggagccggaagaagaagaaattcatcctccgaaaattccattctaattcagggataatctttatgaagatcatggaaacaccctgaattattccagcaatacaaaggctcatcccaagcatgagccgttcgagggggtgatgtttgtatcttcgtttgtttcttctgaacctattgtccgtcttcatgaaactgaacgacccttatcaccttcgatcaagcctaaccttgtccctctggccctcagaacgttgttcttgtttatcatcaagacataacccagttcttgcacgatgcatctcttgagaaggaaaaccttcaggccgcggataagcttgagacatcgactctggaggacgagagaaaacattccacatatgagcatgagagtttctctttcaaaatcccccaggattcatgctcacataaagaatccccagagtcctgtttggttagtaccacttccctgtgcgaggaccactccacctttcggtcctcatttctaacgtgtttagaaggatggttgtggatgcttatatttatcataaatactacaaatatcgtatttgtggcactaatcttgcagcataatgtccccatggtcaagcttgtgaccataaacaaagcactgtggggaggtaacccggattgctatggtaagtttcccttctaataaaagcaagaaccaatttttaggataatatgcaccttcgggtattcttggtcgctaaacattgcaagttgagattaagaacgagagtcatcagatgcctaagaacacggtagctacatcaattacacactttggtgatccttggtattggaacaaactctataggagactccaacattacacacttggtttttgatgtcttgtgacacacaagtccaagtgtgggggtgaatgtcgatgagcttgtcataacgagttccatcaaccaaggccaccttggtttgaagttggggttagtcctagcttgataaaaaaaagaaaaaaaagaaaaaaaaagaggagaaatgagagacggaaggagaaaaaaaaagatgggagaagaggaagagagctgatgagctatatctatctacacccagtccctctcttgagctcatgtgccgccttggctaagcctttatccactcctagccatgcgcaatttctcgctcccgcagcacatacgggcatacaagcaggaggagattcttcttcatttctaggcgtttgcgtttgctgccccactctagttgacacttgcacatttgctcgaaaagagatgcatcctacgcattgtgccaacggatcatgccttcaagaaacaaggttcttgcacacgagctgtgtgcataactagaccgctcgctggagttggagtgatcaaagtgccttcctccactacaatccgcattgagatggaggagaaatcgacaatcatatgtgaccatgccactgccccagagatttcaaaatatccatcatgctggcggtaagtacactcaggtatgcgaaagataaaacaaggttcaccaaacctttactcaatagtaccaccatgtgaatatggcttgatcatacatgattatgtttcctttgtctattttcatatactcaggtttgggtgttttcgtgagacatcgataggctttttaaattaagcatggtgcttaggttaaactagtctgctttaatcgaattagacatggagtcgagtttgattaatgaactcttagagttaatatgttcatggacattagatatatatcttccatagactaacccctttaggaaagttttcaaattcattggtaattcgtcaagttcaattcacactggaggaaagtcaggctcgggaaacaaatcagtaaattgctacatgtaaaggatgaacacagtgcacgataagtatattgtcaaatgttcctttgtcatgttcgtgcaattttatcttaagccttgtatgagttttgcttaaacgaaaatttggtgaataataaaaattttgaaaaaaaatgtgtttttagaataaaaaagagagtgtctcttgaaaaataaaataaaaagttgacaaacttatgggatccacgcttcttaagttttgaatccaatttccttttagcgtggatgtgaacaactaaactcgaggctacgataaaatctttgcaattcttatagtccctcgggtatttcttgttcactaaccttttgcagataataaaatgacaatcaaggagcagtgtacaataacttcaaacacttatatcacgctccttggtccatgggaaagagatgcacagggaaccaaacagaacaaatgcaaaacattttacattcagttgaggtttaagcttggtaaatatctatctggtaagaatcttcaacaccttgtgcatcctcatccaatgttttcattctgccatgatacccaccatatccatcgttcccataaaaaaagagacaaaataaaacaaaataaatgtggttccttggtcttccaaccaagtgagtcatttttgctttactcgtgtctttgtttttctttttgtgtccaataaagagtcccaagtacaaaaacaagtgtgggggtgatcttgcacatcaatgccgtaaccaaagcaagatcaccccaaaagtgatgagccatgacaaaccacacaaggggaattgatgtagtcagatccaatgaggggtcaaccaaacctccagttcggctgaaccacctctaccatgaatcgtcttctgtttcatacagagcgcaggtttgcacaatttttcctttggacatccattctatcctgagttcaatttgattatcaattctaaaatattgaagataattgaactcaagctagggacagtacaattagagtttatggtctccctgaaaataacatgcatgcctattattcttagctcgttacttgttgcttgtggtgacatatccaatagggaccccatgttatctaggtaattgatgaatgagatatagtctgatgatagaaatcctactctttatattgcacacttgggaattttatgaaaaggaaaaaaatatataacgatgctaaactcctcattgatatttttattcccattagagccataggttgatcattcatgattagcttgctatatacgctgcttgtcattacattgagcattgtcaagttttgtgactcgtgcgaaatgcttttcatactttcatggtcaagatcgcatacactccacatacatgtacctatgcttgacttctacactggaagttagtattcttcatttgtcattcatttcatccatcatccacaaaataaatacttcatgtcatttatgcctcttcctccaaagttcttttaaaaaaaacaagagagagagagagaggggcatggctatgaataaaaaaatgctcatacaagtatggagcatgatgatgaaaaaaagagaaaaagaaaaaaaaagagatagccatgcactctcccaaatttcaaaagagaaaataaatggaggagatatacaaaaggagttattgttattagtatttccccttttccacccacaaatttaccatacacatacacatgcacattcttgacggccagaaagtatgtcttgtatttccgtggatccattatttgacttttgcaatatatgtgatacaagtaatgctctactcttttccacaccctgagctccacataaacattattagatagtaggaaaagaaaaggcacaatcatatgcctttgtgaggaatcatacacttagagcgatcgagagaatcaatggaggagcacggcaaagttataattttgtgttacttgaaaaaccccaattcgttcttcatgaaaagttaaggtgacttgagtcaagattttttcatttctcaattgcccagtatcgcatggtagacactagaaagacccacaagtacatgtatggctttgaataatttgtttgcatgattattagtaaggaagtcataactctattgtagagtccatagccttcactccggacgagcaaaggttaagtgtgtgggtgttttgacggtccttaaatcataatatctgactgtcaataccttcatataatgaactaaaatatggtatccaacttagtggtagggattattactaatcatttccactagtgttggtgaaatatgtgtatgcaggtattttaaggagaaaacagactcgtcatgcgacaaaatgaacctttgcacattccggacgtgtttacactgattggagggcccatatgtcaatgaaaactgcttagaattgggccaaaacatagtatatgatgttgggggcccattaagctacctcccagccgaagaggcggccgggaggagggttttccggttcggccgaaccaccagttcggctgaacccattttatggccgttgatcgccatcttccacgtgtacgctcctgatcacttcccaatggctgttgtggggcatttccgacaattcccatcaatgtaaccttcatttggagcctataaaaggaggagctcactctcatttccaacacacaactttgagctgaattacaagaggctctattgtatcttttgtgcattagaataagagtaaattgcatcactggtacacgaacttattaggtgggtgcaatctagtgcacgaacttgttaaatgctcgttttggtgcatgaacttgtctggtgtgtgtggagaaaggcgaaaagaatactatatggctaatcttattgatttaggggccgattaggatactatgtaaacatatatctgagaaggtttctattagacatacacctctttagtaaaaatagaatggatatactgatcgtagaaaaagattaaagaaaccgagcaatgatataagggttagaaatatatgaaattcatcgtttccatggtgaaggataaagtagagatcaaatttataaatattgcatgtcttatgcatactcactacacgtctgtatgtcacatcctaatcaacatctgcttcataaaattaacattgccaagctattttagtctcattcgcacaaactagacaagttcgtgtgccgaaacgagcattttacaagtttatgtactaaataagctctggaggggtgcccggaagtttggcgctccctccaacttctttctcgacgagtgtagctttctaggaggaattctggaggagtaccggagctgtcggtacactctgctccgggttcggagaaacttctattaagtaagcattcgtgttcctttcttatgttatttaattacttagtctaaataagatatatttcccctttgcgggttcattgtttagtattcgtactaagtgctctagtactaggactctaaataaagaaggaagttcctgtacaagtactatagtagtaattaataacttagatgtggtgtctaggttagagattacctttgtttgttgtgtaacccacggatttgttagaggtaggcggcaggtggtgacagccctgaatctcatcccagtaatcctccatgttcggatacatcataaagctatagctgaaaccacactggcagactagcaggggtcggtgcccgaagcagcagataggaaattacctttaacttagcgtagataattaaaacacatagaaagtcttctctagcctagctagcaaagtagcagataggaaattacctttaacttagcgtagataattaaaacacatagaaagtcttctctagcctagctagcaacctatagttattgtccttggatagtcttagccttaggtagattacacatgttccctgagttcaatatccttttggggtcatccgaaggtgaagtgctatagcggtattccatgcgctttcggatttatctatagtcataagaaataccaacactcggttaggtccgatcatctatcttagtcaatatacctatacaatcacaatgttgtttagatacatttgttatatccatcactttatacatgatttatcgacattattgggtttactcgttgctataaacttaatgctgtatcggtttagtctgatctagccaggtaactcatgtatactgttttatcggtgtgctagtcgataagttatctttacaacggattttccagccaatgtatgctttaaccatggagcttacatttaatattttgtatcaatatcggccgattggttcattagacatctacttcatcatattatcatcggccgattggattgtttgttcaagttcttccattgtatttatctaagtgtcagaatctacatcgactagtgtcgacattggctattatcgctacatcggcttattggccgatcggctctatgatcatcaatttatttatctaactgacacgctcgcatctcatcaaaaattaggacctgcactgaagctaaacagatttcccaggccttcgtgtttttggcatcaacagtgcctgaagcatttggtagagttttagctttaacttaagttagctagttgaatccataggaatcctctctagcctatcctatcattagttgttgtccttggttgaatcccattcttatatatacacgcatgttccttgcaattcaatacccttagaatactctgaggtgaagtgctacagtgatatacgtgcgcttgcggatttatatgtgactgtatcaagtaccaataaggagacagcnnnnnnnnnnnnnnnnnnnnnnnnnnnttaagccctcggcaggcacacgaccgagccacccgacgcgtcgtcgccacacggcaccgatgctcgcgcttcgccgctgcacggccacgtgctcaccgttaccacatggccgcaccgcacagccctgtcgtgacatcctgtccatccaccgtccgtccaccccgccgcatggctgcgccgcgcattatttggccacgctaccggctctgcaccactctagccgctgcgcctccccggccatgtgtcgagtcaacaggaagaagaagaaaaggaaagagaaccggaaaagaaaggaaagaaaggggaaaaaatgaaagaatcttctggttttgcaaaaaggtcgtggcagttttgggaaattaagcgcatatttttcagcagtggaaattttgcgattaaaacccaagagctttatgaaaatgtatatacaccctagaaatttgcaaaatcaatgaaaaagcatattatcgcataatagagccacgtgattttgaatttgatcccgaccttgcaagttgaggcacttttattgttgatgtttatgattaagaaatttatttattgtatttatgattattgattatttgtaatgcttttattacctttaattaatatttttaaggtaaaatgtatagatttgcatagaatatattggaattatttgcgggaattgatgtcgtaggctctccagatcttccattatatttcagagatgaagtgaataaatcaattcatcaaacaagcataataaagtatttgatgcctcaagagaagaatattagagacattgctgggcctttagcctaccagtcaacttcagcctgagatgtgctcgtcaaaccactcgaaggcggcgaccagatgtgttacacattcagtagacttgacaaaatggctaaagatctacaacatgtcaaatattcttaactcatactcatgtgaatctagttcccaggatgtgcactagattcacactttcatcttaagcatggaaatacatagcaagatacatttaagacgaaagtgatcacaaattacaactacttaatagatacatgggccgaccgaccaaatatagatatatcagagaacagcggaagcttgactacccaaacacaagcacaccgactaggggtttacccccaataagttcaagtcctagaagaagcagtcgaaaaacccgcattactcaacttaatctaaacatacaacctgcacaaatagatatttcaacatagcaggagtcagtacattatttctattcaaaggagcgcaatatgcagttcaattttagcataaatcaagttttgtttcacaatacttttgtaaaggagttgatgattcaattaatcaaaacatttttgtaagttcataataaatatcattatatcatcataagcatactcttgttgtcttccttgacaacaagtcatataatcatcatcacactcacacaactcaatacatttcacccattccaaatccaagtttcataacacattttaaaacataagtctatactcatgacactttaccaagcactcatgaccgtgagcatggctaattgattagtttttagactctgcagagtttgtatagctttatccacatgaggtgaatcgctctagtttgtctggtagccatcggtaccaccacactttacatattgagtgggtttacaggtcacaacgaggcttttacattaagtattgtataatccttgcataagcatgatgactgttgtttcacactaagttgtcacagcctgattttccgtatcaggatttataaattatttaataaattattaatagaatttatattaaatgttcattaatttacaagtgaagttaaatgtgggaaataaaatttcctaaatgttgtcgaatggacaacaatgccacatcgaaaggcgtgattctctcaacagtagttggaatgtaaaagcaattgtattgattcgtaaatttttttggggatccccccattacatggccctagaggtctatttatagccttagcacaagcctggaccttctagggtttagggttacagaggatttaacatggttgcccttatgaaacggacatttacatgggtatgcagtgtcatttgcacatatgggcctttaatgggctgataggctgctggtctatagcaaacaggcctaaaaggccgggggcggcctgttgggcctccttgatgccgaacttgtcatggcaaagtctttgtagttcgcccgagatgccttcgcccgagatgcctttactttcggagtaccgatgcggctttccagccttcgccatcttcgcttattgctttcaccataaggcttgcctgaatggtcttgacggctttggcttgaatccttgctggtactatggtttcggcaggtccggccgaagggcttcatggcatgcctccaacaagcccctcacgggcaagggtgagtaaggagcttcggccgagaccgtgcaaactatacggtatggcttgaggctccccctttcggccgatgttcctgtcgaaacctctttttagactcctgcagaaaaaatatgaacactggtgttcgcctttcgagaatggtgaagctgtattatgacactgggtgattatattttccaagtttgtctgctttgcgtgattcttaacttgtattttttttctttcccttttttccctattgttttagcggggatttcgccgaaagtcatgtgttcggccccctttcggggattggcgaaaagatttgttgacttttcagctttcgacttccattttcgactcgtagcattttgcgctgggaaaaacgcttatgttttgcgtaagttgaatgtaacggtgtttggtatctttattccgaaacaagctgtcgcggtttcaaagttcggcgagcgatgcttctgccgattcgtttcgccccccctggtgttttcatcgatcaagcgttcgccttttatgtagctatgtggttgtcaaaatggcgaattggaggtgaagacatcctggtcgaaccttagaggattacgaccggtgccacatccagcgccgcgatgacattgccacactttggttagacttcgaaatgactaatcgtcaagctgctttcgcttgacgtcggtgtgtatttcgcctccttccccccttaaagtcgtgtatagtatagatgacgaaccgtgttcgccggacttagtaggggcgaggcgaaaatgttctgaaacggatgatgtaattttttgctcctttgtgtaacacgtatgtgcttttgcctgatggagcttgtgcgtgtttttatgtttcttttcgctatcatcgcatttggtaacttgtatgttcggaagggcgaagcatgtcggcccccttgcgtattagcgaaaggaattcacattgacttttcagccctcatcattcactctcgacttttggcatatgcgtccagaaacgcttaagtatttgcataagtcaagtgtagcgatgatcggtatgttttccaaaaacgagctgtcgcggtttcaacgttcggcgagttgtgcttcggccgattcgtatcgcccccgtggcgtttttgtcgatcaaacgtttaccttggggtttttccaaaaatatcatacacaaaaaaggcgaagacacccatgaattttatatgactgagcgtcagtttgcaattgcccagcctcgacgcagcataatcctcgtttttccttcttcaccgctttaaattttttttgtgttgatctaacaactagcgatgaagaagatgctcaagggggtagtcctttgccattgaggactgcttttgctgatgaatcggatgtaaagtccgaatccattttggcgggcaatggaatttatctgtaacttgtgctttttggcaaataaatggggtgtggtgcgtgttgcggctgttcggctcgtactttcccctttttgcctttggcaaaggtatttttaggtactttaatcgttttgaccgttgccgcctttcggtctttttagtactttgacctttttaactgttaccggctttcggtcttttctttagtgctgctagggttttgcctttcatccctttcggctgccccgtttgtctacgggtgtgcaaccgatgcgaactcgatttcaagttttagcccctcgcacatttcattggacttctcggagtcaaaccgcttgttattgccggtaatgaactctttcggaacactgaatcggcagaaaatgtttttccgaacagatttttacactagtgccgaaggtactgccttagcccatcgaaggcggcttgacactcaggtgtccaattgagtttgccggccccttggaccatcttgaaaaatgataaatctctttcggctactcttgggagcaactccttatctcattttcgcccccagcccttgtcgccgtaactcgctggtactgtggcgaagggcgtgggtgtggcgaaacctgttcgcctacagcccttgatgccataccttattggcattatggcgaagggcgtgggtgtggcgaaaccacttcgcccgcagccctttacgccgtgcctcattagcactatggcgaagggcgtgggtgggcgaaacctcttcgcccgctgcccctgacgccgtaccttattggcactatggcgaaagacgtgggtgggcgaaacctgttcgcccgcagcccttgatgccgtaccttattggtactatggcgaagggcttggcatgtggcgaaacctcttcgcccgtaacccttgacgccgtgccttatgggcactatggcgaagggcgtgggtgtggcgaaacctcttcgcccacagcccttgacgccgtaccttattggtactatggcgaagggcgtgggtgtggcgaaacctcttcgcccgcagcccttggcaccgtaccttattggtaccatggcaaagggcgtgggtgggcgaaacctcttcgcccgcagcccctgacgccgtaccttattggcactatggcgaaaggcgtgggtgggcgaaacctgttcgcccgcagcccttgacgtcgtaccttattggtactctggcgaagggcgtggcgtgtagcgaaaggtgtccagaggcttgggcggcttcgtagccccccagcttggacttaacatactttcgcccccagcccttgtcgccgtacctcgcgggtactgtggcgaagggtgtgagtgtggcgaaaggtgtccagaggcttgggcggcctcatagcccccccagcttggacttaactcactttcgcccccag

SEQ ID NO: 5137 - DNA, 4336 bp, Oryza sativa
caactggggtataaagcaaacgtcttctccttctggatcctttatcttcaactgaggtttgatgattattgcaagaatgagcatatgacatactcaacaagccacacagcaaatatgcaagtgcacaaggattccaaaggatggcataatataggctcatttgcgaaagcagcatttagcaaagagttaagagtagtaaaacagtagattaattaatcagaagttttaatcaacactgaacagcacacccatgctgtacaggcccaaccatcctgaacaaccatacccggctgaacagatctaactccaaaccaggagctaagcaaattattaccagttattacatccataattattgtgaaaggtgtgagactaatcacgaaaaacattgctcaacccgcccataaccgcgggcacggctattcgaatagttttactctggccagaggtgtaccactgtacccacaagacacgattccacacatgttgccatgccccgaaataccaccacggcattgcaaagggggaaatcgtgacaataccctttgcacaacacaactcaaaacagtgcaccgttcctggatcataatcaaccccttataaacaaggcatggactccccagcgacccccgtggacttctcgccacttctcagtctggcgcactataatgaaccatgctatacaaaggataaagccgttgcccacgctggcttgtggttggtacggttaatgtctcacaacagtagctcgcgaaccggtccttaattgtcatgagcacaaccatcaaaaccatatgctcacaacccaccttaaccaggttttaattatcaattaattaacatcacacgattaaccatcgtgagctaccattaaatataaccataaataataatgtagtatatatgattcatcccattagtgagctaatgtttctaagcattgctaagcaattatatatataacttttagctgaaccaaaccaatacataaggttcaagctaatcaatttattacccaaggtatcaaggaatagggcattcaatgcaaattggccataacaaaggaataggttcacaccacccggtgacattcgaaaataaatgcacagttgaaataaatagagaatttaaatataggatcaacatgctcaaaggattgtgtttaggatctgtgtgacttgccttgcaataatcgatcttcaattaaccttcttgatcacttccgacgcactcacgaaccttcgcaacgacggaaacgacaagctaacacgcaaaacgaagaaaaagactaataaaaaccaaataaacagtacataaaaagtaaaaaaacatgtagatcataattttagatgaattatgagacttgaacggcctcattccgacttcaaatgaatttattatgaattttacaagattaaatctaattaaagtccatttaaaaagacttaaataaatttaattcaatttatggacaattttaatatgtagatctttattttagaaaaatttagcaacttgaaccacctgaaacggatctatggttatttagttatgattttccgaagatttcatctattagaaaaaaggaaaaaaaaagaaaggatgatgatgtcagcatgacatcacccacggaggccggctagggttggcgacctcgccggagctagggaccttggccgggtgattggaggacacctacgcgtagaggacgacgaggcgaacccaacggtactcaccacaacgacaaacgacgaacgatgatggccggcgacgaagaggacggcggcggcggctcggcttgacggcgacggcggagctccggtggtcggcggcgaagggggacgggcggccgaggttctcctcaccacggcgcacctaacggcggcggcggcaagcggcggcgacgacgcaagcgacggcgcggcgtggctgaagacggccggcggcggcggcgaactaagtgcgcgcggcggcgactctacggagcacgggagaccacgggagatggggcaaacgaaagaggggaactagggggtcctatttatagccttggattgaagagatcggactcctcccgcaagaaatcgatccgagaaaatcaaaactcggttttggagataaactcgaaaacgagtttgattcgggcaagatactcaaccatttgctccgattattgaggggaaagatagaggaggacgagaggataaaatcccctcaaaaacccggaagaaaaagagccggattggagcggatttgagggagaaaaggggcggctcgggcgacggcttgggctcggccggccggctgctagaggaagaagaagggcctgacatgtgggccccacatgtcggtgcctagagggaaagggtttttgaactttttcaattaaaaaataattcgtgaaatgatgtttcatttattaaaaatacttcccttgctcaaacaattcccagaaaattctagaaaatagaggaacaagcaaagtatttaataaaattttatctaacccaattttatattgagatttagcacattaaaattagatcttctcttttaagcttttaaaatcatttctaataattccttttaaacaacaatttataatttaaggattttaaacaagaaaagcacttaacaattataattagatcattattgatcaaataattactgaactgttctctgtatcatttacatttaggaattgagctccgaaaaatccgagaaaattccagagagtataattaaccatggagaatttaataaaaattaaatccacccatgctttatatttaggaaattttatttcccacatttaacttcacttgtaaattaatgaacatttcatataaattctattaataatttattaaataatttataaatcctaacacgaaaatcagggtgtgacaaatctaccccccttacaaagaatctcgtcccgagattcggaacggctagaaagaaaaaggaaataggtaaactgcagtctatcttattccataactccgataattattctgaggctttaaagaaaactactgccgctttgaaactggtggctgagttgtaacacttgaagacacaactcttgaagacgcaactggcactgcattggctcctgtgacgacaatgttgttgacttgaccttgcggctgctgacgcttcggcttcggacactctcttgcaaagtgacctggcttgtaacatttgaaacacacccgctgttcccttgctggttctgcatttgttgcactaacatgttgatcaattgggtctgttgagccagcacttgagcaagggttgggttctcttcattgttattgtttccacttccactagcgtgagtgttcaccatctgttgcagattagaaaggatagaaggagaggggttacactaaagataagaccttaaccaggttaacactgatctgatgtgtgtagaccattatattgttcaagttgattaagcaagcaacctagtatagtcacacactcatcaatgaacttctccaatgatgggaatgcaaccatacctacacacaaagcaaacaacaaacgttctaccctactaactattcttcaaaattactttggcggtataggtgctaagacaggatccaaacttcattccatcttgaccacttggcacttcagttcttcctcgatccactttacttaacctccttaagtagacctcattggtgtcttcaagtttcaaccactagtttcagaactactcaagttgaacgagagaagagagtagacaatgaaacaatttgcaaagagttctagataaggaagaaaggaaaattttcacaaattatgttttcggaaaaatagtccttaaggtttgaccatttggcttatcctacagtcgagatggctctgataccaacttgtcacgcccggaaattcactaataatttccgaactaatttgtgcatgaaatcctcgtccaggaatcagccgaggtacacaaactgacaatttaatatacaaatccatcataataataacgttacatacttacaaaagaaaagaaaaacagcagcggaattaacggtctagcgatggcttcagctccactcccataggcagctcaactggggtataagccaaacgtcttctccttctggatcctttatcttcaactgaggtttgatgattattgcaagaatgagcatatgacatactcaacaagccacacagcaaatatgcaagtgcacaaggattccaaaggatggcataatataggctcatttgcgaaagcagcatttagcaaagagttaagagtagtaaaacagtagattaattaatcagaagtttaatcaac

SEQ ID NO: 5138 - DNA, 20075 bp, Oryza sativa
  unsure (1)..(20075): unsure at all n locations
ctatattgcaaatgctctattgttttccttcaaatactgcatcgttttataatgttactatgggatgtttacctattgtcatagccatgctattgttgtaccatgtccctttgtcagcttggggtcataacatgactagagattggactagggattgcttagccatgcttagttcaactagttcacaatggggaaaatcctattaatgtttagactgttggttctaatggttttgttggattagtgccaccgctttggtgttggttaattaaaataaatcacatggtgggctgtgggtgcatggttttgctggtcgcacccatggcagttaaggaccggttcgcgggatgccctggaagaacctatcgtacttaccacaagccagcgtgggcaacggctgggcttgtagtgtagctctcctctagtcgacgcatccaggcaagggtgggcgtgatggagcggggcgggccctgcgacggcctctgtcgcttccggattcacctaggcacgagaggggactgcccgctgccttgcgaggagtgggggtgaaacctgaggtgtggtgtgcttagttagagggggttatacgaagggtcctgtcacggcctctttccggtatgtcgtggtggcatgtcggcgcacggaaacgtgtcgtggggctgtgtcttgtgggtacagttgtacacctctgatcagaataaaactattcgaatagccgtgcccgcggttatgggcggtaaaccagtttcaccgtgattagtcttaccctagtgtaatcttttgaaattggatagtttaggtggatggttgggcctgttgcaacgtgggatagcgttggacagtggatagttaatattaattaattattacaactgtttaaatctttcaacttctgtttataaatgctcgctttatgcaaatgaaccactccagctcttctttgataattccctgcatcatacccctattccggtatgacttgctgagtacagtgggtagtactcagtcttgctctattttttcccaaccccagagctcaagtatgtgtcagatgaaggtttctccgaggagtaggcttcgtccgtgccgtcgaggatgcctgtggagtggtgttcccgctgcagttctagtcaaggcttagctcctgttgtctttcttttcttccgctgcatttgtgtaagacttttatgatgtttgtaagacgtggatctgaatgtcaacattgtcgtttgtgtaccccggccggtcctggacggggattttaatgcacattctgcttggaattctactcgggaatttttaggcgtgacagcggggagagggccgaaccacccgaacgggtggggtcctccctccgcgagggatcacggcggggaggagttggagagttgcggcggcggtgacgagggtcgtggctctcgctagcatcctcactcccagacggagtgggggtgaacaccaccaccttctccttcaggacctcgaccatgatcgtcgagggtcatgggaaacttgggacggaaggcgacgacttctctttaaagcgcgcgacttccccctacctggcgcgccagctgtcgaggggtgatcctctctagcgggagatcgtgtgacccccccctttcgtgagttcggccgggggaagaagctcgcctctagaaatcgcgtatccgtcccgaaggctcctagctagctcgcagacaaccaaattatacaggttcgggcgctatcaagcgtaataccctactcctgtgtatgggatttagactaagagttacaagggttcttgaactcgggagaacacttttacttccctcctccacaagctcaggttttctgagagtcatcctctttctcggtgggcaaggtcctccttttatacctcaaggggataccacatgcacccgctctacctactcttctataaagtggggacccaccttatcttgactggaactcgaccgtgccttcacctggaagctaaaaccacagcttgtcctttagcggggcccagtgtcgtccctcgcctgacacgaaggacagccctgtcattccctcattaataggtgaagacttgtggtggccgccgtccgaatgagcccccgatgggacgggtcatacctacctccactccgccggaagcagatgcgacgtgggagcacggttgtccgtccagtcagacgtgaccggcgtcaggccggtcatagaccggtcattcttgaccatcgcgcgtcagtttagcacgccgcacatctgccccactgcattaaatgcgacagggggcagttggggcgctgcgcgtattaaaggaagtttagcctaggcccccctcctcgcttgctccccccgccaaacggcggctgggcgagggcctcagggcaaagtagtgcaagggcccgaggggcatgacgtggcaccccgaggccctgaccccccggccgctcctgcggttcgcggaatacggggataggaccaggctgtagggcacgtggcatgatgggaaggtagattcccctcactttacatacccccaggcccatatctccgacaggaacgatgtgactaaaaagttgtgtgtgtatgaaaggtttgatgggatggacagttggaagtttggaaaaaaaaaactttggaactaaacagagccataaacttccaactttttttccaaacttccaacttaaaacttccaactttttttaggaactaaacatagccgaaaacggaaacaaacgatctggcgttatatatgggggcttgcaagcgtgagggtgggatggagttgagattaactcgtatacaaaccgtcttacgtgcgtatcggacaacgacttggatactaatgacgtacgaaagatttagcaaaaacatcttcaattattataatagtagagataaaaaaaattgttcgtacgttgcactatggaaaaatttgtccataacgggttatgacattggctcgcgtggctggctattgcctcatgtttgcttcatcctgttcataaaaatcgatttatcctatatataaatatcggaacatttgaaatcatcggattattaaaaagaaagaaagaaagaaagaaagaaagaaagaaagaagaagaagaagaagaagaagaagaagaagaagaagaagaagaagaagaagatgatgatgatgatgatgatgatgatgatgatgatagtacaattgagcagtgtcgtcgttgtcagctcctgtgagctaggcggcgttgagtgggcggccggctgaccggccggatagtccgttgctcgtacaactaggtactaggtaggtactagctagctactaggtcaagataggtagctagccatcacaggctagcttggagtagctagcagcattcgtcaaccttgggatcgatcaggagtcgtctctgatctcgataggtgacgacattgtgagacagacaaggacatcatttgtgtactgtacgagcaagtttaatagcatagtccattgctagctccaaatcatctgtagtcaatataatagttaattcatactacaatagttgcttactatattattaataactggtccacctgtcatacacacattacgtcttgaagtctgtgctacagctggctacagatagcccgctgcttatctctctcttcctttatctttttaaaatatgtttatagctggcttatagcctgccactgtacctgctctactggtgctcgcgatcatctcgcgttatctccactaactgcaattaattacaaaagaaacacagccgatggatcgatctagttgtaccaggaaatcaactatcagtcgtctctcgcatgatcaagaacataataaaataggagtgaattcaattgacgattaattgggatgccttctcaacactaaaatcaaaaagactaaaatgtcttccacttaatcaaatcctattataattacccccactttatctagttgcaatacatctatttcacatttttacaaacttcaatacaatagttgttgaaaagattaagttattaaaagacctgtttgaatctgatgaagattcagattaaatgcgggcacgtaaaacgagatagctattagcgtataattaattaagttttaattattataaaattaaaaaatagattaatctgatattttagaacaacttccgtatagaaaattttcacacgaaatacaccgtttagtaatttgaaaaacgtgccacaataatttgaatctcatcctctcctttcaggagattcgaacgggaaaagtgtttttttaacggagagaatagttgtagttgcattacaactgtagccagcacaaattaaagtgaagaacttaggtagctagtacaattacgacagctccaattcttcacctcaattagtttcaatagtaaatatactatcaagaaaaagaaaattaaggtgacaaagaattaatgagaagagagagaaaaaagatgattgaagagtccatttcgcatgtaaaagaccactgcctctggttacttatccttttggataaggacacaatcttcaaaaagtaactttagccattattttatattataatatatataaaaatataaaaaatgattttattgaagtgtttttaagactaatctatatatacacatccagttacccatatttctaagataaatattttgaaaattattcatagttaaagattttaaagttcgacatcacccttatccaaaatggcaggtattatcagtccggaggattagttttacacataaaccaataatgaaaaaagggaataggtggataatgggatgtttagattcaggggtgtaaagttttagcgtgtcacatcgaatattatatagggtgtcttatggggtgttcaggcactaataaaaaaactaattacagaatccgtcaataaaccgcgagataaatttattaagcttaattaatctgtcattagcaaatgtttactgtagcaccatattgtcgaatcatagagcaattgggcttaaaagattcatctcgcaaattagtcgcaatatgtgcaattattttttttttgcctatatttaatacttcatgcaggtgttcaaatattcgatgtgacggtgtataaaattttggttgatttgacaagccctaaagggagagagatcacagatgattagatgaatttattttgaagaaactagtggcggagcttgaaggaaaaataagaggggacttttattttaagctggggctattattgtcgacgtttgatgtctcgactacggtatttggacagtatggggatcgtcggtgctaggatatacgcgagactgaggtaaaagagatgaagacatggatttttatacaggttcgggcccctgagctatcaggtaatacccctacatcctgttggccggagccgatgttgctttttattcaccataatcacaccagtataatatgtggggtagcctatctaactgttgtcgacatggcggtctgaaggtctgactcgtagtcaacaacagggtagccttcctcctcgagctcgcgcccgacggaatcagagacagtgctagatccctacggccggcctctgaaggtcccggatagggtcgatccaggcgtatctctgatgtcgatatccggcggcttgtcttggcgtatgtaggcttctatgttgattgtgttgggagttgattgtctcgtggtgggcgtgtgtgtccccctgtcctcctagggaggcttgtatttatacccataggtgtccccttgtctaagtagaactagggaaactaatatggatacaatccgagtagtccttgtcgtttccatgtagaactctggttgtctttccttatccggaactccctcctatatccgtaggttgtttccgtataggacatggtatgtggtgggtcctgccgagattgagtcaactactattaggtatgtggtatccataaccatgacagtagcccctgactttaatgcaaatgaacgaattcatattctcaatcacgcgcagactttggaataactattatcgagctcatgtgaacgttttcggtgagttcagagataacgttagacttcctttgtcagcctcgtgcgggcaccgaaagggtttgtctaagtcaatctctgatgtcgaccgagaaagtatagagcgtacgactaagtctcctgtcttgctgtaatagaaaatttggattgaagtcaagaaattttatctcggcgggtacaccatctcttcattccgtattccttatcgagattcaccaaccgttctcgagtgattgagaaggcgcagaatctacgacggagccttgtcaacatttgtcgtactcgccttagtcgatcttggtgtagaaccatagagacatggagtcttcgtcaatgtcgaatagaattttcctgaaatcaacactcaaaaaagaatatcagatagaaatagcccccgagcgaacgctcaaagggtgacatgttataatatatatggaaactaaaaatgaaataaatttacagaccaatgttttgtgtatgagcgtcttctctcttaccgacttcgatcagtcaatttgtagagtcatacactctccctagcccccagccttgtcgtcggagaatcgttctcgaaggataaggctcttggacccttgacctgcgttggttgaataagcactgatcctagcccccagccgtgaagttggaaagttaatttccgattacacggcttggttaatacgcacggcgagaactcttacatgaccagatcttacatggtctttcgtctctacaggatccgacaaggccttatcggctctaggcgtccccagccgaagatcccttaggttcctcggaggccttgtcaagacggcgtaaagggacagtaggataggtttcagcgctaggtgtcatctgggtaagggatctctgggtaaaacccttggcgatcttgtgtacctgacatcaactttgttgaagtaggggtaatgggagaatcgctacatcgctggtcgaggactaggcagtagtcgtaactcgaccacttgaagtggaaatagtgggagaaacgctacatcgctagtcgaggaccaggcagtagtcataactcgaccacttaaagtggaagtagccggagaaacgctacatcgctggtcggggaccaggcagtagtcgtaactcgaccactgaaagtagaagtagtgggagaaacgctacgccgctggtcgaggaccaggcagtagtcgtaactcgaccacttaaagtgaggcgagagagatcattacattttactggttcgagaaccaggagtaggagtctcttaattacctataggggcgttaaagttggtttattatatgtgcatattatgtggccagcatgactcacatacccaacttatagcatatccggatgtccgttcgcaatcatgtcgggtgatcaagccgacggcgttagcgaggaattatccgttaacaaacttttctcgagtagtccagcgatggccggagctatgagataggtcgtcggtcttcgttggtaggttgggcgcgacgactctgcatttgtcgagatcgttctcgataatgcggtgtactcgactacaacctactcgagtgctcaattgtttctgaaaattattttctagaagacaagatatatagcaggggatatcgagtatgtactcaaaaactgcgtggatcttctagtattatcaggatataacgagcagattaaatatcaggcattatgtaacccgtaaacaagcatgatttatacagaagagaacagagcgagcccccagcgttagaccgtagttggtttaacgtcggaaacatccgcgcaatagatattgtataaaaaacatgctctaggtaaacataataaattatagatctgacaatattgtatgatctgaataggtacgataaattgcatataaaatattgcgtacctttgtagatacatgccggctgtatctacgaaattagtagatcaatttgaaaaaccaatctaccaattaccttattgtgtactcgttggacataatatgatctgacatattttggtacgccgcgtatcttgaggcttggatgatctcgatagaccaagttgtcgatgacgatgatggttccgatctggtcggaagatgtacttcagttgggttagatctcctcacagccgaagtcatcgagtagcttgttgtcggagagtccatatcttaaacgcatctcgtcgaaatcctgaagcaccaaaatccccctacctgtcgcgccactgtcgacgtttgatgtctcgactacggtatttggacagtatgtggatcatcggtgctaggatatacgcgagactgaggtaaaagagatgaagacatggatttttatacaggttcgggcccctgagctatcaggtaatagccctacatcttgttggccggagccgatgttgctttttattcaccataatcacaccagtacaatatgtagggtagcctatctaactgttgtcgacatggcggtctgaaggtctgactcgtagtcgacaacagggtagccttcctcctcgagctcgcacccgacggaatcagagacagtgctagatccctacggccggcctctgaaggtaccagatagggtcgatccaggcgtatctctgatgtcgatatccggcggcttgtcttggtgtatgtaggcttctatgttgattgtgttgggagttgattgtctcgtggtgggcgtgtgtgtccccctgtcctcctagggaggcttgtatttatacccataggtgtccccttgtccaagtagaactagggaaatcaatatggatacaatccgagtagtccttgtcgtttccatgtagaactctggttgtctttccttatccggaactccctcctatatccgtaggttgtttccgtataggacattgacggagcgtggggctcctcaccgggagaccgcgcgggcccccctttgccggttcggccgggggcgctgggtgaggttctaagcccttgatctgtggaatggttcgcgagagagcaaatgcgcaagacacgggcgatgtagacaggttcgggccgctgagaagcgtaataccctactcctgtgttctggtggatctgtgtatgaaggagttacaaagagctggagagcaagagagttcaaactctagagaccctctcactcctcttttctccagtcccccctcttggtaggcatggtcctccttttatatctcaaggggataccacatacaccatttctacctacccttcttttgggtggggacccatcctactttgaccaaaacttggctcgtaccttcgcctgacaccgggataaccctgtcctccctcattaatgggcggagatttgcaatggctgctgtccgaatgagcctccgatgggatgggtcataccaacctccactccgccggaagcaggtgcaacgtggaagcacggttgtttgctgatgacgtgaccggcgtcagaccagtcacaaaccggtcattcttgtctaccacgtgtcagtttagcatgccacacgtcagcccttcttcataaaatgacttccttgtaatggttgcgatgaagcctggtatgaatctagccgggaccgacgtgctaactccaggagttcccacgccggctccatctagggacaagtgcctagaggctctcatcattccgacgggacggggcgaggcgtgcgaaaggccgcctgttgccacctaactcgcgatctgaccggtctgtgaccggtcacacactgtgacctgtcacggaccgaacgagtgtgctgcgctgcattaaatgcggcgtggggcgctcgtccaacccgcaataaacgcggttaggtgagcgccgctgtgctcacctaacccacacacgtggcgccaaaccctcagggggtcggggcgccccagccctcggggacgaaacgggagcggcccgacccctcggggagatagagggaggggcggtctcatcaccctcgggcccgacccccccgagggggtcaggccacgtgggtgaccgcggctgccccaaacctctagtcaagatatccccggtcccatgtcaccgacagtagcccccggggttatgccagggcgatcaccctcctcgaggaaaacgctcgggcgtgacgccactcctcaggcctggtgacaggtggggccggtctctaaaagcggacaggaatccagtggtcgcaaatcgcgcgcatcggcaagggaaaaaccgaccgacaataatgagcggctttcttcaagaccgctacattactcgagtagcgcgcgaattgggacgagccggttcgtttcgcctggagatgtgatgatggtgcatcggtcggcgagcgtagttaacgcgcgcacgatatgtcccatctcgactgccacggccgcacatccgcctcgtgcgccgcaaacgggcgagcgggattagtggaggagttggcgcgagaaacgagggggcgagatagtgggcgcgggaagcgaggagccgggcatagcgtttggcaagggtataaagacgccgaggaagagattcgtttccttcctctcgccattattccccttgccttcgccgcttgcgctctaacttctcgtttcctgtgccctaccctcgccgcactcactcgctctcaaacccctcctccgccggcgttatggcacggggctccgcaccgctcgacggtagcgtgctgctgccttctcgcatcgtgagcgagaggcaggccgggctgccgcgccgattcatgccggaatctgccaccggccgggaggtggttgcgctgggtgagggacgcccggcgccacactacccggggcggtccgtattcttcctttccttcgcaatggcagggctggtcccgccattctcttctttcttcatggatgttctggagctttatgatctccagatggcgcacctcacccccaatgcagtaatgacgttggccatcttcgcgcacctgtgcgagatgttcatcggggtgcgcccatctctctggttgttccggtggttcttcaccgtacagccggtgtcgccaccgtcggtagtcggtggctgctacttccagccgcgggggccggtgctgaaccgctatattccctgcgtccttcgcaagaagtgggatcactggaagagcgactggttctacacccctctcgccgacgaagcgcgcctccgacttccgagccagcccccagcgcaggcctccagctggcgggcgccggtagatctgggagacggctacgacgccgttcttgaccgcctggctggtttgcgatcccaggggctcacgggggccatggtgttcggcgactaccttcgtcgccggatcgcgccgctccagcggcacgcccggggcgcctgggagtacaccgggcccgaggacatcatgaggacccaccaggggcgcaaatgggactgggaccctgaggacttcaggatagtggtccaacgggtgctgaatctcagctccgtggaggcatccctcatccctcaaggggtccttcccctctgctgcgatccagagcgcgccaacatcctgaccatcatgcaggaggtcggggcgtcgggggagcgggccccccgaggccacgatggcgcgggcgggagccgcaggggggaacaatctaccccgggagggggtcgtgcttctgggccccgtgacgggggcccggggggcagccgccctaccgacgcccgggggaagaggaaacaggaggataccccctccccatctcctccccgagggggcggggcggtgcgtgccagcagcaggcgcccgaagggtgctgtgccgacgtcgcagcccgagggggagcgaaaaaagaagcggctccgcaagatgggggggaccgaaccatgccggggaaacctcatctcccccccaaggtggtcgtttagccgacctcctcgcaggttcgtccctgcgcccactgcggccgtattcattctcacatctcccaaggcaagttttcactcacccgtttttcgtcttctggtttttcttctgcctcagcgagatcccgtcgcgcccttcccgccattccaagtccggccggtctgaggccgaggagacggcgaccgcggaggcccggaggcgggaagctgaccggcgagaagccgcaaaccgcctccgggaagccgaggaagctgcccaggaggctgtccgggctcgccaggctgaggaagccgcttgggaggaggccagactccaccgggccgaggagtccgtccgggagacggaggcggcgcgcgcacgccgggcggcctgccaagcccccgacccgactccgcccgaggcgacgacgacttccgaggccacccacgacgaggtcgcgggcgcaccgctcgggcccgacccctcgggcgacgctcaggacgagccagcttcgggggacgtccccgagtccggcacgtcgatcggcgggccgagccgtgcggcatccttaccgaggcggctctcccccatgccttccgctgccccactgagcgctgagccccttctgcaggccttggccaccgcgaacaccacggtgttggacgggttaagtgcccagatggaggtcctgcaggcagagcgggcggagctcgacgcggcgtgggcgcgtgtcgaagaggggcgacgctcggtggaggccatggtggaggcgggccgcaaggcacaccgccggcacgcctcagagctcgaggcccgtcgtagggacctggcggagatcgccagggaggtggaggaggagcgggagactgccctcattgccaccgccgtgtttaacgcggcgcgggacgacctctgcctccaatacgggagccggggggcggagctagagaagaagctcgacgcgtcccggcagcgcgaagaggcccttgaggctcgcgccacggtgctggaggagcgcgcccgcgccctggacacgaaggagagggaactggcgggtcgcgaggccgccgtcgccatccgggaggcaacgctggcggcgcacgaggccgcctgcgccgaagaggagtccgcactccgcctccacgaggacgagctcactgagcgggagcgagctctcgaggaggccgaggccgcggcgcagctgcgggaggagcaggcgcgcctcaatctggaaggcgcccgcgccgagagggccgcactggatcagcgggccgctgaattcgaggcgcgggcgaaggagctggacacgagagcgcgcagcggcggggcggccgcgggtgacggcgacctagccgcccgcctcgcagccgccgaacacaccatcgccgagctgcagggcgcgctggactcgtccgccggggaggtcgaggccctccgcttggcaggtgaggtagggcccggcatgcttcgggacgccgtctcccgtctagaccgcgccgggcggcaggcgagcctctggggcgggcggaccgcgaaatatgccgccaaccaggggggcctcgcccagcgcctctcagagatggccgggaccctccagcggctccccgaggagctcgaggagacgatcaagtcatcctcgagggacctcgcccggggggcggtggagctcgtactggcaagctactaggccagggaccctgacttctccccgtgggcaacgctggacgagttccctcctggaaccgaggatggcgcgcgcgcacaggtccgggacgccgccgaccacatcgtccacagcttcgagggtacggcccctcggctcgcgttcgccctcgactccgacgaggagggcggtgacggtggtgcggacgacagcgacgacgaggccggcgacccgggcgcgtcggcgtgagcccccaggcccccgccaatcttaaatagctttttctttcttcttctgaggccttcgggcccccttcttgtataaactaattcaatctgcaatcaaataaagaggaaatttttgtgtcagctctgtttgttgtgtgtatgagacgaggatggtctatgccgcagtccttctgtgtcttggcttgaacgagggctcgtgcccaggtcctagcctcaaatggcgcgggtcggggctagtgcctggggagatccgcgtgtcgagactggccaggccgggaacgtggtgaccgagggttatggatgacccgattgtgggcctttgccgattcccccccggagttcaccacgccccggggcacggctcggttctgggccccgtttggcgattttagccggcccgggccaccgagggcaggatcgagcacgagcgtgctaattcaagccaagattcttcgaaaggaaacaatggcacagacacagtccttaggaaatcgaaaatgcttttattgaaatacggaagagaaaaaatataagcttatgcatgtggtggcccgaggggacctcagggtgagctcggatgggagaaccgcctccgcgccgtagacgacgaagaaaggcgtttccccggttgctcggcttggcgtggttcggttcgcccagagcaccgctggcaactcctcgatccacgagtcgccgtgcttcttgaggatattgaaggttttggttttgaggcccttgaggatttctgcgttggcgcgctccacttggccattgcttctggggtgggcgggagaggcgaagcagagcttgatgcccatatcttcgcagtagtcaccgaagagttcactagtgaactgggtgccgttatccgtaatgatacgattaggcatcccaaaccgagcagtaatgcccctgatgaatttaagcgcggagtgcttatcgatcttgatgaccgggtaagcctcgggccacttagtgaacttgtcgacagcgacatacagatactcgaacccgcccggggcccgcctaaacggacccaggatatcgagcccccagacagcaaacggccatgaaagaggtatggtctgcagggcctgggccggctgatgggtttgcttggcgtggaactggcacgccctgcaccgccggaccaggtcaaccgcatcgttgagagccgtcggccaatagaaaccctggcgaaaggccttgccaaccaaggtgcgtgaggcggagtgggctccgcactcgccttcatggatatcggcaagaagctcgacgccttgttcccgaggaatgcacttcaggaggactccgttagccgcgcgccgatagagggtcccttccaccagcacgtagcgcttggagatgcgctggatgcgttcactcccttcgcagtcctcgggtagagtcttatctgtgaggtacgcctggatctcagtgatccaagcaatcaatctaagggagctgggagcactcccctcgggtcccgaggcctggactccgacaggcctcgggggccgttcaggcgcgtccgtctcccctagggggtcgggccgcgccgacagctgggcaagcctttcttaaaaggcgcccggtggggtctgggctcgcgaggaagcgagccttgaaagttcgtcggcgaccgcgttatcccgtctgggcacgtgccgaagctctatcccgtcaaaatggcgctccatacgccgcacttggcgcacgtaagcgtccatctgcgggtcagagcactggtactccttacagacctggttaacgaccagctgggagtcgcctaacaccaggaggcgacggatccccagtccagctgccaccctgagtcccgcaaggagtccctcgtactccgccatattattggtcgcccgaaagtcgaggcgaaccaagtatctgaggacgtctccgtttggcgaggtcaacgtgacccccgcaccggcgccctgaagagatagggagccgtcgaactgcatcacccagtangcggtgtgaggcagctgcgaggggcccgagcttgcctcggngacggagatgggcttcaggggccgggtccactctgccacaaagtcggcgagggcctggctcttgattgcgtggcgtggttcaaagtgcaaatcgaactcagagagttcgattgcccatttcaccacccgtccagtaccctctcggttatgcaagatttggccgagggggtaagacgtaaccaccgtgacccgatgcgcctgaaaataatggcgcaacttcctcgaagccatcagaatagcgtaaagcatcttctgggcctgagggtatcaggtcttagcgtcctggagggcctcgctaacgaagtagacaggccgctgcacctttcggcggggccgatcttcttcactaggggccgcatctccagggcgctcttcgtccgagaggccgcgcggggcgcactcggcttctgtgccgacgacctcggggtcggagggcgacaggcgcggccttcccgcagtggccccggggccatcctgggggtcgggggcgcctggcaccgtcggacaagcaggcggagggccagctccggccgtcgggggcctcgggccgccgttcggctcgggggcctctcctccctgctctctcccgggtcgagtcgacacagggtggggatgcgcggggtgagggttgtcctcgtcgcgctccacaaccaacgccgcgctgaccacctgcggggttgctgctaggtaaagtagcagcggctcatctggctccggggcgaccaggactgggggagaactgaggtacgccttcaactgagtgaaggcccgctcagcctcctccgtccagataaacggcccggagtgtttgaggagcttaaataggggtagtgccttctctcccagcctcgatatgaaccgacttagggcggccatgcagccggtgaagcactgcacatccctaagcttgctgggggggcgcatccgctctatagctcgtatcttcttggggttggcttcgatgcctcgggcagagaccaagaacccaagaagcttgcccgcaggcacgccgaacacgcacttatcggggttcagctttatgcgggcggagcggaggctttcgaaagtttccgctagatccgagagtaaggtctcttggttgcgcgtcttcacaaccaagtcatcaacataggcctcaacattacgtcctatttggctacccaaagaaattcgagtagtacgttgaaaagtaggacctgtattctttaacccgaaaggcattgtcgtataacaataagttccaatgggggtaatgaatgcagttttttcctcatcctccctagccatgcgaatctgatgataaccagagtatgcatctagaaaacacaaaaggtcgcaccccgcggtggagtcgacaatctgatctatgcgtggcagggggtaagggtccttaggacatgccttgttaaggtcggtgtagtcgatgcacatccgaagcttgccgttcgccttgggaacgacgaccgggttcgccagccactccggatggatgacctcacggatgaatccggcctccagaagtcgcgccacctcctcgcggatgaaggcttgacgtttcggggcctgccgccgcactttctgccggaccggccttgcgcccggccgcacggcaagacggtgctcaatcacctccctggggaccccgggcatgtccgccggtctccaggcgaagacgtcggcgtttgcccgcaggaaggagacgagcgcgtcttcctatttgccgtccagaagaccaccgattcatgtggtcttggacgggccgtcgcccagggcaacctctttgaccgggacctcgtcgcacgtgatcatccgctgcctcggggcggctgggacggaggtgctgagcctctcgttgccaccctcgggcttggacgcggcggcgaggtggtccgcgcgctgctccatacaagcaagcgtgactttgaggtcgccatggacagagatggggccaccggggcccggcatcttcatctggaggtaggcgtagtggaccgccaccatgaacttcaccaacgcgggcctccctaggaccgcgttgtagggcagactgaggtccgccacatcgaagttcacccgctccgtgcggaagttggcggatccaccgaaggtgaccgggaggtcgatatgacctagcggccaagtgtgcccctgcgtcacacctacaatcggctgggacggccgaagcaccatccccggggccttgatggcgtcaaaggctgcgggggaaaggatgttgagggctgcacccccatctatgaggacacgccccaacttcacgttgctaacggtgggggaaaccaccatcgcgatctgtcctccccgggcaacgcacggcgggtggttggtctggtcgaaggtgagggcaacctccgaccaccgcgcccgccgcgtcgcctcatgggtaggggccgcggccagaagctctcgcttcatggccttgaggctccgacgagaagcgtgagcgcatgctcccccatcgacggtggcgatggtggccccaggctcctggaaccctaggtcatcgtcgccatcgtcgatgtcctcggcgggggccttctgcttggcctcactttgccggttgccggagggagccgccggggccttgccctcacggcgctcctgcctcctctcctcctcccacttcctcgtccactcagccaaacttttgaccgcgcggcagtccgcgaggtcgtggagggaggtgttgtgcacggtgcaccacttgccggtcgggcgctccctgctgggagcgccggcctccttctttttgtcgctcgcaggccttccctttcaggtggcccgcgaagcgccctcgacggcgaggacgtgaccctcgtcgtcggaatgggccgacctcttcttcctcctcctgtcccgccgccctgaccgagcggcggatccgggggcggccgaagctgccacaccggaaccggtggagttccaggtccaggcctctttcttgcgagccacacggtccgcgagctgaaaaagctccgcggtggtctggggctccttggaggcgatcttttcgagcatgcggttgtgccgcacgccccccctgaacgcgtagattaccgcgtgtgcggggatgcatggtatggtgttccggacttgacagaaccgctgaatgtacgagcgaagagactcatcgtcccttcgctgtaccgcatgcaagtccgcttcttcacctgggcgcggatatgtgccttggaagttcatggtgaactgctagcacaaatcctcccaagagtggaccgacgcgggcggcaagttcattagccaaccccgcgcctgtcctttcagggccatggggaagaaattcgccatgaccctgtcgtcacccccggcggcctcgatcccggtcatgtagacctggagaaactcggcggggttgacgcttccgtcatatttttcggtgatggtgggccggaaccttgggggccaacggacgttccgaaggctcgccacaaaggctcgacagccgacaccaccaatcgggggcacggggggctggcccccgcgcccgaaccgaagtggcgctccggacgaggaagcgccttccgttgcgtgggaagcgtgacgaccattgcgccagcgctcgatactgaggcgggcatccagccccctacgcacatcttcttgggtcggaggcgttgatgtcacgcccggaaattcactaataatttccgaactaatttgtgcatgaaatcctcgtccaggaatcagccgaggtacacaaactgacaatttaatatacaaatccatcataataataacgttacatacttacaaaagaaaagaaaaacagcagcggaattaacggtctagcgatggcttcagctccactcccataggcagctcaactggggtataagccaaacgtcttctccttctggatcctttatcttcaactgaggtttgatgattattgcaagaatgagcatatgacatactcaacaagccacacagcaaatatgcaagtgcacaaggattccaaaggatggcataatataggctcatttgcgaaagcagcatttagcaaagagttaagagtagtaaaacagtagattaattaatcagaagttttaatcaacactgaacagcacacccatgctgtacaggcccaaccatcctgaacaaccatacccggctgtacagatctaactccaaaccaggagctaagcaaattattaccagttattaacatccataattattgtgaaaggtgtgagactaatcacgaaa

SEQ ID NO: 5139 - DNA, 1614 bp, Oryza sativa
taagcttttaaaatcatttctaataattccttttaaacaacaatttataatttaaggattttaaacaagaaaagcacttaacaattataattagatcattattgatcaaataattactgaactgttctctgtatcatttacatttaggaattgagctccgaaaaatccgagaaaattccagagagtataattaaccatggagaatttaataaaaattaaatccacccatgctttatatttaggaaattttatttcccacatttaacttcacttgtaaattaatgaacatttcatataaattctattaataatttattaaataatttataaatcctaacacgaaaatcagggtgtgacagttgacgagggaatggcagacgaacggcgggtaacggctgccgctcgccgcgccctccgcctcgacgacacggagccgggggtagcagcgccagaggccttggtggcggaggaccgcccaccggcgcctaggcgctgctgcgccgtcatgaccaagtcggccacgtcatccagccaacatcgggctggagtctctggatcggggacaacgggcgggtgacgcaagagcgcgcccgcagcttggagcgcgccctggggcgtgctgccatcgccgtagacgaggaggcgacgctccccgtctcgccgtccttctccatcgctcgtgggcggcgaagttgcggatctttcgaccccctcgagcgcctcctcccgcctaagacttcggcgagaggggggcggtggagtacgagctcgacgacgcgggttctgctcactgtcgtcaccgctagcgctcggagagaggttgtgcgccactgcccgttcggccattgggctgagcgggagaagcttggcgcacacgaaagaggacgagggcttagaaaaacacacgcgccccctacctggcgcgccagatgacggagcgtggggctcctcaccgggagaccgcgcgggccaccctttgccggttcggccgggggcgctgggtgaggttctaagcccttgatctgtggaatggttcgcgagagagcaaatgcgcaagacacgggcgatgtagacaggttcgggccgctgagaagcgtagtaccctactcctgtgttctggtggatctgtgtatgaaggagttacaaagagctggagagcaagagagttcaaactctagagaccctctcactcctcttttctccagtcccccctcttggtaggcatggtcctccttttatatctcaaggggataccacatacaccatttctacctacccttcttttgggtggggacccatcctactttgaccaaaacttggctcgtaccttcgcctgacaccgggataaccctgtcctccctcattaatgggcggagatttgcaatggctgctgtccgaatgaccctccgatgggatgggtcataccaacctccactccgccggaagcaagtgcaacgtggaagcacggttgtttgctgatgacgtgaccggcatcagaccagtcacaaaccggtcattcttgtctaccacgtgtcagtttagcatgccacacgtcagcccttcttcataaaatgacttccttataatggttgcgatgaagcctggtatgaatct

SEQ ID NO: 5140 - DNA, 9609 bp, Oryza sativa
ccttatattatgggacagaggaagtaggaaatcacacgtggtcctgcttctttctttccctttaagttatgtaaagcacaggataatgtcagccagagaccaataaatattactcctgcaatgataatactagtaaaaaaggtaaatcatacatcatattaggaaaagaaatgaggctattaataatggctgaatccctgattagtgccagtctccactggttgttcaggtttgggggtgacaaggacctgacctgtcttgaccactgccactggctgtttggctcaaatcaagagatttttctatattagtgatcagcattagggcctttgccacttttccaggccggcccactttgacttttcaagcccatgccatgcctagaatcttcttgtaccacacataacatattggaattatctgtccttttaaaatattatttggtacattttttatgatggaaataaaatagtagtacatatatggaatatatatgattaagcattatcgtactatgtaacatatagagcatagagcatgtgaaactcaatctaaaaaaatgtggtggaaaactgatgagtaccccaatgatgagggccttttttcttttctttttttttggtaatcgtggttgctgttctgattttcgaagaatagtctttgtttttcgaggaaaagaaataaaaagcacattgagtcacactgcatgcaaggaaccaataattcaattgggtcaatttaaacaagatttgcccacttgtccatatgttgtgcacacacatcacatcacatcgagatggtgggaaatcgattcatgcaaacattaagtgaaaggtcattgagtttggtactctctgctttgttctctctgaagaagaagatatgcaaatgcaagcaagttgaatcatatcaaggattgcacttgtcttctactactgcaccactgtctgcacattctatttgtcccctctagctagatgggctttcactttcaggctaatctgcacctgcaaaatttccataacatcatagccgacaagaaacctcatgccatgcgtatcaatatagttgatgcaaagtttcatgctgaaaaagcacaagtttttatcgtcagcttctgtgctttttagcctgtccatcttgtttcctttcatgtgcagatttagtttacctcttgagacctagattaactttgacgcatcttaatctttacagttagcaacaactgaacagtggccaactctgtgagatgtaaaacaatactcttcttccaaagttcagagttaagatgcaatatgtaaatatgtcttgctgtctgaaagacaatattgctatgctagctagctgcatgctgttgttttcagggttgctttttttatttttctcgtggacgcatgcatgcacttggcattgtccgattccatttggcagtggaattatttgctgtcgatccgtcgatgcattatctgaaagatttagtaatactatcatggagcagattgatcaatcaatcgagtcaaagttttcacctctgaatctccgatgctatcatcaaattgttaaatgcctcttttcctactgatggtgagatgcatgtttcacagtttcagtcttgacctcacctcgattcatcgtcattgctgtcaaaaagatggatcgtcattcagatttcagagactgaattagcagtaattttgtactgctaatgccagaaaacaatcaatttggattagctaatgacagtggcgtgtctttgtgcatctttgggtacagagactgatcgaagtgtcgtgttccattattgaaaaaaatgttgggacagtgggacataaagttgatagcggagcatgctttggtatatatatagtactaaacagtactttcaggattaaggtcgtgtggctgtcgtcaactgatgaagttgctgtcaactgtgtatatatacttttaagatttgccatgattagtgttcatggtattgtccacgtgcatgaaagatcaagcgaccgacaaccagaccaatcgagctttttatccatgcactaagattgacagatgtatacaaaaatgtttggaatgaatggatttcaaatgaaaccatttgaaaccctgtgaattcgtactgaagaaaacaagttgggcgttcaaaagaaagggacacaagagaattattgttgcattggtttcgtatatcagattgaacttatagaactttagctgaagcagtttcagagttggcatgagatggttattcccaattattcagatttcagaattcagacagggggagtataaacatggactgaattcttctactcatccagtgggccggcattttgcaggagcatatatatggactgggccctgtaaactcatgcatgcgtgaggccttaggttgtgttcttttctatgggttgggaacccatctaccgcacgaaaaacggagcagttcattagcatatgattaattaagtattagttattttttttcaggatcaatatgatttttaacaacttttgtatagaaacttttttttttaaaaacgcaacctttagtagtttgaaaagcgtgcgcacggaacacgaggggttgggaacactgaacagaacacagccttagtctgtaatgggccggtgaattggcatttgggctgaagcccatatattgtaagcaacttgtgtttttcttttcttggggaaggtttttgtcttttgtttccattcgatcggccgaggattttcctgagaaattaggcttcggatttaattacatctagtgaacgaaatacttatattcagactaaaaaaagtgcacgtacgttgcaacagggaaaaactaattaatatttatggttaattaaatggccaatttgcttggtactgccgcgaagatcatgaagttgaaaaatatcagcgtatatatgtcattgatacgagggtccagaccccacatgatcgttctcatgtacaatagtatttcataactcacttattttctcagtatgtattttttgataagaattttctcaatatgtatgaaaccattgggatttaatttagacatgtttgcttcattgcagggagcgatcctgccatgtcctcataaacatgtactactacatatttgcatcagagagcttaattggatgtgcatgtgtaggatgctctcctacagtagtttccctaaaagaattggatgtacatttatatgcatatggagccatggagacgagcagattacataaatcgcctattattagctgaaaagaattgagcatatatcttccttttctcaatggaaggcccatcccaaaaaagcccaataaatatctcaacccagtcttggaaaaaagcccgattcagttctctgcttaagcccatcccaaaaactcctattaggataagtggattatacgtagggattttctacgtatgtgcacatatgtcgcgaaattcctaatcagcgattaatcgcgagcgccctccggcgacacgagacacgtgtcgcgcgcggagaggggcggcggactgcgcgtacgtacggtttcccctcccttttttttcctgttttcttctaccgcgcgtgtacagtttccttttttttttttcctttttttctgttttcttccgtattttccttttttttcttttcgtatctttttcattttttcggtttttataatacatacgtatacaaacagagtcggagaactttagggacataaagtgaacttattccgtcaggagattacacgcagcccaatagtgtgggcggcctgggaacggcgcccggcccgacgcgagagaagctggagccatccgatttgatggacggtcctgatttatccagaactatataaaagttcaaccgtccaaaatctaaccctaaaatcattaacgttccccctctgccgctactcctcccccttcccgacggcgccgctccatctccccatcttcctcccgaccgtccttcccttcctcccctctctcacctccatcgcacgacggatccgacgacgttgaccgcggatggatccgaccgcggtggtggcggtcgaggacggatccggcggcggcggttcccgccgacccctctcggctccctcccgcggtggatctaacggcggcggcggcatcggcggcgaccgcatgtgcatctgacagtggtccggtgcaacagcaaatccggcggctgctgctccccatccccggcgtggcgacgcgaccaggagcggcggtgggcttgggagccggtcgtggcggaaagcggcgatgccgacgacgacaatgacaacgacgatgacaacagcgacgacgaggcggctagggttagggtttggattttatttttgatttgggatgttgattttgtggggattgttgattttgatttgggattgcaattgagtgattttgtgattcatgtattttgggaattggggacaaaggtgttgggagcaatcgaccgatttgctcagggattttttttaaagacggatgactcagactcaaacaacaatgacggacgaagcacgtatttttttaagtaggtatatagattttacaagatatttttttgccaggtccgattttttattaagaagaaagggtgcctaaattacaattgtacaacaaacaaggttgttgcggcttcgacactaaacgctttctaatgatagccaggctacagcttcttaattttgcctcgtcaattttctccatccactcatctttgacaagattgacgacagtttccttgacctagaagcaaaacgaacttgtaaaacgaacttgtaagaccaatttgactgggatctttaatcttaaaagctggatgggcatgttcttgcaatcccgtgtccgatgtgatctctgacgataaaaggaagggtgtgtttagttcacctccaactaccctaaattttcaactttccatcacatcacatccaaaactttcctacacacataggctgtgtttagttcacaatgaagtttggaagtttggttaaaattggaactgtcgaggggtgatccactctagcgggagatcgtgagacccccctttcgtgagttcggccgggggaagaagctcgcctatagaaatcacgtatccgtccccaaggctcctagctagctcgtacacaaccaaattatacaggtttgggccgctatcaagcgtaataccctactcctgtgtatgggatttagactgagagttacaagggttcctgatctcgggagaacacttttacttccctcctccacaagctcaggttttctgagagtcgtccactttctcggtgtgcaaggtcctccttttatacctcaaggggataccgcatgcaccgcctctacctactcttctataaggtggggacccaccttatctggactggaactcgacccgtgccttcgcctggaagctaaaccacagcttatccttgagcggggcccagcgccgtccctcgcctgaaacgggggacagccctgtcattccctcattaataggtgaagacttgtggtggccgccgtccgaatgaccccccgatgggacgggtcatacctacctccactccgccggaagcagatgcgacgtgggagcacggttgtccgtccagtcagacgtgaccggcgtcaggccggtcatagacaggtcattcttgaccatcgcgcgtcagtttaacacgccgcacgtctaccccactacattaaatgcaacagggggcagttggggcgctgcgcgcattaaaggaagtttctccacgctactccgcacaccaagcccctcgtcgtttctccgctggtcatcatggctcaagatgccggcgacgcagtgcttccggcatcgcgcattacggcggataggcaccttagtctcccccacaagatcaagccggaagatgccgccgtgagaacgggggagtcgcggccgcggccgcggtacccggagcgatccatgcacctcctgtcctttgctatggcggggttgatcccgccattctccggattcttccatgaggttttggatttctacgaaatccatgtcttgcatctcgcacccaacgccgtgatgacgctagccatcttcgtgcatttgtgcgagatgttcatcggggtgcggccgacgatgcggctattccagtctttcttcgtcccacagctgctgcatggtgcgttggtggggggatgttacttccagccccggccaggcacggcggggcaatacatcgagagttatctccgcaagaaatgggaggactggaagaaggactggttctacaccgcgctgccggaccacccgtgacttcggctccctaccggccctcccgaacgatccgccgcatggctggcggtttcggagctaggcgaggagtatgacgcagtgcgggatcgcctcaggggcctgcgaagcctgggcctcacaggggcaatggtctttggcgactacttccgccgccgcatcgcgcccctccaagatcaagcccgtggcgcgtgggagtacactggacccaatgaccccatgcgcacgcatgtgggcgagcgctgggattggggcgaggaggacatgaagacggtgattcgtcgggtgctgggtctggacactgccgagcaaacactgattccagacgggatccttcccctctgcagcgatcgcgaccgggagagtattctggctgtgatgtcggccgtcggcgccagcaggggtcagtcccgccggggcggcgccgatggtggcgttgtcggcgtgggtagcggcggcgcggccgcaggcgggagtcggaccagtggccccggcgggggtggcagctccagggctcccggcccgagccgcggacccggggtcgactcggccagcgacccgaaagggaagcggaagatgtccgaatcgcgaccgccccctcccccgcgcggagggggcgccgagcgcgtggcggaccgaccgccggcgggccacaagcgccccgccgcgcctgaggctggacggaagaagaagcgactctggaagataggtcaaacggagccgtgtcgggggagcttcatcgagcccccgaagtggactttcaaccgccctccccgcaggtacgactgctggcacccgcttcgatgctttttgctcatctcggtctcttgttccttcctcttctttttctttgttaacgcgatcagggttattctgtagcatgattccttcccaggggatctcggggtccgacccttcgcaggggacaaagtccgaacgaccagagcggcctgggctcggccgatccagggccgcgggaccttcacagcatcccggcggggcccacgggccgcacaccgggtctgccctgggttcaccacagccgggacttgacccgccgcgagcgatagcggcggcaacgtctctcccgggggcgactccgaggcccaggtccatgcggagcgccacccgggagcgggggccgagggaggtcgcggcccggaagccgaggctggaggcggccctgagcccgaggccgaggccgaaactgggggcgggcccgagcccgagcccgaggccgaatctacccgagggcccgaagcggggggtgagagggacagccgctcccccttgcacttggggcgccctcggggctggccacgcagaaggggggctgagagcagcccccagtctggcgggggatccagcagcactccgtcgtcccgggggcgaaccgtaactttttcttctccgactctagccagtatggagccgctcctgcaggtgctcgtcgccgccgattccaccgtccgggaggggctcaactcccaagttcaagccctggcggaagagcaagcggccctggaggcagagtgggcacagctcgctgcggaccgcgcgcgggttgatgaggggcgccgcgccatggacgacatggtaaaggtgggacgcaaaatgcgccaagcccaactggatgaaatccaggcgcgcgagcagacgcgggactccgtcatgcaggagacggaggaagagcggcaggcggcactgattgcctcaagtgtcctggatgaagcgctgggcgacatccgctttgtcacgcacggaaattcactagtaatttccgaaactaatttgtgcataaaatcctcgtccaggaatcagccgaggtacacaaactgacaatttaatatacaaatccatcttaataatgacgttacatacttacaaaagaaaagaaaacagcagcggaattaacggtctagcgatggcttcagctccactcccacaggcagctcaactggggtataagccaaacgtcttctccttctggatcctttatcttcaactgaggtttgatgattattgcaagaatgagcatatgacatactcaacaagccacacagcaaatatgcaagtgcacaaggataccaaaggatggcataatataggctcatttgcgaaagcagcatttagcaaagagttaagagtagtaaaacagtagagtaattaattaaaaattttaatcaacactgaacagcacacccatgctgtacaggcccaaccatcctgaacaaccatacccggctgtacagatctaactccaaaccaggagctaagcaaattattatcaggtattaacatccataattattgtgagaggtgtgagactaatcacgaaaaacattgctcaacccgcccataaccgcgggcacggctattcgaatagttttactctggccagaggtgtaccactgtacccacaagacacagctccacatcatgtcaccatgtgcctcagtaccaccacggtacctcggaaaggagctgtgacaataccccttgcataacacaactcaccacagtgcatcgttcctggatcataatcaccctcttataaacaaggcatggactccccagcgacccccgtggacttctcgccacttcacagtctggcgcactataatgaatcatgctatacaaacgataaagccgttgcccacgctggcttgtggttggcacggtaaatgtctcacaacagtagctcgcgaaccggtccttaattgccatgagcacgactctcaaaaccatgtgctcacaacccaccattatcaagttttagttggcaagtaattaattaaccaatcacgattaaccatcgtgaactatcattaagccatccttaaataatagtgagtcataagttatcccaatagtgtgctaatgtttctaagcatggctaagcaatcataactaatatctagctgaaccaatatataaagcccaactagtcaagttataataacccaaggtatcaaggaataaagtaatcaatgcaaattggccataacaaaggaataagttcacaccacccggtgacattcgaaaataaatgcacagttgaaataaatagagaatttaaatataggatcaacatgctcaaaggattgtgtttaggatctgtgtgacttgccttgcaataatcggtcttcaattaatcttcttgatcacttccgacgcactcacgaaccttcgcaacgacggaaacgacaagctaacacgcaaaacgaagaaaaagactaataaaaaccaaataaacaatacatataaagtaaacaaacatgtagatcatgattttagatgaattt

SEQ ID NO: 5141 - DNA, 1546 bp, Oryza sativa
ttagattctgagaagcagctgtttagtagccaacttttaaaatctaaaaaactctgaaactcagcttctccaacttctagcttcttaattcatttttcagaatatgtaactacagattctcagaaactatggattgtttagaacagcttcggctagctgtaaactgtttagggcagcttatagcagaagcagcttctaggaaaagctatagctgggacaagctcccccacactttctgttcagattctgaccaaatgaccgatcgagttcagcaccatcgccatcgattgtacatcgccatcgagttcagtagcatatcactgcggtgacgtgttttaccgtcgaaagaaagaaaaaatggggtctgatctgaggctgctactttgatttgtacgaacgaatccttgacttcgcagcaccagccctaccaaactggtactctcagcctattttttgactcaagtactgcaagggaggccccagtagtgtggattttctttattcagagggtagaaccaaagtacaaagggaaaattacaagtcattaatccaaaaaaaagtccctctttataggattcaggcgaacggagaggagttggtcattcttgtaaagagtcctccaattttgggccaaaggtgttttgttcttaaaatttttgcaatccctttgttttcaaatatgccactctgcgaagcaagccgtattgctactttctctggcctcctttagcatctcacccagatcaagaggtattccagtgtattgagatcaagctccagcattgcctgctgaatgggcaatcaaaaaataggtgtaggaatgtttccctgtatgttggtcacaaagcacacatgtcaaattactttcttcaggtgcacaattcttcctatcaagcatgtctttggtgttcagcctgtcaactaggagtggccaaccaaacgctttttatcttcattgtacacttggtcttccagatccatttaagtgtggaatctgttgtgtaaacatgaagttccttgcataaactttctgtgaagaatatatatcatttccccaggtatacacccatttatcatactcagagatggggctgtaattgaagtccacaaattgcatatgtggcatctcttggtgtgcttgttccgacaggggtaatgcaaatgccaaatggatgtctttttgtaacgccatagcaattgactccagcattattctataaaaagaaggccaagaaatatcacgattttcaagttcattattttcacaattcctgaccaatctcaagggtgtatacagtatactactgtatagtatgataaaaaaaaacttaatttgtcaacagatggttacctgacaaaagaaaaatgtttcttatggctcatttgaaaaggaaaacccaggaaaggaaatttaacatttctgtcacagataatatagttctggggtcaaaccgaataagcatattctcaagtgaaaatcattaaaatttacctgcaagttgaagaaaataaaaatacatacatcagtttacttgcagtgaacctt

SEQ ID NO: 5142 - DNA, 3889 bp, Oryza sativa
aattccccaactctgtgctctgccggtcttacccgaaggattccggccggccaaaccgtcctattttgcaccggttaaaaaactacccgttgtagccctgtcagagggccccatcggccaggccggtcagaccgacatggggtggccggtcagaccggcctcggctcggtcggaccgccatcggctcggtatgaccgactacggctccgtcggctctgtatcggccatcccgagcagcatcatctcggcctccaggaggccggtctgaccgggaaagtgccaccggtcagaccgccactatgtagccggtctgaccggccagggcacgccggtcagaccgccactatgtggccggtctgaccacccctggtcaggccgaacctagtgaatttgtgtaatgaaaaagcgagcacaaatgaaaatgcaatgacctaatgtggcaattaaaatcatctctttgctaggtcattacccctcttaatagtacggcgaaactaaaattaaactagcaaatttgatcgccctacacctcgatcaattctaagttaaagcgctagttttaccgtcttctttccctttgctttgcgccgtcaattttaatccatcgataatcatccatgcacgcatatgacgtggacctaacttaaaatgtatagctcaaagacaacggttagtccacaattagtgcttgtcattaattaccaaaattaacaccgggggcctagatgcttcacattctagcactaaagtgagagagagaaagagagagggagtggtcccaaagcactttttggcacaatttgctactatgtactagcaaatgccaaatgccaaattgccaatttttgctactagtgtttagatccaaaatggcaaaaagtgcttcaaaatgacaaaacttttgccattttggaggatctaaacagggccttatacaagcatgcaacatcatctataattcattgaattctagaaatcaacatccaatcattttccttcacattattaataattacatacaagacttatacaagcatgcaacatcatctataactagatgaataccccgccgcgttgctatgggaaattaagttgcataatatgttcaaataaaatgaaatctaaataataaaacttaaataaattgatacctatgaattttgaggcctaaaaatggttgtgattacttggtgttatgagagaagaaagaagagacaatttgaaccataaatctatcatctaatgactagaaataattggggtgatgtggcttaattagagaagagagaaatatcattaactaaactatataagtatataggattcattgaattctacaaatcaacatccaatcattttcctttacattattaataattacatacaaaacttatacaagcatgcaacatctataattcattgaattctacaaatcaggtatccataaccatgacagtaaccccccgacttcaactcaaatgaattcatgttgtcatccgcgttttctctgtcaacgttgtcatgctcacttggtcgttctcgataacaatcgagaagacatggagtactcaacatcattgaaacaagatcaatggtccacaagtgaatttgaattgaagtctaaacaactgccataaacgagcctgaaatcaacgcaaatgaacgagttgatgttctcgaccggagaccttggaacaacagtcgtcgtgatcgcttaaccgttctcagttgatcgagaaggtgcggagtatgtgactacattccttgtcttgtcgtaatcaagaatttgggttgaagtcaagaattttcatctcagcgggtacaccatcgcttcattccgtaatctttgtcgaactccaccaactgttctcgagtaatcgagtagttgtccaatcgttctcgagtaatcgagtagttgtccaaccattctcgagtaatcaagtagttgtggaatctgtgacaaagctctgaaatatgactatcctgaaatcaatactcagacagattgttagatacaaatagccccaagggtaatacaatataatatgaattttaaaattgaaaatatattgaatttgcacatgacaataaaagagtactctcgctaaagcttccatcagcaataggagtctgggactcttcctagcccccagctgtctttatggaaaaatcgtttttccacaaaggcagctaaatcttataacaaaccaagttgaagatgacgaaattctagcatccagccatgaagttgggaaaaccaattctgattacacggcttagttaatacgcattcaaaatagcacaaaggaacgataggatcgacttcaagacagggcgatataagaaaagaggatcaacggacaaatattacatatacaaacacttacagaggttgtcggagaatccatctcttgaacccatcttgtcgaaaccttgtagcaccaaaatccccatacctggcgtgccactgtcgacgtttgagatctcgactacggttattgcatggtatggagactgtcggtaccagggaatatgcgagattgagataaaagagatagatacaaggattttatacaggtttgggcccccttatgtgacaggtaatagccctactcctgttggccaaagccggtgttgctctatgttcatcagaatcacacaagtacaatatttgggataacctatctagctgttgtcgacttggtggcatagataaccaacacatagtcgacgatagggtaatcttccttcccgagtaggaactcattgagatcagagatggcgctagatcccttttgtcggcctctgtatgcaccatattgggttgtctaggcttatctctgatgtcgatgtttggcggcatgtggtgtctattctgacttgtatgtcgatctgtgtgttgttctgttccctctcctcctaggggtcatgtatttatacccatagatgtccccatgtccaagtagaactagggagacaagtatggatacgatccgagtagtccttatagtttccatatagaactctacttgtccttattaatctggaactccttctatatacaaggtatgattccgtataagacttggtatatggtggccccaccaagcttaatcgattactattgggtatgtggtatccataactatgaaaacatgtttcttctttcactataaacaatgctcgtgcattgcaacgggtgaaggttattttaatcttattattgttataggagttagttaaggtgaaattcactgtgggaattcacttggatatatatttttctagaaaaaccatgagctgcaattagaagtccgatcatctcaagttagcatgcgagttttttaaagagatttcttatatgactcctatatttccaaaaccgaacgaacttaaaaaccgactcatatacggatgatgtaccaacatactggcaaaaacatcttcaatttttataatagtagagaaaagatagaaatatgtatttccaaaagcgaacgaacttaaaaaccgactcatatacggatgatgtaccaacgtactggcaaaaacatcttcaatttttataatagtagagaaaagatagaaaatcatgagctgcaattaggagtccgattatctcaagttagcatgcgagtttttcaaagatatttcttgtacgactcctatattttcaaaaaaccaacgaacttcctaactcaaatacgaatatgtatttccaaaagcgaacgaaattaaaaaccgactcatacacggatgacataccaaagtactagcgaaaacatcttcaatttttataatagtagagattctcaaagcccaagggaaatcaagcaatatattactgtacctccaatacaccaccataatttgagcacaagttgactta

SEQ ID NO: 5143 - DNA, 1490 bp, Oryza sativa
aggtgacactatagaatactcaagcttcacgctggacagtaagtgcttgctcaagcaaattctctaacctcctctctggtaccataacagttgggggaagcaccttttgcaattcctctagcagcttcagccgtgagtttgaagattcaatgccaagcttcgaaaaaccaagtaatacatgctgtggagaagaaattatgcagcctgacagttcatgaactctttttttgttgacaccaagtggtgtaatttcactctgcaaagtccttatagcacccatgacattgtcatttctcaaaagttcaagaaatttttgttccagtatcagaaatatagcagactttacaatgttttcgtccaaaaggccaaccttcttcaaggtaaccactgcactatcccaattcccatcaagtacctgccttctgaaaagattcactgttggggaatgcagagttattcctgattcttcctcaagaactgctccgcttttttcataaccaaggctatacagagcctttgtgattatcctcacaaattcatccctcttaataacacctttagagccaaccataacttctttcccctgggaaggcaaaggtctagccattgtgcttcccaaaggagcggcaggtttcaagcaagaaaaactatctaacaaacttgctggttctactgaggatgctcttgcgcgtttcgagggtggttcatcgtcttcaaaacctcccatgaaatgttaaaatcagcccatatatatttttgacttctagggagatgatgttatgcagctccgagcggaatgcttgcaatgggtggtgtataacgaaaggacgttgctgcagagaaacagcagttgaaaagtgtaagttctagatgatcaaatgcagagaagggtctatctaagtgatcatcctatctacaatttgcagctaatgcccacccaccaggaaagtttgcatagcaagttacaaacaacaaataaaaccagcaaggcatgtaatgcgtgaaatacaattgaagcccggacttgatcggccttagtgagcaaaaaccgcccaagcgtatcaattagcgtagaaactgaacatcctaacatcacattgaatacgcggtacacccatcatcgccgcctaagcaaagattggatgaagcgatcaagagcggcaagcatggatcccagcatccgtagtctgtcaagacatgaactggagcggctgtggtgtggaatccacggccacagaggcggatcttggcagcggcggcggatccctgcggcgctggtcgatgcagacgaccactgaagcaactgtcggcaacgctagtcccagaagatttggggaaatttggccccaacaatccctatcaaaccttaccccccaaacataaaaaaaagattggcaacacgcatgaaattctgattgatcccaaatcccaccgcgcgatcacaaattcctgcagcgcaaagcaccaatccatccagaatcacgcgccct

SEQ ID NO: 5144 - DNA, 2118 bp, Oryza sativa
cctagaaggagaggggacagaacaacacacagatcgacatacaagtcagaatagacaccaacacatgccgccaaacatcgacatcagagataagcctagacaaatccaatatggtgcctacggaggccgacaagagggatctagcgccatctctaatcacgatgagttcgtactcgagaaggaagactaccctgtcgtcgactacgtgttggttatctatgccgccaagtcggcgacagctaggtatgttatcccaaatattgtacttgtgtgattctaatgaatatagagcaacaccggctttggccaataggagtagggctattacctgtcagataagggtcccgaacctgtataaaatccttgtctccatctcttttacctcaatctcgcatatacccaggtaccgacgatctccatatcatgcaataaccgtagtcgagacctcaaacgtcgacacatgtgatactccaatttctaactactactcttcttgtactgaaacatactaatttttagcgtttaaaatttactaactttccaatctcatatatatatctcgtatactccctccgtttgtaattatattataagttgttttatttttttcatttatatctcatattctcaactaaattaaatttaagtttgactaagtttatagaaaagtatagtagtatttctaaatgaactaattatgctagatttaataaaattaatttgatattttagatcgttcgaaaaaaaggtcatcaacggtctgatcgttcgaaaaaaaaaagtaggtgttgagatgaaaagagtagtgaaagagaaaggtttctctaattttcttatacactaatcctgcatttcgaataaaatcatagtgctaattaaataccaacaaaattaaaattcagcattttttaattttatattcccacctaatgctgctaacctaggagtccagatatgaatgggatatatcggatatgattgctgacacaacatacataggggtacgtgtcatacataggggtgtctaggtaaagccgtgtaaagttttagagtgtcacatcgaatattatatagggtattgtatggagtgtttagacactaataaaaaaaactaattacagaatccatcagtaaaaccacgagacaaattttttaagcctaattaatccgttattggcacatatttattgtagcaccacattgtcaaattatggggcaattaggcctaaaacattcgtctcacaaattagtcgcaatctatataattagttctctttagcctatatttaatattttatacagttgttcgaacgttcgatgtgacagattgtaaaatttagggtgagatgtaaacaggcccatacttcgagagccactactagtgcaagcacatgcagatagaaagggccacatcataatagcctccattctgtaattgccacttgcgcaactcaagtttaaatattaattactcctccagtggcctaacacaacataatacttcctccattttctttgatgatagctcaaaattaaggtccctttcggattaaaggattgacaaatcagagaaatagaaaaaaaataaaattctgactgtaaaacgtaggaaaaatacataaatgattgtttgattgaaccacaggaaaaacataggaattaggtaagagagatagactcataggaaactttccatgaggttagacctcatgttaaaaatcctctaaaacttatatggatttgggcattccttaggaatttcataggattcaatatttttcaatcctttgtttcaaagggctatataggaaaaaaaatcctataggattagaatcttacaaaattcctatgcttttccttcgaatcaaagggtgccctaaactaaccaacgtcaagaaaaggtaacatgtcgaatgaagtactagattgctactccctctgtttcacaatgtaaatcattctagcatttcttacattcatattaatgttaatgaatctagacattgttggaattaatagatgggctaaggcccattcgaagattaattctttggaaaatcacaaaagcccacctcatgggatggcatgcatgtggagtttagtaccaccttgcttatt

SEQ ID NO: 5145 - DNA, 1272 bp, Oryza sativa
tttggaaacattccgaaaaatccggtgcgtgaaaacggcatggagtccggataggttacgcgcgacttatccggttcggtttacgcgggcgccctgatcaggcgatctatctctatataaaccgagccaccgccttcacgcagcacacgcaaaaatcaatctagggtttgcctcctactctgtgctgcgccgtcgctcgtagattacaccatcctgctcgccggcgtgcacctgcgatcgggagagcaactctccggaacctttgccttcgacgtcctgcaccgggagaaagcggcaataaggtttttgggaagcgctttgtgcgactgctccctgttcgtccacgacggctcgtcttcctcttcgctcgcgtgcttcgtgccttcgtagacgcctgcgaaaagtttcgaccgagcagccggtctttccgccacctcggtacgtgttcaatatgttgcgcatatttaatctgttcatgttatactgtgtagtttacatgtgtagatctaatgatgcgttcatgctagttttcatatataacgtcatgatttatttatggaatagattaaatcattatatgcctataatctcaacagatatatatatctatctagattaattaacatcaatatgaatgtggaaaatactagaatgatttacattgtgaaacggaggtagtataatttagaacagaagatattttttttaaaaaataaatacttaaaagtaagttatatccactacaaaatggttttcccaaacggctatattacattttcacaggcagtgtagaacccaacacccgcttgtccctagatgttcataaaaaatagtagcgattttcctaaaatgggcagttcaaccgtacgtgaaaaatggaattttcgcatacaaagcgttatgccgcaggactgcaaaaaaaaaaaaaaaaactactgccgccgtcgcctgaagcacatgcccgccaccacgcgctggttgtcgggaagggggagacggtgtactggtggccgctctagccgttctggtggatgcgtcatccccaaggctagtggcggcggatcgttcgctcctatctctactagcaaatataatattaggctataagccgactaaatgttgaggtggagaagagaagagaggagagagaggagaaagaggagaagcggtctgtaaacttacacccgacttggacacaagaatcaagaaattctgtgggagagacaagtgggtcctatattaattgtaaagagctaactattatatgggtgg

SEQ ID NO: 5146 - DNA, 21315 bp, Oryza sativa
  unsure (1)..(21315): unsure at all n locations
aattacatcacaagttctaaaaaatcaccacagaatacatcacgacacaaatacatcttagatctgaatcaaaatgcaccacaagtatcatctcacacacaaaatcaccacaagtacatctctgcacgccggctgccaccacgccggccgcccgccggcggatgggaggggaggagggggaggagaggggagaggagaaggaggaagtggagaggaggatagggggagtggaggaggaagagataagatcggatctaaggggaggagaagaggagatgatccgttcttatctaaatatttcatctgggacttaaccgatcagagataggagaaaatatttactcccggttagtaactccaaccgggggtaaagataaatctttacccccggttgttagtaccaaccgggactaaagatctaaatgatctttactcccggttgatagaccaaccaagactaaagtggtaccaaccgggactagagatcctcggccccctggcacgcatctgacaagggatgaaccgggactaaaaatcctctttagtcccggttggtactaccaaccgggactaaagatcaaaaatttttgaaccgggactaaaaacaatttttactgccggttcttattggaaccgggactattggggaaatcctccaacccagcaaagatcacttctctagtagtgattacgaaaaactcagcggtaaccagtattaggatatttcaaacaatcaaaacaaattctcaaaaaaatcataacattcatgcaatgtatatataccactccataaagttttatgaaaagttttatgaacaactttaactcacatattgagaaatagaagagacaaattcaacatataaacagtagtggtaatattgatatccaaactttttcatttatttagctcgaagatcgagtttggacttatttttttagtgagatttttctatactccattaatttgccatctaaaaaggagagatcaggcatcgccaagggaagatcaagccttcaagatcaccaaggcccctccaaggacgccccatgatcgcctcccaatcgcctctccgtgaaaattgcacgtttctgtttactgtcgatgtacactacgtctccatttaataaagggactatctacaaatcattcgccataaaacgaacccaaacacagtcggatttttctctactgctaatccatacctaacgactcagtggacctccaactacgtacacacttttacgattaattaggaactagtacgtattttattttttaaaccatatgattaataacacatagaaattacaatgtaattattctataactagtaatataagtggtatgtaattatagtgtaagtgatatgtaattacattgtaactgtagtgtaagtggtatgtaattacgttgtaagtgtagtgtaagtggtatgtaagtatggcgtaagtactgtaagtacctcgtgaatgaattttaacttaattttggtattgaaatcattaatcctacctcgctcagtttgttagtcgctctgtctaagacctagaaggccagagttcgactcccccaccactgcgcctgaattattttcttttgcactgacatgaatatcgtatgggcaacaattcaaccgttttttcttagaaaatctggtgacacatttatagcaaatctgtttaataattttctctttttcttttattagcatgcaaatttactaatggtctattcatgtcagcgaaattgcgtgtgttgtgaagtgaccaattttttggcactcccaccatttggttcaaaccaaaattagctgtgcgccaactcccaccgtgaatccattatttccaccgacagccttgtccatgttagaataatcaaattattgtgacgggtggtgtatatatctacatcaaggaaattaattttctgaccttgagatatataagtgtgtcatggaaaattgaatttccccgataagagagtttgtgcacgttagtaaaaccaatgaccgtcagagctagtccggtttttggtagtgtctagttcgaacagtgatcagtgtgaagctaagacatgcattactccctcgatgccatgataaatgataacacattacaagcttgttgctatgatatatcccaattaaactagcttgtgggaaaccaaaaaacataaatctgctaatggtgcattttattagagcgcgcacgataggtgatgtgctgtgttgacttgataattaatcaagctgctggaattctcgcttgctggcttgcactggtagttgggaaaataggtccctagaatccgttgtaattgtgatcctacaacctagagaatgtgaataaggtttttgaaaaagcacggtgcgacattcgtccatcacggctcatcttcctctatgttgaatagctaaatgggtgaatatgttaaacatgcaatattaattattaaatatattagattttggagggatgcaacactttccagtactatgattctggataggcttatctctatattcatagattaggaaatatgacatccctctaaaatcccttaattatgggaaggagggagtacattattgtgttggaattaatagatgggctaaggcccattcgaagattaattctttgaaaaatcacaaaagcccacctcatcggatggcatgcatgtggagtttagtaccaccttgcttattctaggagagggggatctccttaaaagggaggataccctcctagccacttgaagcatgtgtggtggagagaagaagggaaatacacacgcgctcgctggcctggcaggcggcgcgcgtgcacgacatacgtgttgaattgtccacaaaattggcatcctcacccttgcgcagatgcagcctccttttgcagttttgttttgctgcgggaaattcggattccgaaaaatccggtgcgtgaaaacggcgtggagtccggataagttacgcgtgacttatccggttcggttacgcgggcgccctgatccgccttcacgcaacacacgcgaaatcaatctagggtttgcctcttactctgtactgcgccgtcgctcatagactactccatcccgctcgccggcgtgcaccggcgatcgggagagtaggtctccggaacctctgccttcgacgtcctgcaccgggagaaggcggtaataaggtttttgggaaacgcttcacgcgactgctccctgttcgtccgcgacggctcgccttcctctccgctcgtgtgctgcgcaccttcatcgacgcccgcaaccgtgagtagttcctgccgagcaaccggtctttccgccacctcggtacgtgttcgacatattgtgcatatttgatctgttcatgttttactgcttagtttacatgtgtagatctaatgatgcgttcaatctagtttacatctgcaatgtcatgatttatttatggaataaattaaatcattatgtgcttataatttcaacaatccaaaaaccttattataggcgctgtgattttactatggctggttttgccgatgcactgaggccagataaattctccggtgtgcactttaagagatggcaaatcagggtcactctgtggctgacagctatgaaatgcttctgggtgagtactggcaaacctgaaggaattcttattgctgatcagcagaagcaattcgaggaagccactactctctttgtgggatgcattcttagcgttcttggcgatcgtctggtcgaggtgtatatgcatatgaccgacgctaaggagttgtgggatgcactgaatactaaattcggtgctactgatgctagcaatgatctgtatatcatggagcagtttcatgactacaagatgactgacaaccgttctatagtcgaacaggctcatgagatacaaaccatggctaaggaactcgaactccttaagtgtgtcttacccgataaatttgtggctgggtgcattattgcgaaactacctccatcttggagaagtttcggtactgcactcaaacacaagagataggaatactccgttgaggggttgatagcgtctcttaatgttgaggggaaagctcgggaaaaagatgctgcgtctaagggtgatagtgggcagtccagtgccaatgttgtgcataaggctcagaacaagagcaaggggaaatacaaagctcaacagaccaccaactttaagaagaagaagaagaacaacaacaatcctaatcaggatgagaggacttgctttatgtgtggccaacctggtcatctggctaggaagtgtccacaacgcaaggggatgaaggcacctgcagggcagacttctaagtctgctaatgtgaccattggcaacactggagatggaggcgggtatagtaatttacctactgtttttttagttaatcagtctactaattggtgggttgatactagggccaatgtacatgtttgtgctgacatcttattgttttcttcttatcaggtcgcacggggttccatcgtcctaatggggaatgggtcacatgcttcttttcatggtgttggcacggtagatctgaagtttacttcgggaaagatcgtgcagctgaagaacgtgcagcatgtcccttctatcgataggaatcttgttagtggctcccgtcagactagagacgaatttaagttggtttttgagtgtaataaagtagtcgtgtctaaacatggatattttattggtaaaggttatgagtgcggaggactgttccgcttttccctttctgatttctgcaataagtctgtgaaccatatttgtggcagtgtggatgatgaggctaatgtttggcactcatgtttatgtcatattaattttgacttgatgtctcggctttccagcatgtgtttaattcctaagttcttcactgtcaaaggttctaagtgccatagttgtgtgcaatcgaagcaacctcgcaagcctcacaaggctgtcgaggagagaaacttggcaccactagaactcctacattcagatctttgtgaaatgaatggggtgttgacgaagtgtggaaaatgatatttcatgacgttgattgatgatgctactatattttgctatgtgtacttgttgaaaacgaaagacgaggctctagactatttgaaaatttataaggcagaagttgaaaatcaacttgacaaaaagataaaaaggcttaggtttgatcgtggtggagagtttttctcaaacgagtttgacttattctgtgaggaacatgacatcatacataagaggacgcctccctattctcccgagtctaatgggattgctgaaaggaataaccgcacactgactgacttggtgaatgacatgttggacaccacgggactacctaaggcatggtgggggaggcattgttgacctcgaatcatttgttaaatagagttcctaacagaaataaggacaaaacaccatatgagatatggattgggagaaaaccatcactttcaccaagcacatgagggtgcttggcgaaagtcaatataccaataacgaagaagcgcaaattgggacctaagactgtggactgtgtctttctgggatatgctcattacagcattacctatagatttttaatagttaaatctgaggtacctgacatgcatgttggtacaattatggagtctcgtgatgctaccttctttgagagctttttcccaatgaaggatacacatagtagttcgagccaaccctctgaagtaattccccgttcaatcacacaaccagaacaaactgaacatacacataaacatgtcattgaggaggatgtcagtgaagctcctcgaaggagtaagagacaaaggacggctaagtcctttggtgatgatttcactgtgtacctcgtggatgacactcctaagtcaatttcagaagcatatgcatctcctgatgcagactactggaaggagactgtccgtagtgaaatggattccattatcgctaacgggacttgggaggtgacaaatcgaccctatgggtgtaaacctgtggggtgcaagtgggtgttcaagaagaagcttaggcctgacggtactattgaaaagtacaaggctcggcttgttgctaagggctataatcagaaagaaggcgaagatttcattgacacttactcacctgttgctagattgaccacagttcatgtgctactttccctagcagccacacatggtcttctcgttcatcaaatggacgttaagacagcttttcttaatggagagctagatgaggagatctatatggatcaacctgatgggtttgtagttgaaggtcaagaaggcaaagtgtgcaaattgttgaagtctttgtatggtctgaaacaagctcctaagcaatggcatgagaaatttgacaaaacattgacatcttcaggctttgcagtcaatgaggcagataaatgtgtgtactatcgctatggtgggggtgagggagttattctgtgcttgtatgttgatgacatactgatatttgggacaaaccttgaggtgataaatgaggttaaatcattattgtctcaaaattttgatatgaaggatttgggagtagctgatgttatcttaaacattaagctaattagaggtgagaatgtgattacattcttgcagtcccattatgtggagaagatcttgaatcgctttggctacattgatagtaagccttctccaacaccttatgatcctactccctccgtcccaaaaaaagacaaaccctggtttccgtgcccaacgtttgaccgttcgtcttatttgaaaaaattatgaaaaaaattaaaaagacaagtcacgcacaaagtattaatcatgttttatcatctaacaacaataaaaatatgaattataaaaaaatttcatataagacggacagttaaagttagacacggaaacccagggtttgcctttttttggacggaaggagtagattgttgtaacaccctgaaaatttctgacaataaaaatcactaaaattttaaactttttagaacttttgcatcatgctagatgttatggttgctattgcttgccaaactattaattttcacgattgaagattaagctaaagctgtacaactaagtagtaattagaataagataattattattaatcctataaatatttgtgcacatgatagcaagccgaataaagtacaagtcaattattaatttctataatgcagactacaaattgaatgttaaatacttgaaccatgttgacaagtgtcaggacatctaagcaaccatgaaataatcgccactacgatgaccctatataaaggagcgttccactggaatatttatattaatatttataatgttcattgagtctctcatggaatagattcactcatataaaatatttggtcatgtaaataaattgagtaaatataccaccacccttataatgtattctatggaaatatattaattctatatcacagccagcaattatttaagttaattatagagtaacccaatataatgcaaattcatttggaaataagtaaatattcaaatacatatttgaattcccaaaaccaaaatatatatattacatctcaattcaaattccaatcccattcacttttgcagattagcccctccctttccttcctttcgcttttcttccttttctctcttttcctagccgccactgttcattgcccgacacctgttcgacataggcccagcccagcagatcaggaacgcatccatcccgttcccaacccttgcagcactgctcccgtgtgccgcgtgcatcgcatcgatctcgctaccacccgacgccgcgccgcgccatgcctccgcacctgcgccactcccgcgctcgcgttgtgccatgtgccgcatccacccctcccatgcaccgcgccgcacccgcgtcgcaccgtttccatgtgccgcaccacgccaaactcgagccacgccaagccgctcttccgccgtgaatcccggcctccaaccgctctcccgtttccctccaagaaacacggagcatcgccatcgtcaccatgccgctctgcgtccatcggttaaaactgcgcatccctaccgcgcccgctggacaaaacaatgcccttcctccagctagcgcctagacctgcagtacataggttatagatgcgatgattaagccacagaaccttaatggagaaggagataaacccttatccgcgtcgtccacctcatattccttatccgattgccattagagctctagctcatccaggccatgtgccggcgatcttatccccatggtttccttacatcctaagctaagcccccaacaaaaatccccattcctctcagctttcttcccgaatacatttcatcgagcaccttgcgatcactctctcaccaccgctagagatcagcattgcgaggctccccggccggagctggaggttggagggagtggaggaagagccgtgctgccgccgtcgccattgagggagctgaggaccgctggacaccgggaaccacgcgtcgaacactttcgggcatcgccgaccgctagccacctctgctttgtctgcaccgcaccacgcgtcgccgcccttcgccgtctctccatcctagcgtaatccctcgaccccatagcatcctctaactctctaatagctagcatcggctccaatttcgccaaatagcacccgtggccgtaccggcctggccgccattgcactgccggcgagctcgccgtggacaagccatccgggagctcccctctccatctagctgatgaaatcgaatccccatacgccgtagacgctcacgccctcaccagtttggtcggaaaccctccctatcgccctagcacctagctgcccgagctcagccatgctgcgccactcgccctcactccgccgcgcgtcgctgacggtggtgggaggtcgccggagcctctccgtactttccgcagccgccgccgtgccggcctcgcgccatcccggctgtgcccagcgcgcatggcacggctgcctctgcccggctggaggttgaagacgacctccattcgagccactgacaggccgggcccactcctatatttcccctagcaaaaattaatccggtggaaaaggaataaacccggggtcccacatgacagtcaatgtagttgtggataggatttcggattaagaacaaatctattaggaacagtaacttttcacaatttctcggattaattcgaaattgaatctttaaactagtataacttattcattttagctccgattcgagtgaaacttgaacctaaatttatctaaattcataagctttccaatggtatgtaactcactgtttagtaaaatatatttataattgttacataattaatatcaaatgattagattatgatcaacttaaaaatatgctaataaataaaattgattattgtacagtaaactaggtgtgaggataattctctttaccatgctttatcactgtaaaacccatgtaaactaattagaagcatatgtggtcatactcctaccataactcgatagatcaactctgatttaatgaaatgtgtatcccatttatattatgatgattagatcctaaacaagccgccatgacaataggaatgattaagagattatccgtttgcaaacacgaatcgaccccaacaactatattttgcttgtgcatatttgattgaatattggtttttctcgcgtattatagaatttgtatatcggttagtcgtgaggcaacgtatgcagcttccaggaggtgaaggttgatcaagattatatcaagaataagaactatcctgagcatgcaagtcatcaccccaccccttgagcatgttgatcccaattgcgaaattgttttgtttacaaataaaattgcatgcaatgatgaatatcctacttgttattatgccatgcctttgattattgcttatctcattattcccttgtacccataattacgtatgagtccatagtcacttgtgacaaatgctgagtaatgctaatttagattcatgcattctcatatttatcaaatgctttatgcttgggcaactaccttggggagggtagttgagatacggcatgtagagacatgagtgccacattgccatggcattgatgagatgatttgtgaaagaaaattaaaactaaacaaatgttttcgactggggcggctggatgatttgggtggtgtccggtaaaggctagtgccatccctggtcagttaaggacagagccatgaagctaagcatgaaacgaccccaatacaaccgtacttctcgaatgggtatagacctagcggagtagatagccgagcggaggcagtacccctgcatagtggtttcacttaggtgtgtggatgaacaagcagtctgttggcggatacccgatacggatggccagatggcggatacccgatacggatggccagagactgacttgtcaagactacaagactacaaggagatacccaaaagaggacagcatagattgggttcaactacaggatgcgatgttagacttgcgtgagttttcttcctcgggagcgccagaactcctctcactgctagaaacttatgacgcctagagtgcatgaggacttaagttcatggagcgggtactgccaatgtgaggttattgaaaggctttgccgtgacgcgtctcatgtgttgggacgaggctcatgtgttgggcagttgcggagtacgggtaaagtgtacatccactgcagtgtgagtaaaacaaatctattcgaatagccgtgctcgcggttattgagcaccgggacatgtattacacttggctagactctaatttcttaatctgattgggatgggatatgcatcatgattttgtactagtggatcaacttctcgagaggcgagaaggggtagaccccagaaaaccatgatggccagtggcgggaagctatccttgggaacacaatggatggtggatagaaccgtcgctgtttaatgaacaatggagttaaaacttgatcagtttatgctaggtcttaggtttgtgaaatgatatttgaaaactcagctttacgcaaagtaaccatagccactccttgtattatcctgtacattactacattttgtgtggtggcttgctgagtacttttgtactcattgttgctctatatatatcttttagcagagtgttgaagagaagcccttgttagtgcgcttgcgtacctaacaagatgatcggagtttaattccattctaggtctcgtttcccagtcgactgcttgtggtatgtcaaccgggcccctgtattattttgtcttccgctgttgtttctctgatagttgttggcctgccaggccctaatgtaagcatttaactcttttagcctgaattcattcatgatatgttgtgattcggctatgtatgtgtgtaccaactactgatccagggattggtactgataaacataggagatttccgatttccaaaatcggaggtcgacaattgttgcttcgcaagaacaagagaattgctaggaatcaactggaatactcccaaatcattggctcgctgatgtacctagctagtgcaactaggcctgatatctcctttgttgtgagcaagttgagccggtttacctctaatccaggagatgattactggcgtgcgcttgagcgagtaatgcgctatctgaaagatactatggaattggggcttcactattctaggtatcctgcggtactggagggatatagtgattctaagtggatctctgatgtggatgagataaaagccactagtggatatgtcttcacactgggtggtggtgctgtttcgtggaggtcttgcaaacagaccattttgacgaggtcaaccatggaagcagagctgacggtactggatactgctactgttgaggcagaatgactgcgtgatctattaatggatcttcctattgttgaaaaaccggtgccggctgtccttatgaactatgacaatcaaacggtaattgtcaaagtgaatagttctaaggataataagaaatcgtctagacatgtgaaaagacgattgaagtctgtcaggaaattgagaaactccggagttataacgttggattacatccaaacagctagaaacctggcagatcccttcacgaagggactatcacgaaatgtgatagacaatgcatcgtaggagataggtttgagacccatgtgagttatactatggtggtaacccagtctatgtgatcggagatcccgtgaattagaacctgggaagaacaaaccattagtaaactagaggagagtaccaatctataccctctctaagtgaagatgcatgtactctcgtgagctgcaaggcaggttggctatgccttaatgagttctgttggctttaattagcgaagatgatgtcctgcagagcattcttgaaagaactcacctttgtaagcttgactgttggtcgcagtctatagagattttgggtgaatcttctaggaatcttactaaagatctaggagtatgacttatacgctccacccgaggggtagtctacagacggtctagtaccagataagactctgagtgaaacttgcttgcacaagacttgcaattcaaggcgtagtccattgttcaagttgtgagtaagtgtagcttggagttctaggtggatgtttaaccttaatcggtctccatcgaaccgctggtatataaacagtacattggaaaaggcaaatctcagtgggattttgagatttggtgggggattgttggaattaatagatgggctaaggcccattcgaagattaattcttttgaaaatcacaaaagcccacctcatgggatggcatgcatgtgaagtttagtaccaccttgctttttctatgagagggggacctccttaaaagggaggatgccctcctagccacttgaagcatgtgtggtggagagaagaggggaaacacgcgcgctcgctcacctcgcctggcttggcaaggcaggcggcgcgcgtgcacgacgtacacgtcaaatggtccgcaaaattggctcctcacccttgcgcagatgtagtctccttttgcagttttgttttgctgcaggaaattcggatttgttttgttttgaaacattccgaaaaatccggtgcgtgaaaacggcgtggagtccggataagttacgcgcgacttatccggtttggttacgcgggcgccccgatcaagcgacctatttctatataaaccgagccgccgccttcacgcaacacacgcgaaatcaatctagggtttgcctcctactctgtactgcgccgtcactcgtagactactccatcccgctcgccggcatgcaccggtgatcgggagagcaggtctccggaacctctgccttcgacgtcctgcaccgggagaaggcggcaataaggtttttgggaaatgcttcgcgcgactgctccctgttcgtccgtgacggcttgccttcctctctgctcgtgtgctgcgcgccttcgttgacgtccgcaaccgcgagtagttcctgccgagcaaccggtctttccgccacctcggtacgtgttcgacatgttgcgcatatttgatctgctcatgttttactgcttagtttacatgtgtagatctaatgatgcgttcaatctagtttacatctgcaatgtcatgatttatttatggaataaattaaatcattatgcgcttataatttcaacatattgtagccgcacacgtagcatgcagtcctggattgcttgaatctatcggcatcggctgattgacaactaatcaaacataaccaattgaccttgaccatatcatcaatcgaacctttcactggatatataagcatgcatatacacactataggcatgagattttatatatagagagagagagatagagatctgagttgaccgccgtcgacttaattagcattcaagtttttaggagatattctttttatcttggaagcaatgtacatcgatctgccatgcaagcatgcatggatcatggatgcattatgcatatatgcgtgatgaggaagcattatatgcatctggcatctcaacacttgacttaattatctcttgaggccacaatatatagctaggataaagtagccgatcaagcatgcatgaagcacttgaaaccttgtgtgcttataagtagctagctagctataggggcagctccaacaccttgctactgcagaaaagtgtaaaaaatggctagtggatcggatgcaatgggcactttccttgcgatggcagcgttaaccttccaagtgatgcttcttggtggtgccgtcgtcgccggcggctgcaacgatacacggcggtcgtcggtcccggcgatcttcctgttcggcgacggcgcgctggacgtcggcaacaaccaatacttgccgtcgtccgaggccggagacccgatccgcgccgatcaccccttttacggcatcgacttccccggcggcaatgccaccggcagggtcagcaacggctacaccatggccgacttcattggtaattaaattcatttcctttttctctatatgcatgtggcctagctaactagctatacgtactaactaccagtggtattattcattataatcccttcgttccattttaagcacggtcaggagtttctaatgtttaactttgatcgtctgtcttatttgatttttttatgattaatatttttactattattagatgacaaaacatgaacagtaatctatgtatgacttatgttttttaatttttttttaaaaaactaaataagacagacgattaaagttagacacggaaactcatggttgtaattaaaatggaacggagggagtatcaaattgggaaagtctgttcatctctagatatgacatctcttcagggagcggacccaagggtgtagtgtgcactggcatacccaagaaatttgaaaaaaaaaatttggatcacctactccttagcactatggcctaagtccagtagataatggttctgtttagttctcttcaaacttttaaaaattccgtcacatcaaatatttagacacatgtatggagcattaaatgtgaaaaaaatgtatagtttacatgtaaattgcaagacgaatcttttgagcctaattacgccatgatttgacaatgtggtgctacagtaaatatttgctaatgatggattaattaggcttaataaattcgtctcgcaatttacaggcggaatctctaatttgtttcgttattagtttacgtttaatacttcaaatgtgcgtatgtatacgtcaaaaaaaatttagaggaggaactaaacacagccaatatagcagattaggcacatgccagaacagcatgtcaggcctgttgtaagtgttaagtgttaaacagagttgtactctctctatctcaaaatataagggattttgggtagatgtgtgacaaatcatagtaatatgaatctagacagcttctctgtctatattcacagtattaggatttatcatatctacccaaaatcttttatattttggaacggaagcctggagtagcaacaagtagcagtacatgtgtgagcgcgcgtgctgaactgttgagtgccgacacgggttttggggtagcgccgatgatggccagaaggatgatgtattcacaagcgggagaagctgattaattaattaattaagtattaactattataaatttaagaaataaatttatttgcttttataataacttttatatagatttttttttaaaaacacaccatttaacagtttgaaaaacgtgctatatatgaaaaatgagtaagttagagtttggagttgaagaatagaacagggccttgctcaacaagcacaaagcgcacaattgctatatatcatccacttattcatatttgcaatttcctctcggtcccagtttccctcaaactgaattactgaaaactaaaactattttgtgatttctgttcttaaattaagttgagtgagcaaacatatgtgaacaagagcagtgcctagtgtttatttttagtgatcaccaaagaattcagattctagctatactttgacaaattctttaatttatatctttcattacatagttgcagttatatcttctatctgacaatttttgttaattatgtataagcgtctgaggcttatttgtatttgtatgcataaagacttatatattttcttttaattgacatgtgcgggcacacccaacactagtttttcctgtgtccacaattgcgtctcttcatttttacttatagcctaaaaatcatcaaaaaaatattaacagaatagattcgtgataatcaccaaaataaatattaataaaatagatcggaggtgctcatagtggtaggattcgcatgtgtgttcatagacgtgagtgtgtgcacgttgtgagcgcctgtatttgtactgtgtttcttaaaaataaatagattgttgatatatcattgttcaaattcaatttatatatgtagaaacaaaatagcaaatttgactctgaacagaacataaaaattcactgctaaattgttgtctctaattatataggctgaattaaagttatatgtttatgatatatcgtaattgatcaagctacctatttttttaaaaaaatgacgttttaaccaacatcacaaaacgatgggggttccctcgacacaaacatcatctcctatcagactataaactaattgtgtcaagagatgcatggtaatatgatattgtnttgtgtgtggttggagcaaaggctatggggttagagatgagccctccagcttttctgtcgcttaataatagcctgatcgaagtggatgcgggtttcagcggcatcaactatgcttcagcatatgcggttatttggaaagatttgtaagtagtcaaacattccgtccttcgatccgtgttctactggctcagttctttttccaactttcctaactcaccttcctcgttttccgtgtgcacacttttttcaaattgctaaaggtatgtttttcttaaaaaaaaagttatatatgagagttgttttaaaaattcatatttatctatttttaaaaaataaattagttaatactaattaattatgtaataatatgtgctttattttgcgtgccaaagaggactcctcctcctcctgaacatagcctaagccatatatacattttcttacataaaccaaacattttcttacatatacgaccttttcttacataaacaatacagttgggaaatatttccatggaggtaaaacgagtcgaatctcatgttaatttcataaatatttaccattttactatttatcagtcgcctgattttcccaaacaccatacaggacgacgcagaatcagtatcactgccgagacaagtgcgatacttctccaacaccgtggaggagctgaacggcaccgtgaccgagcacgagctaaccgagcttctctccaagtccctcttcctcatctccgcgggcacctccgacctctaccgcatcgccaacatactcgactcgccgtcgccgtcgccgccgccgcccgacaacgagaccgacatcccgcacctcgtcgcctcctacggcgagctcgtcgtccggccactgcacgccctgggcgcgaggaggttcggcgtcgtcaacgccccgccgatcgggtgcgcgccggcggtgacggagcagccgcacagccacagccccgtcggcggttgcgacgaccggatgaacgccctcgcgagggagttcaacgacggattggggtctctcatggccgggctgagctcctccctccccggcctccgctactctgtcgccgatttctacggcttctccaatgccaccttcatgaacccgtcggctaatggtatttaattacttgacaaaatctgtcagattattcgtgaaccgtcacaatttacttcttgcatttctttttaatgatgatgcattcctaatgttagtttgtcatcgtatgtacacagggtttacgaacactgatgctgcgtgctgcaaagggccctgcaatgagcagttcggagcgccgtgtgggaaccggagggagtactggttctgggacgtggggcacaccacggagaaggccgctaagctggcagcagctgcattttacgacggagaacgccagttcaccacgccgcttaacttcaagcggttgatgggaatacactggagatgatcgagatctcctaatttttcacatatttaatagcaaatttgatgggaatacactgatcagagatgatcgagatcacattttagtttttcttttaaatttgctattaaataattctaccccgtttgatttttattataaataaaaaatcacattaacattgatgtttttaaaataagttgcacgtaagtataagagagggaaatatattcattttataaaaatctaacataatgggtaaagaggggataaaaagaaaaattcagtggtacaactgtacatgagatgatgcaaaatttaaaaatttaaaggtatagaagggattgaggaaaaacttgtgggcacatatggaattttctgaagatcaaaacacggcaaccaactaagcctagcgttggaagaaataaaagtaaaataagttgatttttaaaagttggtattttttttagttgttacaatacatgctacttagctcaaatagagcgctacatgctctgtattagttctactaagtcgtatatttcaagtaagaaattttattccaagaacctagcccattagtagtaattttttccctaaaatacttagctcattaatagcaacaacaacaataataatacttactacctttgtttttaatatatgactatgttaacttttttacatcatgtttgattattcgtcttactaaaaaatttaagtaaatactccctctgttttaggttataagacgttttaactttggtcaaaattaaactgctttaaatttaatcaagtttatagaaaaaaaatagtaacatttttaacccaagacaaatttattatgaaaatatatttaattattgatttgatgaaactaatttagtattataattatgagaggggaggggaagtagaggctgacatctaggatccacccttagtcagctgtcacgtcagacaaaactggagtgaaaaccacttaggaacctagtttgcactggttttgtaagttgggggatgtgttgtatccggttttgcagtttaaggatgattttgtaactcgatgacagttgagggaccttaggtgtactttttcctttttattttcttgtggacggccgtaagccgctaaataagccctttgtcgctgtgtttcggcccattctgctggaaagaaagttgccgccgtcgagcttcctcctctctctctccgccgtcttcagttcttcgccaccaccggggcggggggatgtcatggaccggccggcggccgccaccgccgggggagccaccaaccagcctggggagggccgcgcttccctcgctcttcttcttcctgcgccggccgcgtatgtagctctccgcctccacctcgtcccccaccatctccgtcggccgtcgcgtcgctctttttccaggcagcgcgcgtgagtgagattccggcaggcagcagccacgcacttgtcgaggaccctctccgcggccggcgcttctctccggaccgtacgtgaccactctccctggcaagcagctcgaggagatcgatgatgcatcatcagtatttctgcaaacaccctcggttgctggtggtaggttgaagcatcttgcgatttgtttttcttgtgtgctcaagtgtgattcatggacagctaagccgacgtgttacgttttattaaaatctagggatttcaagctttgttcatcagattgtctgcacaaattatcgagctcttgttgacatagttgccttatgtgcccattctgctcttgaattcttgtaaagaggctgctacttccacctcaattttctgtactctatattaatttgccatctgaaaaggagagatcagccatcgccaagggaaaagatcaagccttcaagatcaccagggcccctccaaggacgccccatgatcgcctctccgtgaaaattgcacatttctgtttaccatcgacgtacactacgtctccatttaataattttctctccatcttttattagcatgcaaatttactgatggtccattcatgtcagcgaaattgcgtgtgttgtgaagcgaccaattttttttggcactcccaccatttggttcaaacgaccgaaattagctgcaactgccaccgtgaatccattatttccaccgacagccttgtccatgtcagaataatcaaatataattattgtgacgagtggtgtatccacatcaaggaaattaattttctgaccttgagataagtgcgtcatggaaaattgaatttccccgtgcacgttagtaaaatcaatgacgaccgtcagagctagtccggtttttggtagtttagctcgaaaagtgatcagtgaagacatatgcattactccctcgatgctatgataaatgatactccctctgtcctataatataagggattttaggtggatgtgacgcatcctagtacaatgaatctatatagacagagacagaatgtgtcatatccacctaaaatctcttatattatgggacggagggagtaacacattacaaccctgttgctatgatatatcccaattaaactagcttgttggaaaccaaaaaaacataaatctgctaatggtgcattttattatagcgtgcacaatagctgatgtgctgtgttaacttgatcatcaggctgctggaattcttgcttgctggcttgcacaggtagttgggaaaataggtccctagaatccattgtaattgtgatcctacaacctagagaatgtgagggtttttgaaaaagtacggtgcgacattcgtccatcacggctcgtctttctctgtgttccgatgctacttgtcatcgtccagataatattgcatctcgtgtgtcatgaacgcaattaagctaacctatccagcacaaaagaacatcatcgacttagcttgatcaccgactgcaggcaacaaccacaggttcttttgtgctgaataactgaatgggtgaatatgttaaacatgcaatattatgatatatgccaatatgccatcgtatggccatacatccagtgatcgcacgtgtaacaatcttacagctacacaatattcactgccacagaaacgattttcctggacagggaccttcagattgcgtgcagacggtaactcgtcgcatctgggaaaatcggctc

SEQ ID NO: 5147 - DNA, 13921 bp, Oryza sativa
ataggaaacatgacttaacatcagaggaaaacatggcttggcaatgaatgatgtgaaattttgtctacaaaagataacttatcaattatccactacttggacacatgactaatacccaattcaatactagcatcttttaatccattcaagcgtgcaaaaatgtttgatagaatgaacagaacataacaagttaatcgaatgaatatacaaactcaccagctgaagctggaattaggtatacccccatcctaatcttgtggactgtgctaaatagttgacataatagtgcgcattacccaccagctaggttcatatcatccagctgcaattataacaaacctttccataccattaagtaaatatgtggtagatcagaaggatctgtacaattattcgagttgaatcattaactaactcatcacaaggatcttggagacatacatacaactttagagggaaaaaaatctatatttatcagagagttacaaccctgttaaccagtaagcatataagtgcaaaaagaaaggaaggcaagacttctaactgaaaattgcattgatatatcacatgctacaatcacttttacaccatacaaagctacatcaatctgcatttaatcagtcaagtataaccattgtccatttcaagcagcaatggagaatccgattggaacgatgagcaggatgctgcgcagaaagcagagtatgcaaggccatccaatttctttaattatactgcctaatcactaggaaagtatgaatgtgaaacccccattttcttaaagagtcagaggtatttatccttgattaattttagtatctcctcaattcttttgatgattttagggttcatcaagtcccttgcttgcctaaggagagtgccttctctgctgttataatatgcatcaacaatagcactggcccaagtgtgtaatacctctggactcctgcaatccactaactatgtcaccaagacttgacaagagaaaggaagaacagccacagaatctattatgaaagggatttcaatatattgaacacttacgtgtataatgtatcaacattatccccctgaagttcaggcccaggagtaaatgcgtcattcaatgcactcaagcgttcttctggatcctcaatcattataagatgctttagtattctgatatcctttggcatttgtctctggagattggctactgcagtcatgtatagatgaaacattatatctttagcctgcacaatgtattgcattccagtgagcactcaaactgatgaatttgtaaattaggtacatatatggcatagctactctatgttccaaatggtacttgaatgcttttctgttttacctcagattttgtgatgtcagtaccctttgcagctgaccaagcttttgaaagcattaagactaacgcagaatccaattcctttttctcagctaagtcatctatctttctgcatgcagcatccacggaaggtgaattcagtatatctttcaactttaattcagcagcactcagagcttcaagactcccagatgtgtcatcatgagcttgtagagcatctacacaatcatttccaagttgtgccaattctgcaagcaaaccagtcaaaaaggaaaatgataagctcccaaaatactaatggctgaaaataaagggaaaaaaatatgttccaactatacaagcaagtagacccatgctacatattgtacaatagcatgatatacattcagtaaggactgagaaaactagaaaatagctgttgttggtggtgtagtgtatctatattcctcgacatgtgattcatatgggaagttactagggccttaatacaaggaaagctatgcagagtaccaacatatgttacaataaaaggccaaatgttgcaaatagacgttcttgtgtatgtctcacctctttgtttttcagggtcatcatgataagactctgcaacataataaaggtggttgaaaaattccaccgtgaaatctttatggcgcttagcaataacagaaccaatttcatcagatggtgtagattttactacttcaagtagttcattatgcctttgtacatcttcatctatctgaaaagtgagcgaggaaaaaaactgttatgaataaaggctaaatttaatagttgaaataaagcatagataggcttcctggaaaccactaaagtgaatcacctctttcagttttctagcaagcctgagaagattgtgcttcatctcagggtttgattctgcatctgctctttcctgacagcgtttgaaaaaatgtggccttatgttatcccattccctgctaaaagacaataactttctccaatctgttggtgtaggcttatcgaccataaatacaccaattaacttgtcagatattttaatcattttttggttttctttagacgtctggtttgtcttggcaacccttcctgccagattatcttcatgtgatgaaatactcgtagcaacatttgtagatccactgcttgagggcatgttttctgtataatcctcaggaactgctgtcacatcaccaactgcttctagattagaggttcgtggttggcgttgactaagaaacaggtgacctgtgatcagaaaataaacacattgagggtaaaaccttcaaaattagatagatgccccatatacaaaaaatctatggagaccatcagatacaagaatagagccattacagatggttacactgtggcaccatgcagtgattcgtgcatgcctaataggttgacacaagagagactaatgctgagatttgattgtttcattgggcacatggtaaatcctgaagggatcaaatgccagcaggataaagacttcgtttcaagtggtaaacctgaattctaacacacaaaaactagagcaaccacagatagaattccagaatatacagtatggtcacaggaaacaaccatatagggcatatgcatgaactattgatgctgttaattttcaagactattgaacttatcagtaaaattttgcacctacaggagtactacagaagaagaagaagaagaagaagaagaagataacacggcactaaaaccttaaaacttatagatgttgaaggaaaacaagaataggctagcagaccattagaggatcacaaagtaagttttggttacagaattggttaatcgtctagtttgatctagtttcagagcagattgattctcaacaaaggactcaaatcctcagtaaagttaaacatcataccagcaaccatatttacgctaaaccttcgtcctcactcatcattgctatttacacagcgctattaatttgaaattcaaaatggaaaagaaccgaaaaccatatgacgctgaactctccccctgtggtaagaaacaccggactcacgaccgattcagaaatgccaaaaaatcttaatggtacgagctccaatcgtatgcgcaccataagctattcaactggaagtaacggtggatctacttttgagctctaattgcaacgattcccgctcaggtgaagtccaattttgcaacaactcacctttggaggcgacgggggcggcggcggcggcgccatgggagcggaggcgacgggcgaaggagagggtgcgggcggcaggaggtggggtgagcagggggaggccggtgggcggcgcctggcaggaaggggcggccggcatcgccattggcggcggcgagaggaggcgggcgtttgctagggtttaagcggaggcgtacaagtgggggcaaggagtggctgggtggataggggagaggtgacgacaccgcgagcgaggtgatctcaccctctcgcctcatcactttctttgtcatcttgttgggttctgaattgcgaaacacaccctggaatttggaagaatctacaaatcaggtgcccgattcgtagtaaaaaaaaaaaagttaattcgctcgacttggcccgtatcgatttgttgacgagctaagccagattcagctaacgagtcaaacacaacagcccaagtatccaactatctaacagtgatgtgttaatatgaccctataaaaatattaccatatggcctaggcgcccagcccatcaaggaaaaaaaaaaggtaaaaaccttataaggagagaagaacatacaggacacctccatccctctttttagcacactcgttcacttgaatatctgctcctctttgctctcgctttcacaccgtcaactaggtcacattgttgaccgcttataggccgtagcggcaccaagcccccaagcgtcaccctattatctttgttggcctcccaccatcgctaacccttcacctcagttggccccagccactagccctcttggccttgcctctgtcagccctggccactggtcctcacctccggcaacaccaagttctaggccctcgacaaccacctgcccagccagagtctgaaatgttttgatgcaatgttttttggacatctattatctagccaattgtctctccgaaagagggttttctgtccattgcccagggtgatttttatgcaggcttggaaaaagtggatatccactgcattgtaagggagatccatttgttctcaaggcctggatgggtttgtccaccttagccaaatccatcttaatcttaaggccgaggagaatttttatagatctatgatttcaagtccacccagctactttggtctgcaaacagtttgccaattcaccaaactagcccctagcttaacattttctggctcctcacctttccaaaggaaagcccttatgagtttattgattcttttgaaaacccatttaggtattaaaagagctgacaaatggtatattggaatggaggacatgactaattttaccagagtttctcttcctgtggagctgaagaatttgcccttccattctggaattcgcgatccactcttttcaattaaaggtaggaagtcaactttcctaagctttcttaagtgaagagggagtccaagataacttgttggaaaagattgtattgagccaggaaaatcttaggtgagtgattgtacatcaatgttgtcacaggcaattggcaaaatctacgttttttttgcacattgttatttaatcccgatgccttgccaaacacctgttagagattaagctttacgataacactcaataacccttgtggtccaacacagaacatcgatgccgggcctcaactaaaccctatcactgatgaggatcatcggtgacgggtgctcacttaccgccagtcactggtgctttcgtcctacgtaccctagctagcggtccgatgacaggcgctgacgttaatctgtcactgcagatgtcgaaccaccgccttctctatccagccggtctatctggggtgaactttctcctaacatcggtaattcactgtgccagtgttatcgcccatcgcccgtatcttctggtggcttgtggagtgggattgggagtgggagcgaggatgggcgaaagtagtgggtagcagtatggctgggttgattgatatggagtacaaactaagtgtagcaatatagtactccgtccgtcctaaaataaatgcagttttgcactattcatgtttaacggttgacggttcgtcttatttgaaatttttttatgattattatttttattattattagatgataaaacatgaatatactttatgtgcgactaattttaaaacaaattcataaaattttcatataagattgatggtcaaacacggattcccacggttgtacttatttaatttgagattgaggtagtacttaataaccactaagggattataatccatcttaagactaggggttacttgcgtatctacagttgactttaactccgtgtgattataactacacatcagcttgctggccagcctctcccatcaagagttcattatgcagcgtagcagtagcactcttgcggtgatggtggtgtcgtttgtagtgctgctcgccggtggtgcaggcgcggcggccgccgccgtggcgcagccggtgccgctcttcgtgttcggcgacggcacccttgacgtcggaaacaacaacaacttgcccggagacgaggacgtcggggatcctcctcgcgccaaccacccttattacggcatcgacttccccggcggcaaggccaccggcaggttcagcaacggctacaccatggccgacttcatcggtaggagcagtatatgcatgtggacaaaacgtctataactttttcgaaaaaaaaaacacaatcatgtacttttttctgtctacaaatatatgctttaaatttgatccataaataaaaccattgctaaggtggtgtttggatccagggaaactttagtctttgtatttaaacactaatttatagtattaaatatagactacttacaaaactaattacataaatgaaagctaatttgtgagacaattttattaagcaatagattcgtctcgcaaattagtctaaaattatggatggattttattaatagtctacgtttaatatttataattagtgtccaaacatcccatgtgatagggacttacaagttttagtctcatctaaacagggtctaattatatattactagtcctatgaatcatatctcgtctaaatttcttcacatctcttcatcccaagcatccttccaacccgatgcattttatatttcccaacaaatggaatatacattagttattaactgttagccaagaaagtgaaatgtttgagtatgttttgagttttgactagtaatgcacgtccatgatgcatatgcccataagctcatttaattatacatgatatgtatggcaatgcggttgaacgcagcaaagtacatgggatatgagatgagccctccagcttacctgtctctctccggtccggtcaacatggacggttttactggagtcaactatgcttctgcagatgctggcatacggaactccacagtgagtcaactctactccttttttcctttttaagcaaaggagcttagagacacagtacgtcagtaccatgtgaaggtgttttttaaacacaaatctacaccactattattgtcacatatcaaatccttatatattattgtgttcattactgatttaataagatttggatgtacgactagtttgcatacattaatagatgatcttttaagaactgagtgagtacaaaataacacatattaaagctacaccatgggattttcgtaattaagtatacatgcacacgttattaagaaggttacagttaggtcaagaattttacgttggtctctattttctaatatttcttccgtcccatattataatacatatattttttataattaaggtatttaatgatattttgaccattatttattctacgttatgttttcaacaaatataaaattagtatcacatgaaaaatactttgaactgtgaatgtagtgatataacatatatatatatatatatatatatatatatatatatatatatatatatatataatatagcataatatggttagtatgattattaatcaaaagttaccgagtttaatttttcttaaaaagatggtgtccctataatttggaatgttaggagtatgtgttaggggcacactcacatactcggtgtccttcacttgtatgcgttctgtgtgtctgtgtctttcatccatcatatatggcgtgacaatgtcaatgttatgaaatcaaatcgcccaataatcagcatgatgcatacagaacgcaggcttgaccatcccactgtcgaagcaaatcagctacttcgccacgacgaggtcacagatggagtccaagctggggcgcctcgccatgagcgacctcctctcgaggtccctcttcctgctcgccgtcggcaccatggacctcctcccggactgcaactacttcctgacgttcccgccgtcgccgccggacaacaagacggaggtgcagcggctcgtggagctctacaacgccagcgtcacgtcgctatacggcatgggcgccaggaggttcgccgtcgtcaacgtcggcctcgtcgggtgcgggccgacggtggacacgcgccgcggtggcggcagcggcggcggcggcgggtgcgacgcgaggatgaacggcctcgccgcggagttcaacgcggctctcggggcactcctcgccggcctccggtccgagaagcgtcgccttcgctactccctcgctgatttctacgccttctccaacgccaccttcgccaacccatcggctgccggtaaatcctgatctctcttctaacgcgcacaaattaatgacaccattttgtcctcgcaaaaaagaaaaaatgacaccattttggatatcaacacacgtatgctattcaatatatttgtaactttgactgttttatttctattgtaaaatgagacctttttatgtgcttggaattaattaggatcgttgatctctaatgatctaacacttcaaagagagaaggtactaggagataggtattaaaagggtgggctggaagctggaaggttaaaatggtaattgagttttattaattgactagcaaaagtgcccgtgcgttgcaccgggtgattacggagtgtgtatattgaccaaaagtgttgtttggtctagcaaaagtgcctgtgtgttacaatgtgaagcgtacagattagaaaaatatgcaattaattaaaatacaaattcgctgaaatatttggtatttttaagtaggtatgtgtataattaaataaatttacaagtaaagcaagtgtgagaaataaaatgacatggttaaatttaattttttttaaattctccatgattagttacactctttgaaattatatttgaatttttcagagcttaattgttaattttattaatacaaacgtcatttaacaattatttacttggaaaaagaaagaaaatacttccttttaggtttgcttcgaaataaacacattcaataacttataattgtaatgcttctgaaaaaatgagcactaaaaatgaatttattctctttttttgggcctgagggacctaaaatagacttatttccggcccttgccggtcggtccacggccttttgtgcacgcacaagtgcacttcccctccccaggccacaacctgggcttgggccagaaaagtggcctcactctcgatccctcttgggctgatttcggcctggacgacaccgatcgtccgatctttagggttttgatcggacggccgagcgtcgatatcggggaaacaaaacccctccttctcctcagccgccgaaaccctagcccatttccctccctcccatctcacatcgccgccctcccctccgcgcccccgagcggcggcgacgacgcccctcttcccgcgagcggcggcggcggcgccctcccccacaaccaacggcgcggcgccctctccccgaacaacggcggcgtggaggcggttgcggcccggcgggagcgggaggggcggcgggccggacctcgcctccgccagatctggcggcatggaagcggctgtggtctggcgagggcaggagaggcggcggcgtcgtctctttctctctctctgtgcatggtggggaggtgcggcagtggtggtggtggcggacgtcatggaacgccggtcgggcctcgcctccgccagatccggcggtgtggaggcagctgcagcccggcgggggtgggaggggcggcgggccggacctcgcctccgccagattcggcggcatggaggcggctgcggtccgacgggggcgggagaggtggcggcgtcgtctctttctctctctctgtgaatggtgtcggttctcctggtgatgctaaccgaataggacttggtataacagatgggagtttgtttcctatttttgtggaatcggacatattctttttttttcccgatttttcttttaccgcgttgatgaatcggattcgttccggttttttttcacccggtttttttgacggacgatggaagcacctcttattttttaagtagtagtagagttgatgaatcggattcgttccggttttttttcacccggtttttttgacagacgatggaagcacctcttattttttaagtagtagtagatttgtacggctaaggacaaaatcgtcttatttttatatctgtatcctactcctatccgttacaagacaagctgcattcatgcagcacaggaggaagaacggtgtgcttcttttcgtagttaaacgtttatatcatacttttaccgatatgtacatatacatctgcacacctgctcaccgccgtacgcgcccgccgctcaccgaggccgcacgcgcccaccggtctcagccgcttcacacacgctgaggtcgctgctgttgtatgcgccctccggtcacagcaaactaatgcggcagtcggtcgtcgtctccgccaccgcacgcgcctgtctcggccgcccgtcgtagccgacgtttgcggtagccggtcgtcatcaccgccgccgcacgctggtcatagccattgctcgcgccagccggtcgctgccttgcacgtgcttgctggtcgccgccgtcacgcgcgcagcccctgctccttgcatccgagctcgttcaattgggattggagttgattagggttaagcactgaaatcgtggaaagggaatcgtgaacactaggcaacggatggagaattggtgattggtcaattactaatctatcctttgtagtaataatttttgttcctaaattaccctttgtgaattaacggtggataccaattgatttaggaggcaccataaaagaccgcttgtaaaatatatgaaaattatatacgatcatacggccataagtattagtcagttaaccttttttattatcaaacttccaaaagtgtggccatgcagatatttaccttaaaaaatactttcatatataacgcccataaacgtgggttttgtgaacttgtttaaataaaaaattatggtcaaattggcatattgaagactagaaaaaaagttcacacgacatatatttatgaatagaatgattagttttacgaaaaatatgttttccatatacgaattgcacccgtccaatcgaatttttttttaaaaaaatagtggcgtaaaattttttaaaaaagttttgtcagtctaaatttgtaacagtttaacttagcatttttctcatgatcgaagggctctaatatttcattttattccttacctctgatttctccaagctctgaatttctgatacggctcgttataattttgcagggtttgtgaacatcgacagctcgtgctgccccgggccttgcatgcccttcccctacttcaaccaaccaccctgcgacaaccgcgcgcagtactggttttgggacgggggttacaccacggagcaagctgccatggtggctgccgctgcgttctacaatggcaccgcaaagttcaccacgccggttaacttcaagcaactgatccgaaggaaaaagtgataactccacgctcgatctcatgtagcaaggcacggcgcccataaaaaaaatcttacgacattcgatcaataataagttaaatgttctcctttagaatggaagaattttaataagaattgatacaattactgacatttcaatggataagtggtttgtttatatggattttgctatcttcaaacaacattatatgtaaaggcgtggtcaagatccctagtcaaactgtttttttttaactcatacttcacacaccgacacattgtgagtggacttagtacacatttacactgtgtgggaaactcctagtctggttaaattcaacactactacaaagggagtcttttacccctatgctattaaaaaagttgctgcttacctgtgtgccacaaaaaagtttggagtcacctgtatgccatgagaaaaaactttcgttgacccgtgcgtccaccttctgttagaacttaacagttccatagctctgacatgtgggaccatgtataaaaatgactaatttgcccctaaggattttcagctctattctcctctcccgctatctcccgtgagtgcctgctctctccccgttgcgctgcaagccgccgcaccctaacctagccgcacgccgccgccgcctcgcctcgccggagccggagccgccgccgcctcgcctcgccggagccggagccggagccgtcaccgcctcgcctcgccgaagccgtcaccgtctcgcctcgccggagccgtcgtcgccgccaccgtcaccgtgcgcctaggccggcgcgccgctgcgccaggccgtcgtgcctcctcctctcctcctccagggcccacgcgttcccgcgtcctccctcgtcgcgcggcacgtgggcggcacgcgcggcgggtggtggttggttcgggagggcggcgtcgtcgtcggtcaccaggtggtgcggcgccgtcgggccctccgtcgatggccgccaccgcagatgagcgagtgagatatttgcggtggtcacgtgagattcgaatcacgatgtgctagctgcggctactgctctcgtgctatctctcgatctctcgctctcgctcttgctctctcgtgtggggtttcgagatgcatctgtatatggtttggagttctcgtcttttgcgagaaacggaatttggaattatgcgattgcttttggaaattggtgccctttggaagctatatgtgtatgcttgattcgaagcattaaataaaaaaaagggcatatgcttgttttcatgtattggacaataatacctgcccacatgaattcctgtcactcacaccaaactacaatatttgattacccgttattttttggtatgcaatggtcatacacctgtttttttcttttttacaaaatttatttctgatttttccttattttttccaccattttctaatttttcccacattttcctaatttttcccggatttttaaacatttttaaaatttattctcactttttctgatttttaccttttttaaatattatttttcatttttctggtttttaacgcttttcctaaattatttttcacttttctgattttttaaacccattattgtacacaagggcaaaactgtctttacacagcctctaacacctctgttatgtctccatccatccaaaatggcacacgggtcaacgaaagttaggctcatggcatacatgtaactccaaacttttttttgtgacatacaggtaaccaacactttcttaatagcatagtggtaaaagactcccacaaaagtgttaatcaccgtaagcttcccacctaagctaacatggactagttgatgcacgaaccgatagggttgtattaatatcggtttatgacataaactggtagtgatatgcttcaatcatatttcacgttcgtaccacaaattaactgaaaatgaactatatgctgtgacactaactagcaactgacattattcgagagcaacactattcactcttcactcccggttgggaaacccctttattactcccggttatacaaccggaaccacgaatccgggactaaaaatacccatatttagtcccgggtgaaataaccgggagtaaaaatgtatttttagtcccggttggtgttaccaaccaggactaaaaatggagacaggctagttcagttgctccttttttttattgtttttaacactgaatgttgatttcactccattcccaaatcatccccaaatcccaaatcatccccaaatcgtgaaattttaaatcgatcatcacatcacagatcaaaagaatccttcaaatcctcaaatcaatcatctccaaaaacatcataaattcttaaaaaaattacatcacaagttctaaaaaatcaccacaaatacatcacacacaaatacatcttagatctgaatcaaaatcaccacaagtatcatctcacacacaaaatcaccacaggtacatctctgcac

SEQ ID NO: 5148 - DNA, 6952 bp, Oryza sativa
ccgtgcgccaccgatgctcgcgcgcctgccgagccgcctccgccgcccgcgctcctcccgttttcgaccgcctctgctgacacaaacaccaccgtcggccgctgcgttcaatggcagatgggggaggacagagaacaggaggaagatgggggaacgggaggaagatggggaggaaggggtagttcaatggcattttggtgtaaatactctaaaataattaagggtagtgggtcttttgaggtggagtggagttgtagagcagcaaaaacccagctcaatccccgtagtacaaatttgtggagcagctctgccaactccgctccaaaatattgagaatctataccgtttggcacagctccagctctaggtaagttggagtagggagctggatctatgccaaacggggagtaactcaatacaagatatttactccttttgtcccaaaaatataggtagctgtattgagggatcactacaattaactccctgcatagtaaaatatgttccatctagtttgaaggtttaccactcaattttaacgttcagaaacacaagaaaagacaagccaagaattttagcgcatgggaagatctttgattgtgaaaacaatatggtagtatgtataaatttcctatagtaaattcaagtttggatatctggggcattggttttggttcctttctgggttatgtctctagagtctaaaccagacatgatttcattggtttgactaatgaaacagtgcttatgattggacttgaaccaaaaacaggcagagtatcattcttttttgtgaattcaatggttgagtgaccctgaaaagctagaactgaatcatacaaaaaaaaaacaatattccaggttcacgatgctgttccaaattgatttcctaaaatgctataaaacctcagttgacaaatttcagctagcgggaagatacaaatatatacctcgtacatggattcagtcaataaactttctaatattgaccttaaacctcgagctccagtgttcttcgctattgctcttttggaaataagccgtaaagccttctcagtaaaatgcaacttgacctataatacaatgatgtgatatgaaaacaactaattaaatggttatacttcagaatattctgactctaaacaaagttccagaatttgtaagaaatactcgcttacatcattcatttcaaacaactttgtatactgcctgcctagggcattctttggttttgtaagaacctgcagtgaataaatgtgttaagaaagatcaattaattcatgtacgtaggacctagaatgcttaacaaagtataaggaaataaacttgaatgttgccaagtaaacttgaacctgcagtgaataaatgtattaagaaagtacaattaatttatgtacgtaggacctattatatatcgcacttcacagacagataatgcctaatggagtatatagccagtgtttttcaaaatcaagctgtatggacaatgtgcaaaacttttgcggtcacaaggcaaaaatacagtgattgtattttggtaaaaccataaaacaaagtcaactaactggccagtaactgaagtatgtctcatcaactgaaaattatggcagcatgcgaaccaatttttgtttgtggcagatgatggcacatcttacccgaaaattatggtagagttgataaaaaaaatatgcatgacaccaagaaccaatctgaacatactactaaaatacttcttggataaatgcttaaaaggtacgcagaaaccttgaagaaagcaggatagccaataaaaattggcagtctgtgattggaacaataataaataataaattgaagcaacatgtgccctttgacagaaagaacaattaaagagacacagcacatgcatgcatcgcaagttacctcaacaagttggtcttcactaagggaagatagactaacaagaatgggaaatctaccaacaaattctgggatcaatccatatgcaatgagatcaccactttcaacctgcatatatttcgacaaagtaagaaccctaaatatttcaaaggattctaagcatgacaagtcacaaaaccaagtatatgcattcttctacttgatcactcactgattcgagtaacgaggatgtgatctcagcatttatcacacccccagtccgcatatttgaacgaattggtgcttggaaaccaatggaagaatcatgtctcctattaaagattcgggtgaaacatataataagaaaactcgaaagactttcagcgtaaaacataaatgatgcaggatattgaaacctttccgaaatagtcttctccaaatcaacaaaagcaccaccacaaatgaagagaatgttttttgtatcaatctgcattgcaaaacaaaacagcataaaaccatattaaatagtttaacaagaacatatgaaggttctagttgtgcaaaagccaactggttgacactattttaggtatgtaaataaatattttcgtttacatgacatagttaaaaggggcaatgagaatttccattattatattgcactgcattaaacatggagggcaaaagtgttgctcgaaaagatgttcatagtagtaaagtgaagaaaactaataaaaacaaagcatcttttctacagattgcagagcaagcacacaaggtatcaaaaaacaaatggtctatttccagacaacagataattcaactcagggaattcactatcttctactagatgcaaggaataaaacagaggttctctgatgtcagacaaatatgaaatagatagcaatatggcaaaattggttcataggatacctggatattgtcaccccttgggtgccttctagcccctttctcaggaacactaacgacctatcttgacagcataaaagcaattgtaagaagatcagtaattaaaaaccttatgcgtcatcagtttttaaaaatactaaaataatcaagggtgctatcccataaataactaacatggtaacacttagattttcaaagagattaatctatgcctatcagcaaaattgaaggaaagagcagctttacgaactctatgacagatacaatgaggaggccaagaacagtttattgaccagtaagtatgctgatctttgtggcttaatccatgttgaactacggaattgtatggtcaacattttcataaactagcaaaataacttagctagagtaagtgataacgataaaaattttaaaaagaagcgcaagaaaaccccttaaatagacttctggttactccatttaaattaaatatattgatactggcgctcgcaatagattttacatgatcagaggcaaataagttattgcctcaatggtttggattggacaatttaatgtgttttgcaggttccacccatgcatacatggctggagaatcaaaaggcagaaggttatcaataaaaacatgcagtacatagttcaagataacaaaacattatgaagccaccaacaaattttagcagctagacagggcatattaactactccctcagtttccatttacatgtcactttggtcactttaaggtttcaaaatacttgtcactacacacttaccaatgtagttatttccattttgccctttgtgagtctaaaatgataattagttggcatatatatttagaagcttctagattatacatcccactcaagtaggagcccttttgtcatgttaccttgaacaagttgatttacatttggtttgtatgcatggtcacaagtgacaaataaataaaaacggaggtagtaaaatgtaagcctggaccaactcatgtactactagcaaagcgtagcaacaaacaattttgcacacagggttaagtaaaaatatgccattcatattctatgttagcaatccatctgaaataagatttggcatcagcaagctatcaatcaaacatcctaactggactgttccttgagtataaattggagcataacaacaaataacgacaagctcaccgttccctcaagcatttttagcagtgcttgttgaacaccttcacctgaaacatctctactaaggttgatgctttcagcctgcaagacactgcaacttcaaaaatccaaacaataaatatatgatgaattgaccctagctaaaatatcagtaccttctttgttattttatcaacttcgtcaatatagacaatcccttgctgagcagcagctacatcaaaatcagcagcctggggattcaaaagggaacaggaaaagtgctatcaatgaagagggtatagagtgctagcatcagcactggtagaaaggaatttcaaactcactgtcctagtttctgtaacaagcttaatgaaccacttaattcatctcctagaaagagcagttacgattaatctaagcttcctctatatagacatcatttagcaaatagccaattagaatcatctgtccttattaaagaagtcttgaacccaggtccaacacgaaagcccgaatagatagtagctagatgcttagatctcttaaacccaaaaaaaaaaaaacatcttcactctagatcataaagccaaaatgaattcatgtaataaattctatgcaaaggttattttatgatgtgctggagttaagaccacaatcttgatagttgcagttgtgaacatacacgcaggtatgcctagagttgggagcatgtggaacaatgaccacattaacatagaaacagtctgttagctaagtcacaacacacatgaaatctttcttagagaactaaaaggacataaatatcttatctgagtacatccagttctatggtcaataaaacacaaaatttagaattttcaggcaacggtgtcattacaacttttcttaattaccataactgccaacattaaaaaaatagtcatatccaaatttctatcttacaatttgcatttccccccagggtcagggcgaccttgtttaactcatttcaccctttttgtaccataagagcttgtgacttggaggcaaattcgaatgtcgaatatgggttgtctccactttgaaatatcatattgttatagtggctttcaagattttttatagttttgtttcaattcttcacatatttaggcactcagtagagaataagagggataaattatatgtcttaacagtttaacacttgcgctaatggtagaagaaaaatcataaggttctctaagcaactattgcaatacatgcaagtgaaaaggaaagactatataggccacaatgtcagtacacagaaattaaccataccgctaggagcttatacaggatagattcaacatcctcgccaacatatccagcctacaattggaaaaacatggttaaagaaaaggtgaactcctgagcaccagcatgagcacttattaaatcaagctgctatacgacgctctcaaacaaaagcattgcattttccagactacgattaagtactctattggtctatttaaaatatgccacctaagaacacagcacccataataaaaagtaatgttacagcaaaaagaatctttagaacacatgtatggctatgagtatactaagcactttatgcccaagaaagtaatgaaaacgtgtacaatacaataattacataaaagagtataaagcacatatcatatatacatggatccaactggtaccataattttgggaaatcttatgatattgctcccccttacagtaaagccaggaatggataaaaattggatgctatatcaggagaagaggaaaaatgcaaaagttaatgaattgataaattaagataattcatctaacctgagtgagggttgttgcatcagctataacaaatggcacattcacaaaccttgcaagggtttttgccagcaatgttttccctgactttgggaaaagattttagaatcatataagtaaaacattcatttgataagaaataaataatatctaccatcatcttattcgttgaatagaaaatggtctacatgagagagataaagtacagatgtaatactattgcatggtctgtaaaagaaagaagtgatgattcaaatgaaaaaccaaccatcaactagtgctatattaagaagtttccaaatgcggtctcatgtgctggcacctggcaatttggtgtgatcggaagtgtttctacaatatattaaagtttataccatatcattattaataatatgcatgcctactattgatcataaaaaatactagtattcatttagacaagaatatttttatagtgcacacgagttctccattgagacaatttttcattatgtgttacaaatattgcagcatacagcactaatagattgaatgattggagcatgtacccgagcctgtcggacccatcacaaggatgttgcttttctcaagctccactccatcagtatcactcgcgcaagaatcagtctcgctacaatctccagcagacctacagtttgaatccaatttaccacctgaaactacccatacgcaggacgcagcaagtctggcaaaactggtatttacacaacaccaacctgctggagagtaactcgcagtgtatccttttatagtggttataaactgctacagacagtacctgccaaaagacaaaaacaagtttattgtttcgatttaccggacaaaagcacataagagtcactacaatcgcataagtgtaaggctataagcagcgacgacgtaaacctctagcctacaaaactagaataagaaatcccattaggcacaaactacacccacccatacactatcaacactgttttgcagtaccaagtgaggctgaatccctaatccaaattaagacaactccactcagagtggaacgcacagagaaacagcataaatagttcaccttcttggcgcgctcctggccgatgacgaacttatcgagcccacggcaaatctccttgggcgtggggaaccgtcgccccaggttggagccgccc

SEQ ID NO: 5149 - DNA, 12932 bp, Oryza sativa
  unsure (1)..(12932): unsure at all n locations
tttctgtacaacaagattggccgatgaaaaatacccacaattccctcgatacaatagatcctagattcactcctacgatactgtatgctggtccgaccgatgtgttattgctggtcagaccggacgcatcgatcggaccgacgggtgtaataccaccagtccgactagaggcagcagccgatccgattggagggacatcaccggtcagactacgctcggcatgtttcgtagaatcagctcatgtctggtgctcctctaaaagacattgacatgtggggtccacgggctgactcaacaagattggataaactgcctcctaaaccgttcaaggagtcaatttgtaatggttttgtgagttggaggataggttatagggatgcgattcaaccatgggcatgagttgagggaagcaaagtagacttagggcctgttcactttgatgaaaaaaaaaaccttaccaaattttggtaggcaacttgccaaaattttggcaggatttcttatatagttatcaaaatttggcagcaaattaaatatagtcacttttttggcaaatttactaaaatttggtaaggttgaaaatgacatcaaagtaaacaggcccttattacccacgggaatggtgtggggtgggctggtaatataagcccagaaaccaatccatccagcccagcaactgcgaggtcggctgctagtctaacgtgcacccaagccatcaccccacacgtgaaaaatccccgctccacccgcgccgcgccgcgcccaggtagttcagccgcgcgccaacccaagctcgctcgccggccggaaatggcgctccccttcctcctcctcctcgccttcgccctgctcttcccgctctccgctcccccgcgctgctgctccgcggcccccgcctcctcgccgcccccgtccccgcccccttcccctgcggcggcggcggcggccccgcgccgcacgccgctcgtcccggcgctcttcgtgatcggcgactccacggcggacgtcggcaccaacaactacctcggcacgctcgcccgcgccgaccgcgagccgtacggccgcgacttcgacacccgccgccccacggggcgcttctccaacggccgcatccccgtcgactacatcggtacgcgccccccaccttctcgatcggcggcgccatggctgtggcccctttgctctctcgtgaatcctccccccccccgcttcaaaggttgcaggtggttctggaatcgtcgatccgatgctgctttgcctctcgtacgcctatggatgcagcatgttgtgggtttagtgtaatctgggttttgggtttctggtatacgaaggttttgcttagttgttggttcctatgaatttggggcatctgatctcatacatcgggggtatgtggatttttgcccaacaattgctgaagctgaagagtaatcagttcatagcactctcctacacagctgaccacctggatctcacatacatagactcctgcggcttcctctccttgatctcacatagcaatgttgtgggtttagtgtaatctgggtatttgggtttctcgcatgcgaggggcttgctcagttgttggttcgtctgtgggtttctgccgaacaattgctgaagctgaagagtaaccagttttgcagcacaaccaccacagtctgggcatcatttgatcctgctgttcttagcactcctgcagagctgaccacctggatctcacgtatctatatagaatcctgcggcttcctctccaaatcagtatccagtatccaccaccgttatcagccgttgaggcaatgcattggcagaatgccagaacattaagaagtgccatcataatgtacaccattagtccatgcatccagaaaacattgccagaatcctgcaatgtatccatttgatagtcctgagtcccgaccagttgtctacatgctccagtctctttgccaccacacactgttaaatctctcttgtccaatgtccaccacattctggacagtttcaaggtcctcacaggaagcacagctgcacaacctttgttaatgttgctttaagaaagtcatatctactcattagtttctttgggagagtaaggagggaaaaggcataggaaagaaacatttaactagggctactggctcactatgtgaaagatgtttcccttcaatttcatttagctggtgttctttatctcttttgcccgtctctgtcagtacttatgtttttcatgaatcaatagtatcttgttctttcttctgtttttaaattattttttccgtgatttcttaatcttagacttttttgtgcatttgcagcagagaagctggggcttccttttgtgcctccataccttgaacagaacatgcgcatgggtgtcggcagtgtcgacctcagcaacattgatgggatgatacaaggtgtcaactatgcatccgcggcagctggcattctctccagcagtggttctgagctggtttgtcctcctaacttcccaacaactctatttcacgcttataatctagcaggaatgtctttgtgagacccttctctagaggacgaatcagaaggagggtgtttcaacaacagactagaagcaatgactcttctcatagtgtctacatcctctctagttaggaagaatacttgctcaaccatttgaactaatgctgaaagattctcctgttcggctgctcccttccttccatgtgttccaactagtgtggattatcagggcatcaaattcccttcttagttcctaggaattcatgacttatatatgcttcctaccagatgtgagattgtctacacgagacgattgatatgctggtgctgatggggggtttatttatgctgctggccttgtccaagtttgcttgtgaagctacagtgctataagttgtatggttgttttattttcctgcacgcataaagcaaaaggagatatatgtagccatctactcaaagctaatttatcataatttttttattgtctgaaactaaaaaactgcatttgttctatactatggcttttgggatgatcaaggagttagtaagaatcactgatccggcaccaatgtgatgaaattgatgtatatcatcctgaacattccattttcatatcaatctttattcctgcttatgttgttgaatctccaatctttgtgcccaaaacaacaaaaacttgtggagctgcaaatgctaattttgtcatttcaataaaacatcatggtggtgtctaaagaggagaaatgtttacgtatgaacattgctgcaaagttttcctttatgtggctatatgttttaactttctataaaggattggagcctcttggttagagtcaagcttgttgatttgcataccttttcattattcttaaatgtacttgaaactaaatcgacatgatcattaactatataacaccagtctaaagaacaccaatctaaagaacacacttaatgcttctctatgaaggtttctcttttggtatgtaatacttgctcatcggatgtatccttttttgttactattttgtctcgtgaactatacatttgaagattattttgtggtggtattctttactactgcggcattccagcagctgtaaaagtatgtgcaattatactgttaaaaaatctccaacattggcagtcccctagcttggaatctgtcgatattttctgtgtttatgttatgatttcttgcaaacatattttagattcttaaattttaatggcgtggttgttctagcttaaatatgtttagaacaagggatgtgacacctttactttgtgcagaataaaccttcatgctgatctcttgtgtatcaagccttcaggctaggggtgtaagtggctaacccgcgaaacccacttataggctaaaataagccgcgaacccgtttattttgacctataagtgggttcgcggctgacccacttacagccctacttcaggcacatgaggatcaatcatttcatagtgtgactatttgtagttatctgtatggccgtaaataatggcctctatattgttctgtattggagtatctctctactatttttttctctgaagaagagcattcttttacctatttttggttttcataatttaatgtgatgcataatttgattctgttcttttttagataaaggaggctaatttgattctgttcttgcaattgtggatgcactgcagggaatgcatgtgtcgctgagccagcaggtgcagcaggttgaggacacatatgagcagctctctctggctctcggggaggcagcaacaactgaccttttcagaaagtccgtgttctttttctcaatcgggagcaacgacttcatccactattacctgcgcaatgtgtctggcgtccagatgcgttacctcccatgggagttcaaccagcttcttgtcaatgcaatgaggcaggaaatcaaggtgtggttattgttctccagtttattctctctgtgcaacatttcttgcctccttatgattccagttttagttttttgatcagtgtgttgcatattgcccaaaggctgtagtatcgtgcttagcagtggccaatgttgtgagtatgaatttgatccgtaatttacggcccgtaaatattctgtgcttgaaaggtatctgctctcagttccaccacccagatgtgaatagttctttgtactcctggttaggaatatgtttgagaaaaggaggagtgtggacctctggggactgcagatacatgaattatggaaaactagctatgaacattaatttttatgtttcaagggctagaaaattttcaaatgtttatagagaaacctgatatagtacactttttctgtaggttaaagttttcaaatggtggatgagtttaaaaccgtgtacagttttggactgaagcttctttgagttactgaaatcctcaggctgtacagtttttctgtagttatgaattaggttaaaaggataggagggtatttcatctgtacatttgtaatatgggaaagttaactgataaatacatggaattgattaactcaatggatatttatatcgttggctgttagcagttctgtggtgttatgtactttacattctccgtctaccgtaccttagtttcagatttgaggtagtacgttgcaacgttgctcaacaaggacatacttgttttttatatgttcattttgaattcttaacattttgatcagataaggcggccccaaatctgatagggactgatgtaaagtcgatactgaatattgtcttggactgaatactgtgtttgagtcccttagttcttggtctgcgcatacttccagagtggattgtactttgtactgcctcccatttggaagtgcaagctaaatgcgtgttacttttgctcaacttgtaggacaccatgcacactaccaatatgcccatgatcttaccatgatacaaacataattctcacatcatgcataaatgcataatgcacaatttgattttctccctaatttatcccctttccttttttgaacggataattttaatttgcaaaagaattggtaaaaatggccccaaatttctattcagtaaatctttggcagagcatgcgatgcacattgattgaggctgcatgcgccatgagtttatttgtactgtccaacatttgagagcagaaatttctgttaccattgtactcatccaagttgacttgagatgttgctttcttgtttcttaaccttagtaaatcagttacaatgatgcatttttttattatttagccatatgcagttcttgtcagattagattattaagctatttatatctatatataagagttctgtacttcctgcagaatttgtacaatatcaatgttcggaaggtcgtcatgatgggcctccctcctgttggctgcgcacctcactttctctgggagtacggcagtcaagacggggaatgcatcgactacatcaataacgtcgtgattcagttcaactatgccctgagatacatgtctagtgaattcatccgccagcacccaggctctatgatcagttactgtgatacttttgaggggtctgtggacatactgaagaatcgtgaccgctacggtgagcagatgtatcattgttactactgtcagattgcctttctgtccttagggaagaactcacattacgatggaatcacattgtgcaggttttctgaccaccactgatgcctgctgtgggctggggaagtatgggggcctgttcatgtgtgttcttccacagatggcgtgcagcgacgcgtcgagccatgtctggtgggacgagttccaccccacggatgctgtgaaccgaatcctggctgataatgtgtggtctggtgagcataccaagatgtgctatcctgtggatttgcagcagatggtaaaactcaagtagaactgaaccaacccttaaactccattgtagttacttgctcagcttttgtgattttctgaccaaaaaatgaaaaacttaacaaggcggcacggagaagtgtatatcttgagagctagtaaaattttttcgtagatacagatttgtgtagaaataccatgttcatatgtgggcactgcactgtaaaggatctgtatggccaaactgcatgaggtgcttggtaggtgaacataaaacattgctgagaactcacctggtgtgcttaactccccaattctcacatgttttgtttaacttctgatacggttatagatttatggtgaaatgttattatgtgttgcagttttctgcttttctggtgaatccatatgggcaacatcaaaggtatttccaagaacacaagttttatggtactctggtactagctatgttctgttatcaactgatttatcctcttatagatcaaaacactgcttccactgcctcctactgcactaatcaacaagcagtaacatcttgtcctgctttacacggtcagtttacaaaatacagccttgcccataacagagagacaaattacaacctccatatcaacatgccccttaattacaatcaactcctcagctgaccaccttgtagcttgtttagattctgatttgcaatcctatccttccaagtgctgacagctggagctctctctgttgctgcaactagagaaactctgaattccaaagctctgtatctgaagtcctgatgctttagcaagctgagctatctctcttcccatggtttggccatactcataagagaaaaatataaggaagagcatggagagtagctgagtagccatggatgctacaactcttcatcatcaactccagagttgagaacaaaactggggaatgccattgttatgtccctgaacacgaaaatcgacaaggcaatacatcagaatttcatttatagttgaaagcaatgtaaaaggtaactacggtgaagagaaacctgaaaaattgtagatggtacttacttcaggtatgggagggtcatgttcttcagcaaagcagggtttttacttgcgaacgccttccattcatccgggtcgatcttcccgtcgctgtttaagtctgcttgcttgaacgtctgtcaaaaagtagcataaattcaaacttcagttatatggggaagaaataaattgagactagtattacatcttcatgtgctttacctgatccacaatctgctcaacagcgtcatcagaaaggagcagatctgattcattcagaatggcgagcaccatttcgtacaactgcttgattcataagggaaaaaaaaagaggtttcagtaactttaggattttctctgtcaaaatgaaaatgcagtacaaatattgttccgaaacaatactttgtatctccagttttccacgctcagcctctggatgttttaggatttaaacaagtctttaacagggttcaatacatatattcttcaccatttatacaaccattatttatgcatgttttctttgatatcgccaagaaaactggtgtaccatcgccatcagtactgaaggctagctatgcatggaaattacattatgttttgttatttctacaaaatatagccaattagtcatattctttagataatggaagctttattgaacccagccaattacacatcaaggtgttcaatggaaagaattaaggatattgtttagtaactcaatatacctcttcacgttcgatgtatccagttcctctcagatcatacaatctaaatgcaactgcaagagggaatactgtcagatgccaaaccaagaagtgatatatgaataaaatgaagattgatatgacatgaacagaagacaaaatttgactgcaaacaactccaggatgttgaaaagcaaatcatgacaaaagatgaagatgattcttggcttataccagaatactctgaccaactaactgacttatttctgcttctatcttttaaaaatccttgattaccagcaagtattgttttgaggtagttttaatattagcgactaagctatttcttaagacaactgagaaaagaagattgtaattaagtacaacttaaccatatgcaatgcaatgtggaagggctgaagtagggtatttcttacaggcaatcttctctgccaaaggcgtttccgggtgaaaaatgttgagggatcgaacaaactccccgaaatcaataacaccattgcgcttaagatcaaagagatcaaatatctgcttgaaatgagaagactctgtcagtctttcacacatctggaattgttctataatttaacggaaaccataaaattgtgcttaattagctcagaaaagcttttgcagtgagacagcaaaatactcagaaattcaaaaaaggcaaaccgacccgatcggcgaaaaggttcttcttgttgctgttcctgaagagtgctagctggaactcctcctgttcaagaaaatggcagttcagaattgacaaaataccagaatttcaataccaaatggtcacttttgtcaaaaagatggcctccattaaaaatgaaattcaagagagttaaccttgtgaataagcccatctttgaatatggaatggcttatcttcttgaacagctcatacagggcctccacctcactcacagaaactacaagacgtaaatcacacaggagaaagcataattaatcactctccattcctgaactgaagaatggtgtaattcagtgagttcttacatgtggtctctttggccaggatagcaggatcctcatgctctgcagctcgtttgaactgctttgatgatatgcagcccatacaaaccacacctttatcttgttgttaagaaacggctttcctgcataaagtgataacagtcacctcaaagaacaggataaagaggctgctaacaaaaaaaagtgaagtgacatgaaaaagttaagtgaaacattaaaaacacaagaaacacagccaaacaacaagacctcctttggaacagaggaattagactaaatcggatgaaaatcccataaaaattcctgcgttccaaaggagccctgaatcgacaaacacagaagaattaatctcacctagggaagaaacagaggtgcctttgaacttctggacatcaagaagaagaagttgatgagcaaaatagagggggggggggggggggggggantnnnnnnnnnctgngtgtnccaaatacctccaagcttattgcagatacaatggacatagaagaagaagatggcacatatatttatatatgcacatgcatagcaagcatctgggctccacagtgtggcacagccccagctgtgccgaccgtgtgtagcaagagttgacttgaaatggttccctgttacacgatctgcaacattaaattattactactgttttatattgctcaagttcagcatctgtcattgctgaaaaataatcagcaatggcgggaatagattaatactagtagtttacagtgtgtatctagcctagatgtagcaatatatacttgttgagtaatggaccataagaacgacggttttgttcttagttaagtgatgttaactaggccgtaccaaagatacatgcatccaaaacgggcgtattgtgattgatgtttaacgaaaaatgtcaacgtcgccttgtagctatcaagcgtggttttttttatatatatggaaggagggatccaaaggtgacgcatgctcttccgcttaacaagggatggagcgcctgttcatcaaggacctaattttggcgttattttctcccgtctaccgggaggtactagtactgggaggtacaaaatcaaatctgaccatctatcgtgagagggtacaattgagaaacacagaagagaagcgaaaccatctccggtgtcgcgccaccgctttctcatctgtttaaagggttcgctcttctcatctgttcagaagaattcggtaaaattgtaaagaaattgaatggcacaatttcctgagtgccttgtagttgcagacagcagcagaatgtatagtaagcagaactaagtgttcactgttcagggcttcagacaggcgcttaggcagccatagtgtagtggtgcaagcgcgcgtttataagaaatgtgtgtatgcacgcgtatatgagtgcctacattatattatttaaataataataataaacgtctggaacagatatcgttcaccattatgttacatttagggggacatatatgtgaaaacaagctagggggacatatatgtggaaacgagttaagtgttggaaactcatgaaaatcatacctaaaagttttgtaaattcataaaaaaaactaggaataggtgtagatatgaaatacattctcattaaatctcaagtttaaactcaacttcagttaggagtaacaaaaaagacaaatttcaggtggatggtacaagactatattcatccgaaatttgtctttttttttctcttaagcgaagttgagtttggatttgagatttgatgataatgtatttcatatctagacctatctctagtaatttgttcatgatttacaaaaatttttagatatgattntcatagtttccaacacttaacttattttcaccgttatgtcctctatatttagagcacgtgcattgttactttttaggggatctatggaagagagaaggagagagtccactctatacgttgcatgatttttctaaataggtttcaactttcaaggtagtaacaagtactagctatggcaccgaatttcaaaggagatagagggtacattccactactcatgagaggaagagatcaatccttaaatctacttttaataacaacagatctcacccgtaacacctttgctagttctctacattatagatttcttaacgaactactattctcgtggtgaatctcactcgtagcatcttcgctggtcctacacacatcaaccatgctcttagagcaagtttaatagtataaccaactactacctccaatttatctatagccattctaatagctcgttcatacaatagctacatactatactattaatacacggtcccacctgtcgtgtcttgaagtccgtgctacagctggctataaatctgtagcccgctgcccttctctcttctcatttatcttcttaaaatatgtttgtagctggcttatagcatgctattgtacctgctcttagctagtcactcagttagagagacaggagggggagagaaatggccctggcggcacggtggcgtgctgatgtacgaaccatatataggtgtagtagactaagcacaaggttcaaattaaatttgaattagttaccccggtaaaagcttgttaaaagtacctacagaaaatcagcgtaagtctaagggtaaatcaatggagaaaaaaaaacagcatatataaatcgtgcaggatttcgcatgaacagagtgtcaggcacgcgcatcagaaaccatatcgacaatgacgagctagccgacgacagcgattgcctggctgccaactaggatatatataatgtaacaagaaaattaattaattgggtgagatcgatacgtgaaacatgctgattaattatcttttaatttggtccacttgtagtaagtttgttgtgaaaaccaatgatttctaattatcaggggaaagtgaatatattaacattgcccgtggaactcgaatcttgcaaaatatttggcagggaaagccaatcagatgctaaattcaacccacaccaagctaccatgttgtttatgtacacttggctgcagatgatagtgatatactataggctgattgtatccagacatcttatactttttcagtaaagctgggcgtcagccttttgttctaaaattagggttgaaagtgattcgaataatttccatccgaccggaccttttttcggattcggatagtttcggtcggatatatctgaaaatttttgaattcggatttttttttcggatatgaaaacgaatatgatataggtgatatccgtcagatattatccgatattttccgtcggatatccgacttacacataaggctgccataatccataagccagcccaacccagaggagtcaaatcaaagttcttgaaaaaaatgaatttcgaattgaattttatgatactgaatgaactcatatgaaaaagttgtcaaaaacaaagttgtagaactcattaagatctaccaattttattttggtcatttctccatccgagtttcattgaactatataaaatttgaattttaaaatataagaaattcaaataattcttcgggtagtaaatgatttcaaatggaaaaattgtcaaaaacaaagttgtataacttaccaagatctataacttttattttggtcattttcctatatgactttgtttgaacagtttgaatttgaatttgaaaatatgacaacttcaaacaatattttcaaatactaaatgatttcaactgaaaaagtcatcaataacaaagttgtataaatcatcaagatctataa

SEQ ID NO: 5150 - DNA, 6165 bp, Oryza sativa
tactgcttcaaaatatcatttgaagttttgaaattcaaatttttaattgataaaacaaagtcacaagaaaaaatggccaaaataatagtagtaaaaacacaataacatgatagagcatgattttagaaacatttaggaaaaagaatcatccaatttggagttcttatgagtgagataaactagtttcaaatttttaaaatttattttcgcatacggctcattaacgtctgtatttttccatgcggtctcttaagtggtccgcatgcaaaaatgggctcattttggcatcttaaggagtagtatgcgaaaataccaatgcggcaagttgtggtccgtttgcaaaaatcatagggtcttgtacacaaaaatcgtttgtgtagtattgaggggtttttatatttcgattaatattcatcaccgtattcgcttcgcttcgtattcactccatatttgtattcgataatattcgatttcgttttcatatttgggtttccgattccgattttgattccgaaaaaattatgaaaacgaatataatagagctagtttccgaccgtattcgatccgttttcatccctatctaaaatatagtataggctgataaaataagatgggtcgtaactgtcgacgtttgatagtcacgactagggaatttgaatagtatgggatcgttggtaccagggtatatgcgagattgaggtaaaagagatgcagacagtgatttttatacaggttcgagccccttatctgataggtaatagccctacatcctgttggccgaagccggtgctgctctttattcatctggatcacacaaatacaataattgggataatctatctatccatcgtcgacttggcggctatataaccaactcgtagtcgatgacagggtaatcttcctcctcgaatctgtactcggcgagaacagagatggcgctagatacctcttgccggcccatgtaggtgccggatagggcatggctaggctaatctctgatgttgatatacaacggcgtattggcttgtattggcttgtggctttgtagattgtggtgggtgtgtcccctctcctcctagggggcttgtatttatacccacaggtgaccccttgtccaagtagaactagggagataaatatggatacgatctgagtagtgagtagtccttgtcgtttctatgtagaactcttcttctccttccttatccggaactccttctatatacgaggttttttttccgtataagacatggcatgtggtgggccttgccgagcttagtcgattactattgggtatccataaccctgacagtaaaaacttcttaacaatgcatgcaaaaatgtattcttgagtaattaaaggtctatatttaaagaatatgacaaaattaaatatatattaccataatattggttacaaatataataattctttttttaagtagatatgattaaggttcaaggggaaaatttctattgccccttaataaatgagggatgtttgtgagtgatggtggttaagagtaagatgaattgaatgaaaattgattgacaagtactagtattcagaatgcttatgtttatgaactaatgttaaaccctttagttgattgactagggagagtacacacacacatatatattttatcaacgcttagaccattcgtcttattcaaaatttttgtgtaaatataaaaatatttaaatcatgcttaaataatatttgatgataaattaagtcacaataaaataaataataattacataattttgttgaataagacgaatgcaaacgtataaaaaaaatcaacggtcatacattgaaaacggagggagtagcgaaagagcttgtagcctagtggttagagcctcagtagcaccttaggtcctgggtttgactccccataggagtgaattttctaggatttaatggctttgtgctttcagtggtagatgacgtacccgtcaacagcgaagcgtctgtgttaacttcgtcaatttccataatttgccggcccagtcttcgaagatgctcataggggtgagtgtgcgtgcattgtgagtgtctgtgttgtactgtgtaatttttttttttaaaaaaacggagggagtatataccaatcacctattcaaccacgatctagctagatcaccatctaaatataacaactcataattttactcttttattacttaagcaattccacttgtgaatattttttttactcaagccgtttggcagttggcaccaatgtactcacaattttactctttttacaatatctatttacatattaacactaatgtaaatcatactcaagttgttattgtgcataaaataaaaccacatataaaaccgcacatgagttatttaaactggtttcagtacttcatgggtagaatatgcagtttcatacttggggtagcagaccaacctcaatcggtagtactacatttataaaaaaagtatatgtttcttatattatatcgcagctagcgcactgtataccttatagaatgttatgatgtgcgggaatgaaattttacgtgctatgtatttgtgtactttgtatataaatgtgagtaaaaagttttactcacaacatgtggtttagcccaagcggtttttatattatgcgactttagatgatagtttgtttgaataaatttaggcagttgaaaaagagcaaaaccttgaagttctgtaatcttgtttgataaaactgcttttagaccttgtgagatgcttttctttttcatttatgttgccactaaaccatgatattgttccatcctgaaaacataaaacaattggagaagaattgacaaccacacatatattggagaaagccgaaagacgagtctttattacaagaaacataaaaagcaaaaggctaggaacacacaccaccgttgggacgacgaccggccaggcttaaacccaccaccactcaaattaagacgcaaaatatagttaagctggtcaccattatttataactcctcaataatacaaaagattaatgatttctcgaacttaatcgaaattttccattatttgtaacacgcttaattctctgcaaaatcttagtttaaaatcatccctacatatataacctgtgaatctggcatattaatatagccaaggtcgtcgagtcgtgctcgatctgtggacacgagcattctgatcaaaagaagaggaccaaaatttcctgagtgaaattaaaaggtataaatcaaacccctgtccgccgtgacgacgagctgtcagccttggatgcactgctcagatgatgacctatcgattcgtctacgtaagggcaccaaatttcatgttataaatcgttttatcttttttcttaatcaaacttgtttaatattgatgcagtttaagaaaaacataatatatatattttttaaacacaaaacatattcaatgttagatttaattaagctaatttattgttttaaatgtttttatttttttctataaataacttagtcaaactcaacaaagtttgattagaaagagttaaaatgagttatactccctccgtttcacaatgtaaatcattttagcatttctcatattcatattcatattaatgttaatgaattttgacatatatatctatctagattcattaacatcaatataaatgtgggaaatgataagatgacttatattgtgaaacggaggaagtaatatggaacgaacggagtatattcaagtcctgtgtatcgatcattcatgtatatgatcagtcggaatctcaggttgtacatgtatgtagtggtagacacctttgatagctatccattttcacagtagtttcgtgtgatctccacagcctccacagtacatgagagatcgaatgaagagggaggctctactacatatggtcacctgcggtccatctgtcccaggtcaccaccagtacatatggtcactatatatatatatatatatatatatatatatatatatatatatatatatatatatatatatatatatatatatatatatatatatatatatatatatgttgactgatgcatagtttcccatgcataaattgtggtagtcgatcgataatatagaccctgtttagatgtgactagtttttagtccctatcatattggatgtttggatactaattataaatattaaatatagactattaataaaacccattctataaccatggactaattcgcgagacgaatctattgagcctaattaatccatgattaccctatgtgatgctacagtaaacatgtgctaattatggattaactaggcttaaaaaatttatcacgcgaattagctctcatttatgtgattagttttataagtagtctatgtttaatactccaaattcatcagatatgacagggactaaagtttagtccctagatccaaacaccaccataatgcatggctgtagacgcgagatgaggaagcgtatctttggtgactagaaatttagttagatttacgcctttatggatttatatattttatagcctctctctatatatattgcatatgttaaaggggattatgggcatgcatacataagtgtattatgtgcgtatctatctttgtgttccgtgtagaagaaataaaagatgtggctacctatcttactataaagttataatccacaaatcttaaagcttaacatgcaaacatgtcacctcatcatccacaagcaataattacatacaaaacttagggcctgtttagatgcatttggaatggcaaatggcaaatggcaaaagtttggtggcaaaagttttggtattgcaaaactactagttggagtttagatgcatactaaacttttgccattctgtaggatcgagatgtcgactagagggggggtgaataggcgatttaaaactaaataatacctaatcaaatttaacctaagttgctaggcttggtgagggagaactctaactaagcaactaagttatgttttgcaaacctagggtgatagtggctcaaatatatctctaggaaagtaaatcacgctcctatgtcgatgttttgcaatcctagggtgatatgatctcaagtgtgtctctagaaaagtaaattgcacaaatgtaaatgcgacaatcaaatgagacaatgagacaagagatttttcaccgaggttcggaaactcgccggtttcctactccccgttgaggcgagcccaactccaccgctcaaccacgaagccaccgcacgcccccttcgtcaaggggtgggcaaggcgggagctggcccacggagaggactacccaagcctcgatcactcggggtagttcttccttcactccgaaggtggtgaactctaaaccactcacaaaccggcgccggacctcctccacaatcttctcggagaggtcaccgggcaactcctccacaagccgtctaggaggcggcaacctccaagagtaacaagcaatgacccggtgtggagatgatcaagtgccacactagctctacaatggaagcaaatgcacttgactcttggctaaacaaccatctaacacactagatggatgaacacaaagctcaagtgagtgtgagagaggtgcaaggagtgtatgcaattgaattgggtgccaagagagcccccttgctgctggtgggggagtatttatactcccacccaccaaaactagccgttgggggcgaaattccccaactctgtgctctgccggtctgaccggaggtatgcggccggtcagaccgtgctactctgcaacggctagaaaactagccgttgtagccctgtcagagggccccatcggccaggctggtcagaccgacatggggtgcccggtcagaccggcctcggctcggtcagaccgccatcggctcagtctgaccgactacggctccgtcggctctgtatcggccatcccgagcagcatcatctcggcctccaggaggccggtctgaccgggaaagtgccgccggtcagaccgccactatgtagccggccggtctgaccgcccctggtcaggccgaacccagtgaatttgtgtaatgaaaaagagagcacaaatgaaaatgcaatgacctaatgtggcaattaaaatcatctctttgctaggtcattacccctcttaatagtgcggcgaaactaaaattaaactagc

SEQ ID NO: 5151 - DNA, 4347 bp, Oryza sativa
gtgagagataaaataagtttcatcttgatgaaatcttatctacactgtttccaatacagtttctcttgcatgttctacctacgaaacaacaaaaacaaaaccacatgtatcgtatgagctattttaattctcaattaaatgctttgttgcttatgtggcactactggaaacatgcaaatgatacttcctcagtcccatattatatgggattaggggttaaaagcgtgtctcaaaatataagggatcaggtaggtagagtactaatacaaacagacatcgggcagggagagtactaatgcgaacagagagctgtcggtggaatttgtccctaccttatcctctcaccgagtcacccatcgaccaccgcttgttcccctcccgattttctttgccttttctctatcccctccatcagcgcctccctcccacccgcatcttcttccacctccccccatccatccgagctccttcccttccacctcccatccgtcgacgccaacgccggtggtgcggcagccaacggtggcggccaagggcggcggccaacctggcccatgcgccaccgccaccggtgcccaacctggcccgtgcggtgggggcaccgccggggaagcgaatcgaggtggtgagggagcgggagaacacacttctcttgttcggccgggccgccacgcacgccgccgtcgccttcgttgagttcaacgtccatgtatatatatacagcgtagccgagttcgatgtgtatgcttccatttccatgttgttggtagtacctgtgtttgttttggactttgcattggatgtcagtttacgctttggattgtttgattttgacaccgcagcaacgcaatgcaagatttggaagctagcgtgggtatgacttggatgtagccattgattggtgtggtactggacatgaaatttgcagcaacgttctagccagtgaactatatgggataagcctcacaagtaggagtatcaatttaattgactcttgtcaacatgtgcattaatgtcattgtatactgagaaatgcttactctgtctttgtgccaatcatttgctggcaagcttgtaaacccaaatattctctcactactaatgcccagtactaaggactggtttggtttgtggtctaaattggcattaccaatttttatcaatgtcacattttgtcaacttttggcatggctaattttggtaaaggtaaaattgtgtttggattgaagccaaaatagcctaaattaactgttgaaatggcatattttcttaggcatgccaaaatttagctccaaaccaaatagacaataaacactattgaagttgacaaatattggtaaggccaatttaggcctcaaaccaaaccagccataagtaaatgaggggtacatgtgtcttttgccagcctccttattttggatgaatagtgcccagtcccatataatgtgggatggagggagtacctcccactgagaatgacctaacaataacaccttttgatttgatttggaagctatgtatcaagcaaaaaccaaagtttgaattgaattacaaccattcgctttcatagaaatccaagaaaataagtcgatttgaactttaatatccgatactgtttaactctaacccactgaatcattcatatttcaatcttgagtttttcttttatttctaatagtagacaaaaacttcaacaagttcataaaaaaatccattttacatttttactccctccaattcacttaatcatgtaactttttgtttattttacttctaaactatcacaatcggtccaccttacatcttaggtgcctacatcttaatagtatttatattttttttctttatacaagttattttaagatgaaatattttaagccataaaaagatgataccattctcaagttttatattctcaatttttttcatggctatttgcttgaattttaaaatatctatgtttagatcagccttacgtaatttcaacctatgtaaaaaaatattgataggtaagttgtaatgcatttattcatcctactgaatttcagtgcaaaatataagttatataaagagaaaaaagcagagaaatagagttatggagtaaagtggatcagtttcaatagttcttagctgaagattagtatataggtttaagtgctctggtaaaatattctttatagggagtaaaatgaactttttttcttcaaaaaagtattgtttgcacggaggagtatttactactgtcgacatttgatgtctcgactacggtatttggacagtatggggatcatcggtgctaggatatacgcgagactgaggtaaaagagatggagacagggatttttatacaggttcgggcccctgaattgtcaggtaataaccctacatcctattggccaaagctggtattgctcttattcatgataatcacaccagtataatgtttggggtagcctatctaactgttgtcgacatggcggtctgacgatctgactcgtagtcgacaacagggtagcctttctcctcgaatccgtgcccggcgagatcagagatagcgctttcgtctctcctgacagtatctggagacaccgtagggtactagccgtgcttatccctaaagtcgatatccggcggcgtgtcttgcatatgtaggcttctatgttgtggcttctatgtcaattgtgttgggtgttgatcctctgtgtatgttgattgaggtggtcgtgtgttgattgtcatccctctcctcctaggagggcttgtatttataaccatagatgtccccttgtccaagtagaactaggaaaaccaatatggatacaatccgagtagttcttgtcgtttccatgtagaactctggttgtctttccttatccgaaactccctccatatccggagtcagttcccgtataagacatggtatgtggtgggtcctgccgagatttagtcaactactattaggtatgtggtatccataaccctgacaactacctagataaattttgtgtgagaaaaataaattcaattgaaccagaaaatggtgtttaagacaattgcattcaaactattcaattgtaaactgaacttatcctggttataatatataatcaactgctcaatgcagaattgttttgtgacttttttaagttcacttattgatttatgaaatccaaaaagaatcatatcactacaatggtatttttaatttcataaattcattaaaaaaatcttgcctgctgcaaaattggaatatttcagctaactattcttataaagtgataagcgacatacatataaacaacaatatgtccatggtgactttattaatatcagtcaagtctctcaaatgtgctcatacgaatatgatgtgcttacttatatccatagggatgagtgtgtgtatacaagcatctatgtttttactatgttttgaaaataaagtttgttaacctaagaagatacatttatttagttttaaacattttttctcttattatattttgtttctcctaccaatttttttttctataatatatatactcttatagaggaaatagtagtagtagttgatgataataataatattattattaataatgtatcacatctagttctagatttgttttttaagtacgtcatcttcacatcatctaaaccactataaattcggtgttaacattgaaaagcgtacggttttgagtaaaatagtgtctgatgttgacattgatttccataattttataatagttcagggccggggtgatcttttctaaatttgtgcgctgagattatttctttttcctcgttttaattaggatatcgtacaattaaatttcaagtcttcctggtggaatgaccggattaattaaattgctcgtggttattccaaatttcaaaggctcacgcctgcaccactcaaatcgaccaaacaaacgtcagaaaacttctcaaacgagtactacatccagaaacttcatactaccacctctgttgtcgattactactccttccgtctaaaaaaaaaagacaaacatgagtttccatgtccaacgtttgactgtccgtcttatatgaaatttttttataattaatatttttattgttgttagatgataaaacataattaatactctatgcgtgacttatctttttaatttttttcatatttttttaaataagacggacggttaaacgttggacacggaaacccagggtttgtctttttttttttacggagggagtagttgctaatgttgaatgtggcgcataaattatttttaactattatataatgataaatggaagttgggtaattatataattataataatgatcagtacttaaaaa

SEQ ID NO: 5152 - DNA, 12594 bp, Oryza sativa
ggcctcggctcggtcggaccgccatcggctcggtctgaccgactacggctccgtcggctctgtatcggccatcccgagcagcatcatctcggcctccaggaggccggtctgaccgggaaagtgccaccggtcagacctcactatgtagccggtctgaccggccagggcacgccggtcagaccgccactatgtggccggtctgaccacccctggtcaggccgaacctagtgaatttgtgtaatgaaaaagagagcacaaatgaaaatgcaatgacctaatgtggcaattaaaatcatctcttgctaggtcattacccctcttaatagtacggcgaaactaaaattaaactagcaaatttgatcgccctacacctcgatcaattctaaattaaagcgctagttttaccgtcttctttccctttgctttgcgccgtcaattttaatccatcgataatcatccatgcgcgcatatgacgtggacctaacttaaaatgtatagctcaaagacaacggttagtccacaattagtgcttgtcattaattaccaaaattaacaccgggggcctagatgcttcacattctagcactaaagtgagagagagaaagagagagggagtggtcccaaagcactttttggcataatttgctactatgtactagcaaatgccaaatgccaaattgccaagttttgctactagtgtttagatccaaaatggcaaaaagtgcttcaaaatgacacaatatagagtaatagcccatacccataccaaatatagcccaatcctccttaacctattaaatatgaggtgactaacctcactactactagacccaacccacaaaacataaaacacgctattctcccccttttggcatcaagcaccaaaaaggtcttcactcttgtggaggagaaggaggacgcgccgaagtggaaggatgagaagcatcacggcggcgatgatagacaaaagcttgggtactctccaaggtttggacgcgagaatccaatacacccaccctagtatgcaatcttcccaccgaagtattcaagttgccaacatcggtgcgcaagccacgaacatcctcacgcaatgcttcatgcccggtggataagcgttgaatgctttcactgagggtattaatagccccaaggaccgggttaaagaagtcatttggttgcattccaaagtaggcatattgtggatggaataaagtacttggatcatacccttgaggaggaggggggctgcactttagcttgcaccttgatcaaaagttggttggcgcacacgaggagctctaggggaggagagttggagacgaggcttgtactccttatgttcttttaaattttgaccaatttgtcccaacttgctttgaatcaacctcattatgtagggagcataatagattccttgtccaatagtcccctttgagatggcaatctccttcatcataaggttgataacatcaaaccgacgaccatccataatggcatcaataacatgccaagcaactccgcgtatgtcatcattgttgccgtatcttgggaggatggtggcccttactatgcggttgatcacacttgggagagcccttaaacccgccacctttccatatgtgtgccttcccccttcttcataaaactgagaaaagtgatcaatgggaaagagattgtgggtgtgctcatcatgaaggtcatccccgttgttgaagcgaatgtgcaagagctccttgaattcacggcggttgatagagcatcggagggtccccgacatccacttcattgcatcacaatcgccggacacccatacggtggcatagaattgccggatgagatcttcatcaaaaggttgcttcatggtgacaattctatcaatcccaatggtccggaacatctcttgcaaattctcaaactccggtgtctcaccaatgtgcctccaagagatccatttgtgttcggcgaaggctttgttggcatacacttgtacatacacggacttttggaaccgtgtatgaaatcttggatcattacaatcgttaggcctccggaattgatcatgatgacggaggatagtgtattgttgagcattcctcaaattaagcacaaattggatcgaggaatcgagaggactcccatcatcacttgcctcatcatcttcaccatttgcactctcattgtcatcaccatcatcacttacttccatctcatcaccctcaacattttccatattgtcctcatcactttgaacatactcatctccgcttgattcctcattctcactaacgggatcgggcgtgggagcacgacgaccatgccgagtgcggggaggcatagctgaaaaacaaggagcaaaggatggatgagcaacaattttagaaaccacatagtgaagtgggaggaagggcgagtgctgcctgtcaggggcggtcagaccgagagccacggccggtcagaccaacggctcaaggccggtcagaccgccggccctcggccggtcagaccgcgtccggtcagaccgccactgacacgagcacacccaaatccttccacaatccacacaaatgattctaaaaattgctagaacagtgttgcacaagattggaactagaacatcaaggtgtaggtctattgaagcaatgggaaaactacccttaaccctaaagattgaaatagaccgatttgagagcaatgcacaagagggagagggatttaccggttgaaggagttgaatcacaccaagaaactaccctctattggtgcaaatcgatgaacacctcttccttcacctagggttccatgccatggatcacaaactcaataagaactcaaatcaatccatggaatagagagaggaagaggaggagatttacttatggtgtaaccggagtgattttgacagttgaaccggatggatttggtggagggaggtggctagggtttgggagaggagagaggaggagtttttttgagttggagaagagaagagatgagatgggatgaggaggggtcgggtagaaggaggaggaggaagaaaggacaaagtcctgggcccaccatccctggccggtcagaccggctatacgtggccggtcagaccgccaggatgcagccggtcagaccggttcctagaggccggtcagaccgccaccaccaggccggtcagaccgcgcatatagcgccggtcagaccgcctggccccccagccgactgtgcatagcccttgcacagttcggctacccccatacaataaaattcaacaaaaatttgaattttggagcaattttgaaatgtgtgagttgaaatattgccaaccattcataatatttgaaatttatgaagatttgcaacaaaacttacttgagtgctaggaggtgaccatttatggtctataggggtttttgggcgaatttgattttcaaacaacttttgaaatatttggattttgaatatgatttgaataccaaaaacatttcaaatcctcctctctaccaactttgttttgaaacttttctcagattccttctcaaactcattttggggtttaatctcattttggccaaaaacaagaatctagattcttcaaaagagagccaaaatagcatttttcattcaaaaatcatttttctagcaatgtgaggcttggaaaacatatagggacccttttgaaacattttccaagagatagttttcaaatttcattgattttgcaaaacttttgacttatgttgacttgggcattttgaaaacactactagcacttttagttgatttgctcacatataaaaggaagtagagcacatgcaagagtccaaaactcccccttaatgtgacatgctccattttcgcaatgaagaaccaaatggcaataagtccaaagcataagagcaaataggagcaaatatacaatatgcaaaagaagcaaccatggtgcaccatctcatgccacattagagaagtctatgacatttaactcattcctcaacttgcaaaagcgggtttcatcaagaggcttggtaaaaatatcggctagttgatcctcggttcttatgtggctaatgactatgtcacacttggtaacatggtctcttaggaagtgatggcgaatgtcaatatgcttggttctagaatgttggaccgggttattggctatttttatggcactatcattgtcacataggagtggggttttggtgaaggatataccatagtccaacaaggtttgtttcatccaaagcaattgggcacaacaactacccgccgaaacatattccgcctcggcggtagagatggctacggagttttgtttcttgaatgaccatgacacaagggatctaccaagcatttggcaactaccggatgtgctctttctatccactttgcaaccggcataatccgaatcggaatagccaacaagcttaaatttagcaccttttgggtaccacaagccaatagtagaggaatgctttaaatatcttagaatcattttcacggccactaagtgacactccttaggagcggcttgaaaccgtgcacacatgcaaacactaaacatgatatccggcctagatgcggtaaggtaaagcaagctaccaatcatggaacgataaagctttaaatctaccggtttacctccctcatcaaggtcaagatgtccgttggttgccataggtgtcttgatgggcttcgcatcctccaagccaaacctcttgagtagatccttgatgtacttggtttggctcacgaacgtcccatccttgagttgcttgatttgaagtccaaggaagaagctcaactctccaatcatggacatctcaaattccctagacatcatatcaccaaattccttgcaaaatacctcattagtagaaccgaatatgatgtcatcaacataaatttgacacacaaagaaatcatcaccaatgatttttgtgaaaagagtggtgtcaacttttctaattttgaaatcctttgacaaaagaaaatctctcaatctttcataccaagccctaggagcttgttttaaaccataaagagcttttgagagtttgtaaacatggttaggatttttaggatcttcaaaaccgggaggttgttcaacaaagacaagttcggcaatttcaccatttagaaaagcacttttcacatccatttgaaatagttttatatcaaagcatgatgcaaatgcaagaaggatgcgaatagcctcaagtcttgccacgggggcaaaagtttcaccaaagtccaaaccttcaacttgtgtgaaaccttgcgccaccaaccttgccttgtttctcaccatcaatccattctcatcttgtttgttcctaaagatccattttgtccctatgacattatggtctctaggtctttcaaccaaagtccacaacttgtttcttgcaaagttgttgagctcttcatgcatagcattcatccaatccggatcacaaagagcttcatctacatgttttggttcaagacaagaaacaaacgagtaatgttcacaaatcgaagcgacacgagatcgagtttgaacacccttactaatgtcacccaacacttggtcaattgggtgatccttggaaagagcggtgtgtattcttggaggcataggtggatcttgtgccttctcctcctccacttcaacttgagcttgacttgacgaggcggaagtagatggctcttcttgagtggaggtggatggcttgtcttccacttcaataggcttgacatctccaatagacatgttcttcatagctctcatcaagccttcatcacctacatcatccaaattctcgtgcccctcttgggagccattagtctcatcaaattgaacatcggcggtttcttccacaatacctttgttcttgttgtagacccggtatgccttgctatttgaggcataacctagaagaaacccttcatcacaccgactttcaaatttggttagtctaacaccctttcggtaaatataacacttgcaaccaaaaactcgaaaataggcgacatttggcttcctcccagcaattagctcataggaagtctttttcaagagacgatgcaaataaagcctattggttgcatggcaagcggtgtttatggcttccgcccaaaaggaatcggaaacaccatattcatctagcatagtccttaccatctcaatcaatgtacgatttttcctttccactacaccattttgttgaggtgagtaggtagcggaaagttcgtgtttgataccaagatcatcacaatagtcctcgatattggtattcttaaattcggaaccattgtcacttctaattttcacaagagtgcaactaaattcattttgggccctttttgcaaactttttgaaaatctcggcaacaatagacttatcatgcaaaaagaacacccaagtatagcgagaataatcatcaacaatcacaagacaatgactattacgaccaatgctcttataggttgttgggccaaacaaatccatatgcaagagctccaatggtctagatgtggacatgatactcttagtaggatgagaacatgcaacttgcttgccggcttgacaagcactacaaagcttatctttctcaaacttcacatctttcaagcccacaactagatcacgttttgaaagtttgctcaattgattcatgccaacatgagctagcctcctatagcaaagccaacccaatgaagtttttgcaactaaacaagttttcaaatttgcttcactagaattgaaatcaaccaaataaagatttccatatctaaaacctttgaacacacaagacttgtcaagaaggctagaaacaataacttcttgtgggaagaaggcacatgacaagctaagatcacaaatttgagcaaccgaaagcaaattgaaatttagagatttaacaagagagacattttcaattgacaaatcattggagatagcaattttacctaacccaattacctttcctttgctattgtctccaaatgtcactttctcttgttcattccctcctacttcaaatgtggtgaatatagccctatcaccggtcatgtgttgagtgcatccactatcaagcacccaatggctcccaccggtgcggtagttcacctacaaaagaagatcaagctcttttaggtacccaaactagtttgggtccttggaggttagagaccaaagctttgggcacccaaatggcattctttttaccaccgagtataggggaacccacatatctagcaacaatgttaccatcatgagccttcctaagcatataatgagaatcaaacatgcatgtcttaggaggcttacctccggggcaatcactcaccaaatgcccaacctcacgacacttggagcaatacttaccatttctcttgacaaaacgagtggcatggtgagaaggtttcttatccttctttggaatgaatccaagtccctccttgttaaggatgcaccgttgctcactcataatcttgtcaagagtgttattacccttgaagcatctctccaaactcttgttgagcttagccacttgctccttaagctcattgttctcaacaacaagtgaggcatcacaaatagaaacacacgagctagaactagagcaagggctaggcatatccataagataatcacaagaggtagaaatgctagatgatgcaacatgagtaatatggcaagtagcactatcatcaagcaaatcacaagatatgccaacatcaatgtgagctccatgttgagtagttgaaaggaggttgtcatgagcttccttaagcttctcatgagaaatggtaagtctctcatgagaggtctttagctcctcatacaagacctccaaagaagcatgatccttctttagggccttgaacttgacaatctccttctcactataagcatggagctcctcaaacatactcacaagctcatcataggaaacatcatcacaatcatcatcactctcactatcactaagagatgttaccttagaggaaccctttgccatgagataaagtggagcaaagagtgatggagcctccttgatggcaacaacgatcatcttcttcttcttggagcttgcatcatcaccaccttcttcctcggacccggatgaggcggagcactcctcatttgagtcccattccccgatgaaagcctcaatcttcttcccttccttcttaagcttcttcatgagcttgtagcctccactcttcttcttggatgacttgtctccatcatcatccttggaagggcacttggaagcaaagtgtcccttctcaccacactcaaaacacctcaagttggagagagtcttattgagtcttctatttcttctcctattggagttggagccccttcctctctcctttctccttcccgagagatcattgaaccttttagcaagaaggaccatctcttcctccaagtcctcattgacttcattcaccttactcttgctcttgtcttcaacttcggcttggagagcaatgcacttcttggagggtgaggcttcctccatctccttcttcttcaacttgtacatgtcattggtgttgatcttccccaagaggcttgtggatgtcattcttgacatgtcggaattgatgagcatggtgacaagggtctcatacttctccgatagggctctaagcatcttttgggcaacctcaagatcggtgtagttgccccaagccccttgagatcattcacaatgacattgagcctcccatacatgtcattcacactctcatgaggcaacatggagaatgtctcatattggatcttgaggaaatgaagcttggcatccttgtactcacttgtaccctcatggatctccgccaacttgttccaaatctcatatgcggtctcaaggttgctcactctatcgaactcctcttggctcaaagagttgaacaaggcattcatggcttgggcattgagttggaggttgcggtgatcaatctccgtcaagggtgtgccggtgatggcaaagtctacatccacaatactccaaatatggaagctcatagctttgaggtgagtagatattttaattttccaagtggagtagtttgtgccattaaacatgggagccttccctacatggttcacctcgttcgacatcttctctctaggcggtgaagcccaatcaagagagaccaagctctgataccacttgtaggatcgagatgtcgactagagggggggtgaataggcgatttaaaactaaataacacctaatcaaatctaacctaagttgctaggcttggtgagggagaactctaactaagcaactaagttatgttttgcaaacctagggtgatagtggctcaaatatatctctaggaaagtaaatcacgctcctatgtcgatgttttgcaatcctagggtgatatgatctcaagtgtgtctctagaaaagtaaattgcacaaatgtaaatgcgacaatcaaatgagacaatgagacaagagatttttcaccgaggttcggaaactcgccggtttcctactccccgttgaggcgagcccaactccaccgctcaaccacgaagccaccgcacgcccccttcgtcaaggggtgggcaaggcgggagctggcccacggagaggactacccaagcctcgatcactcggggtagttcttccttcactccgaaggtggtgaactctaaaccactcacaaaccggcgccgggcctcctccacaatcttctcggagaggtcaccgggcaactcctccacaagccgtctaggaggcggcaacctccaagagtaacaagcaatgacccggtgtggagatgatcaagtgccacactagctctacaatggaagcaaatgcacttgactcttggctaaacaaccctctaacacactagatggatgaacacaaagctcaagtgagtgtgagagaggtgcaaggagtgtatgcaattgaattgggtgccaagagagcccccttgctgctggtgggggagtatttatactcccacccaccaaaactagccgttgggggcgaaattccccaactctgtgctctgccggtctgaccggaggtatgcggccggtcagaccgtgctactctgcaacggctagaaaactagccgttgtagccctgtcagagggccccatcggccaggctggtcagaccgacatggggtgcccggtcagaccggcctcggctcggtcagaccgccatcggctcagtctgaccgactacggctccgtcggctctgtatcggccatcccgagcagcatcatctcggcctccaggaggccggtctgaccgggaaagtgccgccggtcagaccgccactatgtagccggccggtctgaccgcccctggtcaggccgaacccagtgaatttgtgtaatgaaaaagagagcacaaatgaaaatgcaatgacctaatgtggcaattaaaatcatctctttgctaggtcattacccctcttaatagtgcggcgaaactaaaattaaactagcaaatttgatcgccctacacctcgatcaattctaagttaaagcgctagttttaccgtcttctttccctttgctttgcgccgtcaattttaatccatcgataatcatccatgcacgcatatgacgtggacctaacttaaaatgtatagctcaaagacaacggttagtccacaattagtgcttgtcattaattaccaaaattaacaccgggggcctagatgcttcacattctagcactaaagtgagagagagaaagagagagggagtggtcccaaagcactttttggcacaatttgctactatgtactagcaaatgccaaatgccaaattgccaatttttgctactagtgtttagatccaaaatggcaaaaagtgcttcaaaatgacaaaacttttgccattttggaggatctaaacagggccttatacaagcatgcaacatcatctataattcattgaattctagaaatcaacatccaatcattttccttcacattattaataattacatacaagacttatacaagcatgcaacatcatctataactagatgaataccccgccgcgttgctatgggaaattaagttgcataatatgttcaaataaaatgaaatctaaataataaaacttaaataaattgatacctatgaattttgaggcctaaaaatggttgtgattacttggtgttatgagagaagaaagaagagacaatttgaaccataaatctatcatctaatgactagaaataattggggtgatgtggcttaattagagaagagagaaatatcattaactaaactatataagtatataggattcattgaattctacaaatcaacatccaatcattttcctttacattattaataattacatacaaaacttatacaagcatgcaacatctataattcattgaattctacaaatcaggtatccataaccatgacagtaaccccccgacttcaactcaaatgaattcatgttgtcatccgcgttttctctgtcaacgttgtcatgctcacttggtcgttctcgataacaatcgagaagacatggagtactcaacatcattgaaacaagatcaatggtccacaagtgaatttgaattgaagtctaaacaactgccataaacgagcctgaaatcaacgcaaatgaacgagttgatgttctcgaccggagaccttggaacaacagtcgtcgtgatcgcttaaccgttctcagttgatcgagaaggtgcggagtatgtgactacattccttgtcttgtcgtaatcaagaatttgggttgaagtcaagaattttcatctcagcgggtacaccatcgcttcattccgtaatctttgtcgaactccaccaactgttctcgagtaatcgagtagttgtccaatcgttctcgagtaatcgagtagttgtccaaccattctcgagtaatcaagtagttgtggaatctgtgacaaagctctgaaatatgactatcctgaaatcaatactcagacagattgttagatacaaatagccccaagggtaatacaatataatatgaattttaaaattgaaaatatattgaatttgcacatgacaataaaagagtactctcgctaaagcttccatcagcaataggagtctgggactcttcctagcccccagctgtctttatggaaaaatcgtttttccacaaaggcagctaaatcttataacaaaccaagttgaagatgacgaaattctagcatccagccatgaagttgggaaaaccaattctgattacacggcttagttaatacgcattcaaaatagcacaaaggaacgataggatcgacttcaagacagggcgatataagaaaagaggatcaacggacaaatattacatatacaaacacttacagaggttgtcggagaatccatctcttgaacccatcttgtcgaaaccttgtagcaccaaaatccccatacctggcgtgccactgtcgacgtttgagatctcgactacggttattgcatggtatggagactgtcggtaccagggaatatgcgagattgagataaaagagatagatacaaggattttatacaggtttgggcccccttatgtgacaggtaatagccctactacctgttggccaaa

SEQ ID NO: 5153 - DNA, 12056 bp, Oryza sativa
ttatctgtcaaacctccccacgattcaggtgtcgctaatgaactccccgcaagccgcccatggcaggcgagcgccgaaagccgctggtggtaggggacggccgccgcatccactcctattcaccgagatccacgggaggtatgggaccgcggccgcatccgctcctatttgccgagatccgtgggaggtacgagagctcggccgcatacgcccctatctgccgcaaacctagggtgctacgcgaccaccgccgcatgtgctcctatcagccgcaagccgacaaggagtgatgcatttttttcttttttatgttaatttcagaaaaaaaaaatccatatatggaatccgggaccgtccggaccgggtcgattttaaaaaaccatggttttccggtcaatcgctcataaaatatagcggaacggtttattttggataaataaaaaaaagttgactatggcaagatgttgaacaagaacaaagtgatctcagagagcctgtatcaaatcatcacgaagaggcctatataaatccaaacgttgacacgacttgtgaaacgaaggtaaggcaaattaaaattctctcgctaatgttactacaacttatcataatactaacgtgaacatgacctaacaggaggacagtaacgagtgcaatcaaagcagcaagaggcttataggtcctacaggaagaatatacaaaccaacaaatcggactgacttcatctacgaatcaaggggtaaaaaggacataatcagaacccaaacaccaacaaaaataacaccaggtactatgctatttcatccttacatatgctcatgattggtactaattttcctcattttcaagcgcgaacggaaaaagaagctatcatgccagacacagacgaattacagggtgaaaagaagagaaaacaaagcaaccaaacactgaagaaaatatctgaatgtatgaactctctacatcatcctaaattttattacttcttttctatgtttgtgtattactgatttgacttacccttttgtagtgtacatcgataaggaggatcttatcaaaaaaacacaaaagcccaccaaagaacgccttacgaggtcaaaagaaaagaaaaacgaacagccagacaccgataaaaaattctaaaggtaatatctaaacattgtacttttctataaatctattatatagattctatgtttacatattaaaaatttgtacgacatttgaagagttgactaaaaaagaagaccctttcattacctacattaataagacaaaggataacaaagtgatggtgcatattgaagaagtgaaggttaatcggaaatcaatgaaagtactaattgaaccagaatacttgaatgatgatgtaagttcgcctatttaacaaacctactttccttttataactatatttttaatgtaactgaactaacctcaaattcaggtcatggatgcatacatccaatgtctccgagataaagagaaaggaatcaggggagatcgcaaggccttcctagagcaggccataaaaacaggtctactcaatgtagagggagcgcatgttgaatctaacaaccctcgtgataaacgatggattagagatatggcatgcgactaactaccatttgacatggtaatacttatttaagctatgtatgtaatggctattacaatttatgaatgtatcttactgttgaacatctgcagattttcctcccaactaatattacagaaacacactggtacctagccattcttaatgccaagcgacgtgaggtgcaaatactagattcgcttgccaagccaatcaatgaacatcgacccgaactagggcgtgtggtaagtgatacacttccacttgcacaattcaaattggttttgccatgttttaaccatactgatgttgcacaaaacttcctacctgctagctatcgagagaggattacacgggacaaagaatgaacacccacagttaaaacatgattggcttgattttgttattaccaaatgggaatacaacaaagtcaaaaaattgctaaagcaaggagacaagtgggtgacccgtaaactcttccacatgatattcacatttttcaattatggtaacttgttaacctaatgactcaattcttgtagcgtctcgtgtggcctatacacccttaagttcatggagcattggagtggatcttatctcccagaaaatcaaatacaggcaactacaataaactctattcatattttgcaccaatgcttcccattatgaaaaccatttaaaatgcactccctttacattagagaaaattcctatatactcctgaaaatttactcaatcccttcaatacccctgaatttgacctcattccttatatacccatgagttttcattttaatcttctctatacccatctccattagttgaccattagttgaccgttaaatattttacaacgactatattacccatcctatacatatgtggtacctactcaataaattttcatatgaaaaaaattaacttatacaaaatacaagcaatataatcatttaatgcccaacttaaaaaataaaacttattattttttattttttaaaaaatatgattaaatccatacattagtttcaccagaaaattaagagcaaaaactaaattttatttaggtttaaatttttgggaagatatacgaaattcatcaaatttgatctgaaatttatttaaaaattttaaatttgttttctaatttgtgacaaactaattacatcccctttattttttcacaacgaatcttttttcactaaatatttgttgaaaagtaattttcaaattttatgcagaactttttttacaataaatcttttttattttaatgaaataatgttttatttttaaaaattcataacaaatatttagtaaattattccttattggttttcacaactcaaataatttacacaaaacgtttctagcttttaacaatataccaatgacaataaagtaatttctacaataactaacggtcaaactaatggtcaactaatggaatgggtacgtaagggatccaaataaaaattcaggggtatataagagatcaaacaaatttcaggggcgtagaagggattgggtgaaattacaggggcatgtagggaattggacctttacattatgcagaaggatatgaaaatatttcgacaggacttagcaggaattttgatcaagtccgaaccgaacaagattaaagactgtccactactacaaaccacgatataattaccttactatgctctcttccacttattacagattttagatactccttgagtatttcattggtcccaaacgttgttgcattttgagttaattttcatagttcagattttgctacgttggggtcacagacagtgaagcacacacataaggctcatgaaatggaaagccacaacaaatccgatagccaaataacaacgatcattctattcatggtcgtaatagtaatgagaaggagcagtatataaaaccttacgcttcgggatgactcatggcagtaagctgtccgcgtcactcacgtgcatctgcttctacgtcgcacctatacaccgagaacccctttgccggcatgcagatccccttcacgcacgccaccgtcttgcatactgaccctgctcctaacaattcaaccaaaataatcaaaaaacaatacaatggtttgaagaacgagcagccattttctgcaataatcgggagaaagagtaggcttttagaggggctcacacgggagatgaaaacttcagggagggccaccattggtcgtcaacgaaaatacgaggagcagctccatagctgctccgccacagccgcataccaccggcgaatcgccacagccacacccgaggtcgctggaggcggaggaggcggatggggcagagggccgtgagggcgctggaggcgatggacgcggcgagggagatggtcgggcgatggaggcgattaatggcgtcgaaggaggcggcgagggtagggtaggaagacggcgggggaggcaagggcatcgaagggggaggagacgccaacggcgtcggaggtggagagggtggggccgacggacggcgacgtagggggcgggaaaggcggtgagggcgggggagacggacagcgacggagggagcggagaaggcggcgagggcgggggaggcggacggcgacggaggggggcagagaaggcgacactggcggaggataggacggcgacggagagggcggagaaggcggcgaggccaagggaggcggcggtgctggaggggacggagacggcgagggagaaggatcggcgatagaggcggtgagggagatggacggcgacggaggcagggatggaggggaacggacgacggaggagagggatggaggggaatggcgtcgattaggataggatagggagagggtgaacagttagataatgacaaattacataataccctacgcgaattattatctctggacaaatatacccctccacatttctactctcattaaatctggtgggagtataactatatctcaacactacgattaaatacgatcaacggttcagattaattttactacaagtataaagcaccggaacgagactcttcccaactatattgtatttctgtgtataactcccaacagatggtttggtttatgtagaaaaggtacatacatatttatggctcggtagagcacggatcgaaggacggaatgtttgactacttacaaatcttgtccaaataaccgcatatgctgaagcatagttgatgccgctgaaacccgcatctacttcgatcaggctattattaagcgacagaaaagctggagggctcatctccaaccccatagcctttgctgcaaccacacaaaaaaaaatcatattaccatgcatgtcttgacacaattaactgatagtttgatacgagatgatatttgtgtcgagggaacatccgtcgttttgtgcctgttgtttaaaacgtcatatttttcttaaaaaaattgacaagatagattaatatgggaatgtatcactttataaacatataattcagcatatataattagagaaaacaacaaatttagcagtgaactgtatgttctatttagagtcaaatttatttttttctacatatataaattgaatttgaatagtgatatatatcaccgatttatttttttaaaacacggtacaaacgcatgcgatatatatcacaatagtgatatatatcaccgatttatttgatatatatcacaacgtgcgcgctcacctctataaatacacacacaaaccctacccttataagtacctccgatatattttgttaatatttcttttgatgattttcatgaatctattctgttaatattttttttgatgatttttaaagcaatacttaaaaatgaagagatgcagatggcggacacagaaaaaaaacaagtgttgggtgtacccacatatgccaattaaaagaaaatatatgtctttatgcatacaaacacaaataagcctcagacgcttatacggagtacataacaaaaattgtcagatagaagatataactgcaactatttatgtaatgaaagatataaattaaagaatttgtcaaaatatagctagaatctgaattctttggtgctcactaaaaataaacactaggcactgctcttgttcacatacctttgcccactcaacttaatttaagaacagaaatcacaaaatagtttcagttttcagtaatttagtttgagggaaactgggactaagagatgaaagtgcaaatatgaataagtggaggatatatagcaattgtgcgcttctgcttgttgagtaaagacagttgcacagcttctcccgcttggcaatacatcatccttctggtcgtcaccggcgctacccctaaaactctgtcggcactcagcagttcaccacgcgcgctcgcacaggcactattacttgttgctactcctggctttaatccttaaaatataaggtaatttgaagagagatgtggcaaatcctagcattataaatctggacagccgcttatatattttaggatggagaaagtacaactttgtttaacgcttacaaccaggtctgacctgctgttctggcatgtgcctaataagctattatatactccctaaacccagccgcttatatattttaggatggagaaagtgcaactttgtttaacgcttacaaccaggtctgacctgctgttctgacatgtgcctaatatgctattatatactccctccgtcataaaaaaacgaatctaataccggatgtgacatattataaaaaacgaatctaataccggatgtgacatactatggtactctctccttacaaaagtctaagtcatttctttttgcaccaagaccaaaaacaattaattcattcacccgagacaaaaccaatgagcatgtaaccgataaacactaaggagctgtttggttgggctgttttcggcccgtatcagataccagcgtgaattgattcccttacatctgtttgttttagatggaccgtaatcggttagcccgcaaacgaatcccagcccaatacaaagttgattacgctccagatcgggcgttacgcgttaccgatacggaggcggagcggagcgaacgtgacctagccttgagcgccgccaccttgcagcgcaccgtcgctggcgccgctccccctgcccggcgtgcgtcgtcgacaccgctgccccctgccccgacgccgctgcccctcccctcgcacgctccatgaccgcccggagattgcccgcctcgacaaggccgacaacccactgctctgctaccttcagtccctcctccatctccctcgagttccacatccctgacgactggatctgcgagaaggacgaggctgttgagcatcaagaaggcatggcagagatcttgaggcacacgaagaaggcaccagccaccaaggaggttcttctgtcgtttccgccgtcgccggtgagaaccctcccctcactgataccaccactctttatgatgatatacttgtgatgctgatgattgatgatctttttcttttcattaacaaatcatgaagtagtttatactagtgaatcatttgtattcttgattggttgcatgtattcctgcctcagttctgtttgctttataagtttacatgagttttgtagaatctgtttttcccgattgcaggaaaaatctggaatagtagttgatggttctttcatatttgttttcgagtgtaggtaagttccgaaattttgtcggaccaactcattttactctctagattttgagaattttgattttcattactgccaggtgatatattattttgcagagtgtgagattggaaaaaaaaaggtttgtcgtgcattgccttttcgacagaattgtcatcttgcacatatataatcaatttacttatgtttcgcagcatggactgttccaaaccaatctactcgctgaatctgagtctactaatctagtagtttcactcatgtcaattgttcatccatatatttcctcagtactttatttagacagatcacaatgtatcctcttgttgtttagttcattgaacttctgaagttctcactcccagcatgggtcttatatttactcttgagtattcggaagctacatctacaagatcttgttcagagatcttccaggatgatgctaggctgatattagatacaaattcaagaaactagctgctttcaaatatttgcatgtcaaaatggatccgatatttactcttgagtattccgaaccaaacaccaccctagcttgagatcgttggatcgagattgaactgttggagttccactgctctcatcgtgatccttccacaaggattcaagtgccaattattgcttatctcatgactgctgcgaaaattagtctcgcggtgcagctatttacttgttggttaactgcctatatatctggtatgtgcataactgtcccatgggcaatttatttctttacttgttatattccaaaaactttgttagcaaatattttttttgcagctgctgttgacattgttcaacaaatatttgctctactttctgattagcatttaattttctcttgtccaggaagttgacttcagatggccctgctttccattttcttttaaaattcactttgcagaagcaaatggagggtaaatttgcaggtgagctaacttatatttcatgaaaagtgtatgattggaaaccatagaaactattccacttgttaccaattgcataagtggaacacatatttttgggtttcgtgctctcctttaaactcacagtggcatcttttatttcttttaatgtagaagtaacattataaattggattccttgcatctttgtttgagcatgagaacatatttacatgcatgtgtgcttcttaactttggagtcaatgccctttttagaatgaagcgaggacctgcccgattattcactttcagtagtttctagatgcatgttgtccaattatatcacttgaattctaaagccacatgaccttttcttgaattattcctgtacatgccctagctagagtgctaccactatccataatttctacttgagattattaaactgatgttcacattttcaagactgtatacacttcccaatgtgtgatagtatcaaacagttgcatgttataaaattgtgaatatttttacatagctttgatgtgctacacgtgtttgagaacactgctgctatgtagcttgtaatgtgccttagctttgagctacgtcacgttctaagcgctccctgcttcggaagcagccgttacccgttaccatgttccatccaaacaatgtaatgcaaacatgagacgttacagcggccaaccaaacaaaacctgtaaagtgatacattttcttcccttactgctgtagctgatcccatttacgtttgcatttcctgacctcaaccaaacaccacctaaaatggcttcttggtacctatcaataatttaatttagcacataatgattacaaataggactaaaatggctttttggaaaaattaaaaaataaaataagtcttagacttttggaaggagggagtactacgaatctagagatactacgaatctaaagacatgtatatccagattcatatactgctagctagaatgtgtcacattcggtactaggttagttttttatgggttagaggaaatagtggacttaggccatagtgctagggagtagctagctgatcctatttttttttcaaatttcttgggtacgccagtgcacacctggcacacctcctgaagaaacgtcatctcgaaagatgaatggactttcctaatttgatacaatgaataatcactagtacaacaacaattttttccatacagcccaaaagtgattttcgcgtacggaactctggcccatctgctttgaagggtctgcataattcactatttttccacgcgtgcgggcaaaatcggatttttgcgtgcgggtacttatatggtttccacgcaaaaaacaaaaattaaaaaaaattgcaaaaaataaccctagccaccgccagatctgggtggcccccgctgccaaatttgagcggggctcatctgcccgctgcgtgatctgtcgctgccgcccgccactcgctatcggcgcacgcccgccgcccgatgcctgtcgcgaggccgacgaaggcggatctgctcgccgcccgcggatccggccgttgagggccctacagcggcggatcaggctatcgcggaccctacggtggcggatcaggccatcgcaggctcggtggaggtggatccgccagccaccgagccgcccactatcgccgatcgctccctccgcctgctgcctgcctcgtgccgctcaccgcctgtctcgtccagtgaggtgagagaggagatgaggtgagagagtggagaggaaataatgaggagagaaggtgagagagaggagtggataaggatgaaaaattttgaagtgtcgagagggaaatgaggatgtaactcagactttagacagatccttaagaagcccgtctacaaaaatatattttcgcatgcagccccttaagaggtctgcctgcaaaaataggcttatttttacgtgcggacccttaagaggtccgcctataaaaatcgattttttatatggtcctcctaaggagccctatacggaaaatagaggttgatttttgtagatgcgaaattaccgtctgcaacgtatgtctcatccagaaaaaaaaaaccatttctgtaggagtgaatacctcgagtagttagtacatatagctagctaggccacatgcatatagtgaaaataagtgaatttagggctggtttgattttaccaatatttggtaatttcaatagtgtttagtgtctatttggtttggagcaaaattttggcatgccaaagaaaatagggcatttcaatagttaacttaggctattttggcttcaatgcaaacacaactttaccttaacaaaattaaccatactaaaatttaccaaactttagctttaaaaaaattggtaaatctaatttaggctacaaaacaaaccagcccttaattaccaatgaaatcggccatggtgtagccgttgctgaccctgccggtggcattgccaccggggaagtcgatgccgtaaaaggggtgatcggcgcggatcgggtctccggcctcggacgacggcaagtattggttgttgccgacgtccagcgcgccgtcgccgaacaggaagatcgccgggaccgacgaccgccgtgtatcgttgcagccgccggcgacgacggcaccaccaagaagcatcacttggaaggttaacgctgccatcgcaaggaaagtgcccatttcatccgatccactgcccaactagcaattgtttataatttctgcagtagcgaagtgttggagctgcctgcccctatagctagctagctacttataagcacaaggtttcaagtgcttcatggatcaagtattcgtgttgatccggctagtttatcctatctattgtggtctcaagagataattaagtcaagtgttgatcgacgccagatgcatataatgattcctcatcacgcatatatatatgcataatgcatccatgatccatgcttgcatggctgatcgatgtacattgcttccaagataaaaagaatatctcctaaaaacttgaatgctaattaagtcgacggcggtcagctcagatctctatccgatccctctctctctctatatacaaaatctcatgcctatagtgtgtatgtctgccaatgaaaggatcgattgatgatatggtcaagatcaattggttatatgtttgattagttatcaaccagccgatgccgatcgattcaagcaatccaggactgcatgctacctgtgcggctacaatcactaataggagaacgatttttctatgcggtcgaatctgattttcgcatgcgggtggtcggcccgcatgcaaccaagggtctgcgtgaatcgcgattttcacgtgtgggtgcttatatcgcccacacggtaaaataaaaatcggaaaaaaaatttcaaaaaaaaccctagaatcggcagcggcgccgttgctcccggccgctgcctcctcctcgtcggcggcggcgcccgcctcgtcgttgtcggcgcccacctcccgccagcctcctgtcagcgccgccactcccggcctccacgcctcccaccgccgacgcccctcccctccgtcggatctggggagggaaggaatgggaggagaggggagccggatcccacgtgaggggcggccggccgccggatccatgcggggacggccgccgcccaccggatcccgcgcctccaccaccgccgcgtggaggaggccgtcgcgcaccgccgtcgctttcgccgccgacctccacacccgcctcggcagcggcggcggccgcctcccaccagcctctcgtcggcgccgcttctctcggcctccacgccgcccgccgccgtcgccatgggctgccgccgaggagaggagaaagg

SEQ ID NO: 5154 - DNA, 9269 bp, Oryza sativa
agatcggggcacctggtccatcctttttatctgtcaaacctccgcacgatttaggcattgctaatgaactccccgcaagccgcccgtggcaggcaagcgccgcaagccgctggtggtaagggatggccgccgcatctgctcctattcaccgagatccgcaggaggtatgggaccgcggctacatccgctcctattcaccgagatccgcaggaggtacgagacatcggccgcatccgcccctatccgccgcaaacctagggtgctacgtgaccgccgccgcatccactcctatcagcctcaacccgaccaggagcgatgcatttttctcttttttatgttaatttcaggaaaaaaaaatctatatatggaatctgggaccgtccggagcgggtcgattttaaaaaaccatggtttttcggtcaatcgcttatagaatatagcggaacggtttattttagaaaaataaaaaaaagttgactattgtaggatgtggaacaagaacaaagtgatcccagagagcctgtatcaaatcatcacgaagaggcctatataaatccaaacattaacacgacttgtgaaacggaggtaaagtgaattaaaattctctcgctaacgttactacaacttatcataatactaacgtgaacatgacctaacataaggacagtaacgagtgcaatcaaagcaacaagaggcttataggttctacatgaagaacatacaaaccaacaaatcagactaacttcatctacgaatcaaggggtaaaaagaaggacaaaatcagaacccaaacaccaacaaaaataacacagtactatgctatttcatccttacatatgctcatgtgaatggtactaattttcctccttttcaagcgcgaatggaaaaagaagctatcatgccagacagactaattacagggtgaaaagaagaggaaacaaaacaaccaaacaccaaagaaaatatctgaatgtgtgaactctctacatcatcctaaattttattacttctattttatgtttgtgtgttactgatttgacttacccttttgtagtatacatcgataaggatgatcttactaaaaaaaatacacaaaagcccaccaaagaacgccttacgtggtcaaaagaaaagaaagcgaataggcagacaccgataaaaaattctaaaggtaataaacattgtacttttgtatagatctattatagattgtatgtttccatattaataatttgtacgacctttgaagagttgactaaaaaagaagaccatttcattacctacattaataaaacaaaggataacaaagtgatggtgcatattgaaggagtgaaggttaatcggaaatcaatgaaagtactaacagaaccagaatacttgaatgacgatataagttcgcctatttaacaaacctactttccttttataactatatttgtaatgtaactgaactaacctcaaattcatatgatggatgcatacatcagttgcctccgtgataaagagaaaggaatcaggggagatgacaaggccttcctagagtaggcagggctagtcctgacttttcagagccccggtgtgaaactagatataaaggcccttatcatacgatataataataatcaatagatatatatattgaattatggtcataaatatttaaattgcattcatcaataatatttatataggaaacattgaacatttacctcgaaaatttcttctgacatttctagctgcgaagtcattgataatggtaccaatatcaatttcatccaataatttcttctcaatgcataaagttatcaaaccatttaaccttttcttttttataatgtacatgtgtgcagcacaatagtgcagtcagggccttcgtcgattcgtccaactctaggagcaacatcaattgaattaattaaataatcgattttgctatatctcactcgaaagattttttcttatctctcactcgattttctcacttaaatttacagtacattttcttttcttgtaagttataatgtaatttatgaaacttacattgtaacttttgtaagttacagtgtaatttttgaatcttcgcatgtaagttttgaaatttgtattggatttggtctttttcttaaagatatggtaatttagtgtctactatggtgtttcttagttgctttttgccttttactgtgtctattggattttaatctaaagattaaaaatctgtctgatacgatcgtaaaaatcttttaaaagatgcataggtactcccttaaataattaacctaacattcaatcctagggaacaactgcaactgaatcaatttttcacatgtacttatggcaattgggaatttgagatttaggaaattgactcactcacctgaacacaaaacataccactccgagtcctgattcctgaatttactgatcgttctcctcggcagtactcgatggcagcaaagcaatctggaaagcggcaagctgcactgcaagaagcggcggctgcggctgcggctgcggcctgcgggcttgtgtcggcgggacggcgatggcgcgacatcgcgactcgcgtgaggaggagacgaggagggggttagggttttgggcggcgacgcggcaatgtcgctcctcgatcgcgtcttctgatctgatcttctctctctttatgttggctttctctgcgcgaggccgaggggccgaggctgcgccggcttactgttggattgggccgtaagccggtaaataagcccttttgtccctgtatttcggcccattctgccggaaagcaagtgtgccgccgtcgtcgagcttcctcctttctctctctctacaccgtcttcaccaccaccgcgccgccctccccttcggtctgcgccgccacgccaccaccgtggcggggggatgggatgtcatcggccggccgccaccgccggggggagggccgcgcttccctcgctctccttcttcctgcgccggcctctccgcctccacctctcgttccccacatctccggcggccgtcgcgtcgctttctttccaagcagctcgaggagatgatgcatcatcagtatttctgcaaacaccctcggttgctggtggtaggttgaagcatcttgcgatttgtttttcttgtgtgctcaagtgtgattcatggacagctaagccgacgtgttacgttttattaaaatctagggatttcaagctttgttcatcagattgtctgcacaaattatcgagctcttgttgacatagttgccttatgtgctcttgaattcttgtaaagaggctgctacttccacctcaatttgatattctattccgagattttgatgatcaatgctacgaatttataatcgatttatcaatttttgtagttccaaattgatgtttcaatctgaaattcaatgtctgatgcaatgctcaatacgacaatacccattttttggatcagtaatgcaccttactccactgatctagccgtggatgttcagtaatggggggctattatttcactggtatagttgggttacccaactcccaagcatgctcctactggcttaagaatcttaggcattcgttgaatgaaaattataaatctcaactactatatagatgttcagggacatatatagaacacatccaattgaaggtaggctacatatagaaacttcatagtctgctattgtgtatgcatttgctctcccagcactactctccagccataccttgctgacttcctccaaaactgtaaatgccttgcttctttcagctagaaagactcagctcacagtggatgtattgatcacctttaatttaattagcccatgcgcttaccctgaataaatcaactgcaactagacaagtactattagtcgtacagctaaaaattctatttaggcaagatcaaaaaaaaaatctacgtaggccaagagattgagagtagagctatatgacttagcttttaaaaggtttgaggttgccgacttttaactacgaagcatgagccatgtgataggaattactgaataagcgtcatatctcaatacttgactttgactttcataccatcagtttaattaagaccatggactttgataacatagttgacacttaatttgtgcatataaatagctagctagctaactgcacttttacttcctatcaatcgtcagttcaatcatatatatacattctacatgaatgctgtataaataacatatgcagtagtgttcctgagttttaattggcttgtttggtgatgatgatggggcacttcaggatcatagttctaagccttgtgataatagcatcctttcaagtgcttggctctgctgaaggccataagacggctgtaccggcgatcttcgtgttcggggacggcatgctggacgttggcaacaacaactacttgccgtctgacgccccccaggctgactacccctactatggcatcgacttccctggctctgagcccactggaaggttcagtaatggatacaacatggctgacttcattggtaattaagcgacttgatcgatcatattgcccttattatcttttacagttatgtcaccattaaattgtattttctgtgtcatagtttttcatatagttatttgtgaattagatggatgtttgatggttattatacagtcttttttttttgctttagccgaaagattttttaagtgttttcaagcagttagaataaatcgcccacaatatacccaacacgactacaaataattaatgaattaatgctaattggtagtgtggtcgttgctctatactactattgactttcagaagacattagcaaataaaggtagtaatgttattgtagtttgtaaaaaaaaaatgatgaatataaagaaatactaacgacgattcagcatttcataatgtttggtttgcaaatggtatttctttgttacattgatatatatgattctatatttgagaaaggtagtgcatattatcaagtattcttttatttgagaaaaatacccaagttaatttttggtatatgcatgcaactttaattggtgtgtgctatgcatgcagcaaaggatatgggattcaaaatgagccctccagcttatctatcgcttaacagttcgataaaaatggagaccaatttcaccggagtgaactatgcttcagcaggtgctggcattcagatcatcatggtaactccagaatatatgcttaaatgcaaattcaaccataatattaattgtgaatgctgccatggcaatggcatcaagaaatggtgattatatatccaagttggtcatataaacatatttgaattgttgcatatctatatcactaattatcagaagcatgatctttcatgatggttaattaatgattggaaattgcaaatgaaagaagagagtaacatgtgactagatatcttgtcggcattgtaattttcaaaaaatttctgacagtgacataaggaaaattttatatcaatataatatcatctctgactgtcaacttctgatagttcgctgggccatttcatgggcaatctacaattatacatgtcttcgttcaatttgttcgttactctttgctatcaggaaaattatacccaatattatttagtcggtagatcaagagcttattttgactttgtagtaactcaacattttatataggatattgaaatctatgatgaaaagtagctaccacaaactgatgaatttcttggttatactatatatacgcatgctaagaatatgagtgatcagatctgctagcaagatgaaagatcaaagtgttaataaacatttgatggttatttaacagataaaatactgggttttccctggaaataaccttaattgatgctatattgtgaatatgcagaacgatgaagcaacgattccattcgtgtaccaagtgaagaacttcaatgacacggtaagccagatggaggctaacctaggccaccagaagttgagcaagctgttggccaaatctttattcctgataagcattggtaccatggatctgtctgtaaatatatggagagtattaagatattccagaaagccatcaccattcaacattccatatacactttcctcctacaaggccataatcatgcagttgtatggcctgggtgcaaggaagtttgggatcatcaacatccagcccttagggtgtcagccatggatgaggaagaacttggaaaacaatgtcgactgcaatgactccatgaacagtctcgctagggaattcaacgatggcctcaagcccctcttttccaatctcagctctcagctgagtggtctctcctactccatcgccgacttctacgcattctcaaatgccaccttcatgaaccctcgggcttacggtaagtcaatcgaaattattgaacactttttttgtggttgggatagaggatcatgagatggactgtaacacaaaccatggaaatgctacttgtccttgtttatctaatgtatttattgtggttatatcttgtatgtgcagggtttgtgaacatcaacagcacatgctgtattcccccctgcacacctgaacatgaaccaccctgccaaaaccgcaagcagtactggttttgggatctttcttacacgactgagcgggctgctaagctagccgcctctgcattttacgatggccctgcccggttcactgcgccggttaacttcaagcgattgataaagatgaaatgattttataataaagatcttttcgtgttgcaagtccattgacgagtagttgatcaggttttcctgggtgtgtatgtgtgctttccttaattttcatcatcttttttgtatgcctctggattggtaatttggtatatatatgtatgaattccatgctaaggaatgtgtcacaataagttgatcgataagaagaataaacccaactatatataatcgacgtttttgtttcagtgagaagattttgtttttttttttccctagactcctggtttccacaagtttgttaccaacctcccatcatgtcatgtgtggcattcacactgtgatttgggtggatagaataatttgagacgcactcccggatgaatgaaccaacactgccacaatagtaacagactcttcaaacaaagaaaattaaaaagaagaagaattagatatagaaaagataaaaagaaaaaaaaatcttgcgaagcagttaatcagccaaccttacctacactcttctaaactaagtcagtttgactttttttcttagttgaactttttaagtttgattatgtttatagaaaaatatagtaatattttttaacacaaaaaaatattattaaaatatattgaatgttatatttaatgaaactaattcgatgttataaatgttactatcttttttaataaatttggttaaatctaaaaatattttactagagaaaaagtcaaagcaactaataaaatgaaacggaagtaggaaaatattatagcaaagatgaaataaaaggaaaatctttaatctttatctagctcataataataaataaataaatcattaattaataaattcttcggagtttggactcaccaaatcttgttaacgtgtaagacttactgtacttttaagggattgacaatcaaataggcttttctactactcataatggaacaatttactgatcattcattgcacctagaagctagggagatgcacaaagtcacaattacaaagaaccaagtacttcctccgtttcatattataagactttctatcattacccatattcatacgtatgtctaaattcattaaaatcaatatgaatatggacaatgctagaaagttttataacctgaaacggatgtagcagtaacaatcgccaaataaacaggctgcacgttagtgggggaagatagtagggatgggcgtagtcgcccattgggcttgttggccggcctgtctcataaattaatttgagcaggcccaaactgaaaagaccagctttagtgggaaacttaggccatgcccaacgctccaacgtggagcgtgatctcaccccttccaaggagtatatttgtgccagctcggacaggaccgtatcccggtagagcgccgcgacccctgcagagggccggataatttcgtcagcttttcggtgcttttgggcaagaaacaggagaggaaccgcgttggggagatgcttcacctcaagccgtcgccacgcgccgttgctgctcccgcgcggggaagaagatggagagggggtggactagagagaacggtcgcatcgatcccccccccccccacgccggcgcgtcgagaccggccgccactgcgtcgatgggtcagccgccgccgcttcgatcgctgccggggaggggagaggagaggagaggagagctatagaggcgtgaaatggggagggtgttggtggggactggggagaagagggaggaggagagattttatattaatttctagattttagggtgtttagtataaaatttaaacatctatataaattgaaaaattgtgagaactaaaatgaaaaacaccaaggactgaaataaaaatatgaggctaccacctggagaaactagcacagtaggaaattagctttttgagagtgttgccccatcccacgtggcatttgaggggtaccctgcgttggccatgcccttagggtgtgtttgctactggaggttcccaaccaggaacagtgtgcgtggaaaacggagcggtacattagcacgtgattaattaagtattagctatttttttcaaaaatgaattaatatgattttttaagcaactttcatatagaaacattttagaaaaaacgtaccgtttagcaatttgaaaagcatgcgcgcggcaaacgagaggggaaagtgccgaacacacctgcttcaccgaattattaaaagcatcgatccctgacatcatcacacatgacgctccattttctccatctccacttccacgccggcggggcggtgccgcttcctcccttctcccaacctcttcatgccggcgcgattgtggctcctcccctctactcccttcccccatcctccacgctaatgttggcgcctgccctagaatttttacaatttagtacttttgaaaaacttattttacaaataaactcctggaaaaacttatcccataaatggttcttttcagggcaccagagtagatggcgccaacctcctgccaccgtggtggggcggcgctgaggtggcagggggagcgcgccagagtggctgcccccccccccccccccggcc

SEQ ID NO: 5155 - DNA, 19192 bp, Oryza sativa
cgattttcccagatgcgacgagttaccgtctgcacgcaatctgaaggtccctgtccaggaaaatcgtttctgtggcagtgaatattgtgtagctgtaagattgttacacgtgcgatcactggatgtatggccatacgatggcatattggcatatatcataatattgcatgtttaacatattcacccattcagttattcagcacaaaagaacctgtggttgttgcctgcagtcggtgatcaagctaagtcgatgatgttcttttgtgctggataggttagcttaattgcgttcatgacacacgagatgcaatattatctggacgatgacaagtagcatcggaacacagagaaagacgagccgtgatggacgaatgtcgcaccgtactttttcaaaaaccctcacattctctaggttgtaggatcacaattacaatggattctagggacctattttcccaactacctgtgcaagccagcaagcaagaattccagcagcctgatgatcaagttaacacagcacatcagctattgtgcacgctataataaaatgcaccattagcagatttatgtttttttggtttccaacaagctagtttaattgggatatatcatagcaacagggttgtaatgtgttactccctccgtcccataatataagagattttaggtggatatgacacattctgtctctgtctatatagattcattgtactaggatgcgtcacatccacctaaaatcccttatattataggacagagggagtatcatttatcatagcatcgagggagtaatgcatatgtcttcactgatcacttttcgagctaaactaccaaaaaccggactagctctgacggtcgtcattgattttactaacgtgcacggggaaattcaattttccatgacgcacttatctcaaggtcagaaaattaatttccttgatgtggatacaccactcgtcacaataattatatttgattattctgacatggacaaggctgtcggtggaaataatggattcacggtggcagttgcagctaatttcggtcgtttgaaccaaatggtgggagtgccaaaaaaaattggtcgcttcacaacacacgcaatttcgctgacatgaatggaccatcagtaaatttgcatgctaataaaagatggagagaaaattattaaatggagacgtagtgtacgtcgatggtaaacagaaatgtgcaattttcacggagaggcgatcatggggcgtccttggaggggccctggtgatcttgaaggcttgatcttttcccttggcgatggctgatctctccttttcagatggcaaattaatatagagtacagaaaattgaggtggaagtagcagcctctttacaagaattcaagagcagaatgggcacataaggcaactatgtcaacaagagctcgataatttgtgcagacaatctgatgaacaaagcttgaaatccctagattttaataaaacgtaacacgtcggcttagctgtccatgaatcacacttgagcacacaagaaaaacaaatcgcaagatgcttcaacctaccaccagcaaccgagggtgtttgcagaaatactgatgatgcatcatcgatctcctcgagctgcttgccagggagagtggtcacgtacggtccggagagaagcgccggccgcggagagggtcctcgacaagtgcgtggctgctgcctgccggaatctcactcacgcgcgctgcctggaaaaagagcgacgcgacggccgacggagatggtgggggacgaggtggaggcggagagctacatacgcggccggcgcaggaagaagaagagcgagggaagcgcggccctccccaggctggttggtggctcccccggcggtggcggccgccggccggtccatgacatccccccgccccggtggtggcgaagaactgaagacggcggagagagagaggaggaagctcgacggcggcaactttctttccagcagaatgggccgaaacacagcgacaaagggcttatttagcggcttacggccgtccacaagaaaataaaaaggaaaaagtacacctaaggtccctcaacttgtcatcgagttacaaaatcatccttaaactgcaaaaccggatacaacacatcccccaacttacaaaaccagtgcaaactaggttcctaagtggttttcactccagttttgtctgacgtgacagctgactaagggtggatcctagatgtcagcctctacttcccctcccctctcataattataatactaaattagtttcatcaaatcaataattaaatatattttcataataaatttgtcttgggttaaaaatgttactattttttttctataaacttgattaaatttaaagcagtttaattttgaccaaagttaaaacgtcttataacctaaaacagagggagtatttacttaaattttttagtaagacgaataatcaaacatgatgtaaaaaagttaacatagtcatatattaaaaacaaaggtagtaagtattattattgttgttgttgctattaatgagctaagtattttagggaaaaaattactactaatgggctaggttcttggaataaaatttcttacttgaaatatacgacttagtagaactaatacagagcatgtagcgctctatttgagctaagtagcatgtattgtaacaactaaaaaaaataccaacttttaaaaatcaacttattttacttttatttcttccaacgctaggcttagttggttgccgtgttttgatcttcagaaaattccatatgtgcccacaagtttttcctcaatcccttctatacctttaaatttttaaattttgcatcatctcatgtacagttgtaccactgaatttttctttttatcccctctttacccattatgttagatttttataaaatgaatatatttccctctcttatacttacgtgcaacttattttaaaaacatcaatgttaatgtgattttttatttataataaaaatcaaacggggtagaattatttaatagcaaatttaaaagaaaaactaaaatgtgatctcgatcatctctgatcagtgtattcccatcaaatttgctattaaatatgtgaaaaattaggagatctcgatcatctccagtgtattcccatcaaccgcttgaagttaagcggcgtggtgaactggcgttctccgtcgtaaaatgcagctgctgccagcttagcggccttctccgtggtgtgccccacgtcccagaaccagtactccctccggttcccacacggcgctccgaactgctcattgcagggccctttgcagcacgcagcatcagtgttcgtaaaccctgtgtacatacgatgacaaactaacattaggaatgcatcatcattaaaaagaaatgcaagaagtaaattgtgacggttcacgaataatctgacagattttgtcaagtaattaaataccattagccgacgggttcatgaaggtggcattggagaagccgtagaaatcggcgacagagtagcggaggccggggagggaggagctcagcccggccatgagagaccccaatccgtcgttgaactccctcgcgagggcgttcatccggtcgtcgcaaccgccgacggggctgtggctgtgcggctgctccgtcaccgccggcgcgcacccgatcggcggggcgttgacgacgccgaacctcctcgcgcccagggcgtgcagtggccggacgacgagctcgccgtaggaggcgacgaggtgcgggatgtcggtctcgttgtcgggcggcggcggcgacggcgacggcgagtcgagtatgttggcgatgcggtagaggtcggaggtgcccgcggagatgaggaagagggacttggagagaagctcggttagctcgtgctcggtcacggtgccgttcagctcctccacggtgttggagaagtatcgcacttgtctcggcagtgatactgattctgcgtcgtcctgtatggtgtttgggaaaatcaggcgactgataaatagtaaaatggtaaatatttatgaaattaacatgagattcgactcgttttacctccatggaaatatttcccaactgtattgtttatgtaagaaaaggtcgtatatgtaagaaaatgtttggtttatgtaagaaaatgtatatatggcttaggctatgttcaggaggaggaggagtcctctttggcacgcaaaataaagcacatattattacataattaattagtattaactaatttattttttaaaaatagataaatatgaatttttaaaacaactctcatatataacttttttttaagaaaaacatacctttagcaatttgaaaaaagtgtgcacacggaaaacgaggaaggtgagttaggaaagttggaaaaagaactgagccagtagaacacggatcgaaggacggaatgtttgactacttacaaatctttccaaataaccgcatatgctgaagcatagttgatgccgctgaaacccgcatccacttcgatcaggctattattaagcgacagaaaagctggagggctcatctctaaccccatagcctttgctccaaccacacacaaaacaatatcatattaccatgcatctcttgacacaattagtttatagtttgataggagatgatgtttgtgtcgagggaacgccccatcgttttgtgcatgttgtttaaaacgtcattttttttaaaaaaaataggtaagcttgatcaatatacgatatatcataaacatataactttaaattcagcctatataattagagacaacaaatttagcagtgaatttttatgttctgttcagagtcaaatttgctattttgtttctacatatataaattgaatttgaacaatgatatatcaacaatctatttatttttaagaaacacagtacaaatacaggcgctcacaacgtgcacacactcacgtctatgaacacacatgcgaatcctaccactatgagcacctccgatctattttattaatatttattttggtgattatcacgaatctattctgttaatatttttttgatgatttttaggctataagtaaaaatgaagagacgcaattgtggacacaggaaaaactagtgttgggtgtgcccgcacatgtcaattaaaagaaaatatataagtctttatgcatacaaatacaaataagcctcagacgcttatacataattaacaaaaattgtcagatagaagatataactgcaactatgtaatgaaagatataaattaaagaatttgtcaaagtatagctagaatctgaattctttggtgatcactaaaaataaacactaggcactgctcttgttcacatatgtttgctcactcaacttaatttaagaacagaaatcacaaaatagttttagttttcagtaattcagtttgagggaaactgggaccgagaggaaattgcaaatatgaataagtggatgatatatagcaattgtgcgctttgtgcttgttgagcaaggccctgttctattcttcaactccaaactctaacttactcatttttcatatatagcacgtttttcaaactgttaaatggtgtgtttttaaaaaaaaatctatataaaagttattataaaagcaaataaatttatttcttaaatttataatagttaatacttaattaattaattaatcagcttctcccgcttgtgaatacatcatccttctggccatcatcggcgctaccccaaaacccgtgtcggcactcaacagttcagcacgcgcgctcacacatgtactgctacttgttgctactccaggcttccgttccaaaatataaaagattttgggtagatatgataaatcctaatactgtgaatatagacagagaagctgtctagattcatattactatgatttgtcacacatctacccaaaatcccttatattttgagatagagagagtacaactctgtttaacacttaacacttacaacaggcctgacatgctgttctggcatgtgcctaatctgctatattggctgtgtttagttcctcctctaaattttttttgacgtatacatacgcacatttgaagtattaaacgtaaactaataacgaaacaaattagagattccgcctgtaaattgcgagacgaatttattaagcctaattaatccatcattagcaaatatttactgtagcaccacattgtcaaatcatggcgtaattaggctcaaaagattcgtcttgcaatttacatgtaaactatacatttttttcacatttaatgctccatacatgtgtctaaatatttgatgtgacggaatttttaaaagtttgaagagaactaaacagaaccattatctactggacttaggccatagtgctaaggagtaggtgatccaaattttttttttcaaatttcttgggtatgccagtgcacactacacccttgggtccgctccctgaagagatgtcatatctagagatgaacagactttcccaatttgatactccctccgttccattttaattacaaccatgagtttccgtgtctaactttaatcgtctgtcttatttagttttttaaaaaaaaattaaaaaacataagtcatacatagattactgttcatgttttgtcatctaataatagtaaaaatattaatcataaaaaaatcaaataagacagacgatcaaagttaaacattagaaactcctgaccgtgcttaaaatggaacgaagggattataatgaataataccactggtagttagtacgtatagctagttagctaggccacatgcatatagagaaaaaggaaatgaatttaattaccaatgaagtcggccatggtgtagccgttgctgaccctgccggtggcattgccgccggggaagtcgatgccgtaaaaggggtgatcggcgcggatcgggtctccggcctcggacgacggcaagtattggttgttgccgacgtccagcgcgccgtcgccgaacaggaagatcgccgggaccgacgaccgccgtgtatcgttgcagccgccggcgacgacggcaccaccaagaagcatcacttggaaggttaacgctgccatcgcaaggaaagtgcccattgcatccgatccactagccattttttacacttttctgcagtagcaaggtgttggagctgcccctatagctagctagctacttataagcacacaaggtttcaagtgcttcatgcatgcttgatcggctactttatcctagctatatattgtggcctcaagagataattaagtcaagtgttgagatgccagatgcatataatgcttcctcatcacgcatatatgcataatgcatccatgatccatgcatgcttgcatggcagatcgatgtacattgcttccaagataaaaagaatatctcctaaaaacttgaatgctaattaagtcgacggcggtcaactcagatctctatctctctctctctatatataaaatctcatgcctatagtgtgtatatgcatgcttatatatccagtgaaaggttcgattgatgatatggtcaaggtcaattggttatgtttgattagttgtcaatcagccgatgccgatagattcaagcaatccaggactgcatgctacgtgtgcggctacaatatgttgaaattataagcgcataatgatttaatttattccataaataaatcatgacattgcagatgtaaactagattgaacgcatcattagatctacacatgtaaactaagcagtaaaacatgagcagatcaaatatgcgcaacatgtcgaacacgtaccgaggtggcggaaagaccggttgctcggcaggaactactcgcggttgcggacgtcaacgaaggcgcgcagcacacgagcagagaggaaggcaagccgtcacggacgaacagggagcagtcgcgcgaagcatttcccaaaaaccttattgccgccttctcccggtgcaggacgtcgaaggcagaggttccggagacctgctctcccgatcaccggtgcatgccggcgagcgggatggagtagtctacgagtgacggcgcagtacagagtaggaggcaaaccctagattgatttcgcgtgtgttgcgtgaaggcggcggctcggtttatatagaaataggtcgcttgatcggggcgcccgcgtaaccaaaccggataagtcgcgcgtaacttatccggactccacgccgttttcacgcaccggatttttcggaatgtttcaaaacaaaacaaatccgaatttcctgcagcaaaacaaaactgcaaaaggagactacatctgcgcaagggtgaggagccaattttgcggaccatttgacgtgtacgtcgtgcacgcgcgccgcctgccttgccaagccaggcgaggtgagcgagcgcgcgtgtttcccctcttctctccaccacacatgcttcaagtggctaggagggcatcctcccttttaaggaggtccccctctcatagaaaaagcaaggtggtactaaacttcacatgcatgccatcccatgaggtgggcttttgtgattttcaaaagaattaatcttcgaatgggccttagcccatctattaattccaacaatcccccaccaaatctcaaaatcccactgagatttgccttttccaatgtactgtttatataccagcggttcgatggagaccgattaaggttaaacatccacctagaactccaagctacacttactcacaacttgaacaatggactacgccttgaattgcaagtcttgtgcaagcaagtttcactcagagtcttatctggtactagaccgtctgtagactacccctcgggtggagcgtataagtcatactcctagatctttagtaagattcctagaagattcacccaaaatctctatagactgcgaccaacagtcaagcttacaaaggtgagttctttcaagaatgctctgcaggacatcatcttcgctaattaaagccaacagaactcattaaggcatagccaacctgccttgcagctcacgagagtacatgcatcttcacttagagagggtatagattggtactctcctctagtttactaatggtttgttcttcccaggttctaattcacgggatctccgatcacatagactgggttaccaccatagtataactcacatgggtctcaaacctatctcctacgatgcattgtctatcacatttcgtgatagtcccttcgtgaagggatctgccaggtttctagctgtttggatgtaatccaacgttataactccggagtttctcaatttcctgacagacttcaatcgtcttttcacatgtctagacgatttcttattatccttagaactattcactttgacaattaccgtttgattgtcatagttcataaggacagccggcaccggtttttcaacaataggaagatccattaatagatcacgcagtcattctgcctcaacagtagcagtatccagtaccgtcagctctgcttccatggttgacctcgtcaaaatggtctgtttgcaagacctccacgaaacagcaccaccacccagtgtgaagacatatccactagtggcttttatctcatccacatcagagatccacttagaatcactatatccctccagtaccgcaggatacctagaatagtgaagccccaattccatagtatctttcagatagcgcattactcgctcaagcgcacgccagtaatcatctcctggattagaggtaaaccggctcaacttgctcacaacaaaggagatatcaggcctagttgcactagctaggtacatcagcgagccaatgatttgggagtattccagttgattcctagcaattctcttgttcttgcgaagcaacaattgtcgacctccgattttggaaatcggaaatctcctatgtttatcagtaccaatccctggatcagtagttggtacacacatacatagccgaatcacaacatatcatgaatgaattcaggctaaaagagttaaatgcttacattagggcctggcaggccaacaactatcagagaaacaacagcggaagacaaaataatacaggggcccggttgacataccacaagcagtcgactgggaaacgagacctagaatggaattaaactccgatcatcttgttaggtacgcaagcgcactaacaagggcttctcttcaacactctgctaaaagatatatatagagcaacaatgagtacaaaagtactcagcaagccaccacacaaaatgtagtaatgtacaggataatacaaggagtggctatggttactttgcgtaaagctgagttttcaaatatcatttcacaaacctaagacctagcataaactgatcaagttttaactccattgttcattaaacagcgacggttctatccaccatccattgtgttcccaaggatagcttcccgccactggccatcatggttttctggggtctaccccttctcgcctctcgagaagttgatccactagtacaaaatcatgatgcatatcccatcccaatcagattaagaaattagagtctagccaagtgtaatacatgtcccggtgctcaataaccgcgagcacggctattcgaatagatttgttttactcacactgcagtggatgtacactttacccgtactccgcaactgcccaacacatgagcctcgtcccaacacatgagacgcgtcacggcaaagcctttcaataacctcacattggcagtacccgctccatgaacttaagtcctcatgcactctaggcgtcataagtttctagcagtgagaggagttctggcgctcccgaggaagaaaactcacgcaagtctaacatcgcatcctgtagttgaacccaatctatgctgtcctcttttgggtatctccttgtagtcttgtagtcttgacaagtcagtctctggccatccgtatcgggtatccgccatctggccatccgtatcgggtatccgccaacagactgcttgttcatccacacacctaagtgaaaccactatgcaggggtactgcctccgctcggctatctactccgctaggtctatacccattcgagaagtacggttgtattggggtcgtttcatgcttagcttcatggctctgtccttaactgaccagggatggcactagcctttaccggacaccacccaaatcatccagccgccccagtcgaaaacatttgtttagttttaattttctttcacaaatcatctcatcaatgccatggcaatgtggcactcatgtctctacatgccgtatctcaactaccctccccaaggtagttgcccaagcataaagcatttgataaatatgagaatgcatgaatctaaattagcattactcagcatttgtcacaagtgactatggactcatacgtaattatgggtacaagggaataatgagataagcaataatcaaaggcatggcataataacaagtaggatattcatcattgcatgcaattttatttgtaaacaaaacaatttcgcaattgggatcaacatgctcaaggggtggggtgatgacttgcatgctcaggatagttcttattcttgatataatcttgatcaaccttcacctcctggaagctgcatacgttgcctcacgactaaccgatatacaaattctataatacgcgagaaaaaccaatattcaatcaaatatgcacaagcaaaatatagttgttggggtcgattcgtgtttgcaaacggataatctcttaatcattcctattgtcatggcggcttgtttaggatctaatcatcataatataaatgggatacacatttcattaaatcagagttgatctatcgagttatggtaggagtatgaccacatatgcttctaattagtttacatgggttttacagtgataaagcatggtaaagagaattatcctcacacctagtttactgtacaataatcaattttatttattagcatatttttaagttgatcataatctaatcatttgatattaattatgtaacaattataaatatattttactaaacagtgagttacataccattggaaagcttatgaatttagataaatttaggttcaagtttcactcgaatcggagctaaaatgaataagttatactagtttaaagattcaatttcgaattaatccgagaaattgtgaaaagttactgttcctaatagatttgttcttaatccgaaatcctatccacaactacattgactgtcatgtgggaccccgggtttattccttttccaccggattaatttttgctaggggaaatataggagtgggcccggcctgtcagtggctcgaatggaggtcgtcttcaacctccagccgggcagaggcagccgtgccatgcgcgctgggcacagccgggatggcgcgaggccggcacggcggcggctgcggaaagtacggagaggctccggcgacctcccaccaccgtcagcgacgcgcggcggagtgagggcgagtggcgcagcatggctgagctcgggcagctaggtgctagggcgatagggagggtttccgaccaaactggtgagggcgtgagcgtctacggcgtatggggattcgatttcatcagctagatggagaggggagctcccggatggcttgtccacggcgagctcgccggcagtgcaatggcggccaggccggtacggccacgggtgctatttggcgaaattggagccgatgctagctattagagagttagaggatgctatggggtcgagggattacgctaggatggagagacggcgaagggcggcgacgcgtggtgcggtgcagacaaagcagaggtggctagcggtcggcgatgcccgaaagtgttcgacgcgtggttcccggtgtccagcggtcctcagctccctcaatggcgacggcggcagcacggctcttcctccactccctccaacctccagctccggccggggagcctcgcaatgctgatctctagcggtggtgagagagtgatcgcaaggtgctcgatgaaatgtattcgggaagaaagctgagaggaatggggatttttgttgggggcttagcttaggatgtaaggaaaccatggggataagatcgccggcacatggcctggatgagctagagctctaatggcaatcggataaggaatatgaggtggacgacgcggataagggtttatctccttctccattaaggttctgtggcttaatcatcgcatctataacctatgtactgcaggtctaggcgctagctggaggaagggcattgttttgtccagcgggcgcggtagggatgcgcagttttaaccgatggacgcagagcggcatggtgacgatggcgatgctccgtgtttcttggagggaaacgggagagcggttggaggccgggattcacggcggaagagcggcttggcgtggctcgagtttggcgtggtgcggcacatggaaacggtgcgacgcgggtgcggcgcggtgcatgggaggggtggatgcggcacatggcacaacgcgagcgcgggagtggcgcaggtgcggaggcatggcgcggcgcggcgtcgggtggtagcgagatcgatgcgatgcacgcggcacacgggagcagtgctgcaagggttgggaacgggatggatgcgttcctgatctgctgggctgggcctatgtcgaacaggtgtcgggcaatgaacagtggcggctaggaaaagagagaaaaggaagaaaagcgaaaggaaggaaagggaggggctaatctgcaaaagtgaatgggattggaatttgaattgagatgtaatatatatattttggttttgggaattcaaatatgtatttgaatatttacttatttccaaatgaatttgcattatattgggttactctataattaacttaaataattgctggctgtgatatagaattaatatatttccatagaatacattataagggtggtggtatatttactcaatttatttacatgaccaaatattttatatgagtgaatctattccatgagagactcaatgaacattataaatattaatataaatattccagtggaacgctcctttatatagggtcatcgtagtggcgattatttcatggttgcttagatgtcctgacacttgtcaacatggttcaagtatttaacattcaatttgtagtctgcattatagaaattaataattgacttgtactttattcggcttgctatcatgtgcacaaatatttataggattaataataattatcttattctaattactacttagttgtacagctttagcttaatcttcaatcgtgaaaattaatagtttggcaagcaatagcaaccataacatctagcatgatgcaaaagttctaaaaagtttaaaattttagtgatttttattgtcagaaattttcagggtgttacaacaatctactccttccgtccaaaaaaaggcaaaccctgggtttccgtgtctaactttaactgtccgtcttatatgaaatttttttataattcatatttttattgttgttagatgataaaacatgattaatactttgtgcgtgacttgtctttttaatttttttcataattttttcaaataagacgaacggtcaaacgttgggcacggaaaccagggtttgtctttttttgggacggagggagtaggatcataaggtgttggagaaggcttactatcaatgtagccaaagcgattcaagatcttctccacataatgggactgcaagaatgtaatcacattctcacctctaattagcttaatgtttaagataacatcagctactcccaaatccttcatatcaaaattttgagacaataatgatttaacctcatttatcacctcaaggtttgtcccaaatatcagtatgtcatcaacatacaagcacagaataactccctcacccccaccatagcgatagtacacacatttatctgcctcattgactgcaaagcctgaagatgtcaatgttttgtcaaatttctcatgccattgcttaggagcttgtttcagaccatacaaagacttcaacaatttgcacactttgccttcttgaccttcaactacaaacccatcaggttgatccatatagatctcctcatctagctctccattaagaaaagctgtcttaacgtccatttgatgaacgagaagaccatgtgtggctgctagggaaagtagcacatgaactgtggtcaatctagcaacaggtgagtaagtgtcaatgaaatcttcgccttctttctgattatagcccttagcaacaagccgagccttgtacttttcaatagtaccgtcaggcctaagcttcttcttgaacacccacttgcaccccacaggtttacacccatagggtcgatttgtcacctcccaagtcccgttagcgataatggaatccatttcactacggacagtctccttccagtagtctgcatcaggagatgcatatgcttctgaaattgacttaggagtgtcatccacgaggtacacagtgaaatcatcaccaaaggacttagccgtcctttgtctcttactccttcgaggagcttcactgacatcctcctcaatgacatgtttatgtgtatgttcagtttgttctggttgtgtgattgaacggggaattacttcagagggttggctcgaactactatgtgtatccttcattgggaaaaagctctcaaagaaggtagcatcacgagactccataattgtaccaacatgcatgtcaggtacctcagatttaactattaaaaatctataggtaatgctgtaatgagcatatcccagaaagacacagtccacagtcttaggtcccaatttgcgcttcttcgttattggtatattgactttcgccaagcaccctcatgtgcttggtgaaagtgatggttttctcccaatccatatctcatatggtgttttgtccttatttctgttaggaactctatttaacaaatgattcgaggtcaacaatgcctcccccaccatgccttaggtagtcccgtggtgtccaacatgtcattcaccaagtcagtcagtgtgcggttattcctttcagcaatcccattagactcgggagaatagggaggcgtcctcttatgtatgatgtcatgttcctcacagaataagtcaaactcgtttgagaaaaactctccaccacgatcaaacctaagcctttttatctttttgtcaagttgattttcaacttctgccttataaattttcaaatagtctagagcctcgtctttcgttttcaacaagtacacatagcaaaatatagtagcatcatcaatcaacgtcatgaaatatcattttccacacttcgtcaacaccccattcatttcacaaagatctgaatgtaggagttctagtggtgccaagtttctctcctcgacagccttgtgaggcttgcgaggttgcttcgattgcacacaactatggcacttagaacctttgacagtgaagaacttaggaattaaacacatgctggaaagccgagacatcaagtcaaaattaatatgacataaacatgagtgccaaacattagcctcatcatccacactgccacaaatatggttcacagacttattgcagaaatcagaaagggaaaagcggaacagtcctccgcactcataacctttaccaataaaatatccatgtttagacacgactactttattacactcaaaaaccaacttaaattcgtctctagtctgacgggagccactaacaagattcctatcgatagaagggacatgctgcacgttcttcagctgcacgatctttcccgaagtaaacttcagatctaccgtgccaacaccatgaaaagaagcatgtgacccattccccattaggacgatggaaccccgtgcgacctgataagaagaaaacaataagatgtcagcacaaacatgtacattggccctagtatcaacccaccaattagtagactgattaactaaaaaaacagtaggtaaattactatacccgcctccatctccagtgttgccaatggtcacattagcagacttagaagtctgccctgcaggtgccttcatccccttgcgttgtggacacttcctagccagatgaccaggttggccacacataaagcaagtcctctcatcctgattaggattgttgttgttcttcttcttcttcttaaagttggtggtctgttgagctttgtatttccccttgctcttgttctgagccttatgcacaacattggcactggactgcccactatcacccttagacgcagcatctttttcccgagctttcccctcaacattaagagacgctatcaacccctcaacggagtattcctatctcttgtgtttgagtgcagtaccgaaacttctccaagatggaggtagtttcgcaataatgcacccagccacaaatttatcgggtaagacacacttaaggagttcgagttccttagccatggtttgtatctcatgagcctgttcgactatagaacggttgtcagtcatcttgtagtcatgaaactgctccatgatatacagatcattgctagcatcagtagcaccgaatttagtattcagtgcatcccacaactccttagcgtcggtcatatgcatatacacctcgaccagacgatcgccaagaacgctaagaatgcatcccacaaagagagtagtggcttcctcgaattgcttctgctgatcagcaataagaattccttcaggtttgccagtactcacccagaagcatttcatagctgtcagccacagagtgaccctgatttgccatctcttaaagtgcacaccggagaatttatctggcctcagtgcatcggcaaaaccagccatagtaaaatcacagcgcctataataaggtttttggattgttgaaattataagcacataatgatttaatttattccataaataaatcatgacattgcagatgtaaactagattgaacgcatcattagatctacacatgtaaactaagcagtaaaacatgaacagatcaaatatgcacaatatgtcgaacacgtaccgaggtggcggaaagaccggttgctcggcaggaactactcacggttgcgggcgtcgatgaaggtgcgcagcacacgagcggagaggaaggcgagccgtcgcggacgaacagggagcagtcgcgtgaagcgtttcccaaaaaccttattaccgccttctcccggtgcaggacgtcgaaggcagaggttccggagacctactctcccgatcgccggtgcacgccggcgagcgggatggagtagtctatgagcgacggcgcagtacagagtaagaggcaaaccctagattgatttcgcgtgtgttgcgtgaaggcggatcagggcgcccgcgtaaccgaaccggataagtcacgcgtaacttatccggactccacgccgttttcacgcaccggatttttcggaatccgaatttcccgcagcaaaacaaaactgcaaaaggaggctgcatctgcgcaagggtgaggatgccaattttgtggacaattcaacacgtatgtcgtgcacgcgcgccgcctgccaggccagcgagcgcgtgtgtatttcccttcttctctccaccacacatgcttcaagtggctaggagggtatcctcccttttaaggagatccccctctcctagaataagcaaggtggtactaaactccacatgcatgccatccgatgaggtgggcttttgtgatttttcaaagaattaatcttcgaatgggccttagcccatctattaattccaacacaataatgtactccctccttcccataattaagggattttagagggatgtcatatttcctaatctatgaatatagagataagcctatccagaatcatagtactggaaagtgttgcatccctccaaaatctaatatatttaataattaatattgcatgtttaacatattcacccatttagctattcaacatagaggaagatgagccgtgatggacgaatgtcgcaccgtgctttttcaaaaaccttattcacattctctaggttgtaggatcacaattacaacggattctagggacctattttcccaactaccagtgcaagccagcaagcgagaattccagcagcttgattaattatcaagtcaacacagcacatcacctatcgtgcgcgctctaataaaatgcaccattagcagatttatgttttttggtttcccacaagctagtttaattgggatatatcatagcaa

SEQ ID NO: 5156 - DNA, 18484 bp, Oryza sativa
cagtggcagtggcccgccggtggttgctgctcatgtgtgccgcccctctccctccctcctcactccatgatttctatgatatgaattcgtggtttgttggagctgttgtaggacatgaatattagtggtttgtaggatatgaatttgctgttggagctctcaaatctatcaaagctatgtcaaatttgttataaatgttttaaaaagattcaaattaaaaaactttgatataaacatagtcaaatgagcaagggaaaaaggacatctggcccgtaagttaacaccgttagttggacttcacggaataaggtcaactctgatcttcatttttgaaaaaggatcaaataaacaaacctagaaaaatagggtcaaattgatagttacgtttcgagatagggtcaaataagcaattatccctacttttatagcaaagcaaatttcgatccgtatcaccaaaatgtataactgaccttaggctagcaagctgacactgatctagacgcgtatggttatttgtacataataaaaggttagttgtacacttgtacaaagtcaataggagtctatacgggacagcatcatatgggtccaaccaaattaacaacgcttaccagcaaattgtgggcattctattgtttcttctaattttcgaaattctgtaaatagcatgtgcataatcctgtcaaccattttttaaaaaaaaacaagacaaattactacataagttcatggttttaactatagtacaccgtaaaaagtaaagttacactctctaaatgtgataattacctagtggacaccactcccattatttcagtgtgttcgggctgatgacacatgagagggcccactttttgacacggcgcgatcaagttacccctattgtatatttagactaactggatccgtcaaccctttagagccctatgtcgccaccccaaccatatatatgctctattttgacattgccaccatgacccgttcatcatccctgacccactaggaatagggatgcaagggtgatctcgtgctaggagtggaattggcttgcagcaatggctacactgttgtcagagcagggcgtggaatctgttacgaagctggtgaatctaaaatgggtgtccaaagggtaggctcgatttttctttgttttgattcgattgggatgcatggtttgttgatttcgttgagttgagttcttttcttgatgtacttgcaatggggtagaaggctagatttgcctggccagcgtcagttgtcgagattggtttggcttaggacattgtcggagatatgggccgagggtatgcaaagtgaggggaagttaccttcacatccagccgcgtggctctacagcctggccctacccccgcacctcgcgagtcacagaggcggccggggggcctcggggtgccacgtcatgcccctcaggccctcgcgctgcccctccccgaggccctcgcccaactaccatgtggtggggggagcaagcggggaggagacccaggctgaacggccatcaatgcgcggcgccccaactgtccctcaccgcgtttaatgcggtaagggcggacgtgcggtgccactagactgacccacgtcaatcgggtgtgaccagtctgtgaccggcctgttgccggccacgtccgattggacgggcggccgtgcccccacgtcgcctctgtattcggcggagtggaggtaggtatgtcccgtcccatcggggcgtcatctggggttccctccacgcgaggaccgccacaagtcttcactcatttaagaggaaattatagggctgtcccccgtggcaggcggggggcggcgccggatcccactaaaggacgaactgccgcttagcttccgggcgaaggcacggatcgtggtccggtcaaggtaaagtgggtccctctcccataaaagagtaggtaggagcggcgcatgtggtatccccttgaactataaaaggaggaccttgcccgctgaaaaagggggacgactcccagcaggcctgagctttagagggagcagaccaatagcactctccagagttggggaacccttgtaacactcaatcataaatcccacacacaggagtaggatattacgctctatagcggcccgaacctgtataatcttggcgcccatacgcgatctggaaaccctgagggtggatacacgatctcgagaggcgaacccttttccccggctgaactcaaaaagggggatctcacgatctcccgctagagaggatcactcctcgacagacatgtttgagccagaccatctcaatttgagccggatacgcttacacaatttttacaatttgaccctttgaaaaaactatttttacaaatgaacctccgccaaaacttatttcaaaaataacccttttttcagcgccaaatcatgtggcgctgaacttagacatctcagcgccaaatagtgtggcgctgaatgtgcgttggcacgctgacttagcctcccatccgcgatggcacggcattcagcgccagtagacgtggcgctaaggtgtcaagttcagcgccagatgatgtggcgctgaaaaaaatgttatttttaaaataagtttggcggcggttcatttgtaaaaatagtttttttaaagggtcaaattgtcaaaatgtgtgatacacttagggccaacttggtcaccctatgtcaaaaaataggccctctcacacgttgttagcacaaatacagtaaaataataggcacaatgttcattagctaattaccacattaatagtgttttcccctataatgttactcttgcgatgtcctaaaggtaaaactagaaagcctcaagattctaaatgaaacattgactatgtatataattaactagactccggtcctcaaaaagcgcataactccataaatatatattctagaggtacatatctcatccttgaaaacaagtagaacatcaataattacactactggtaccacacacgtctcacataagttcataatctggcaaaatatatattgcaaaccatatatatagtggaaacatgtaaactacatattgttgaatcaaaatgcaaaatttgctacatgacacttaaaaacttattatctttgctggtagacgtcgtaagaatgtgattttttcctaatgacacttcgaaagcgtggtaatttgccataggacaccgagcgcataaaaatacaatatccacccaattgatgagagaaaaactatgtaaaatgtttgttttgccctcatcttcttctcccttctcatcttcttctcccttctcctggtcttcttccgacaataggcatcggcggtggagctatcatggacctctgccttacttccctcgcaggacatgatggttattgccgagatctacatgagatgcgcggtgaggttcttggtgtcgatcagagcggccgcctccacgcgggtgctggcgaaccgtctgggccaatcgaggaatctctcaacgacgagcgacatgttggggaaaggcggtgaggtagaccggcgaggcggcactgcgggcaaagctacacaggtggaatccaccagtggcgcgacggaagtattggcgaagcaggcagggtccggcggcggtgagaacatgagcgtgcagtggtagctcaggaagtgcagcgcgacaagcagcaggagtataacgagcaggaggactatagcggtggccgctggggtgatgaggaaaaggtagtgggagtggttgttagcgggaggagagggggcggtgccgctactggtggtggcgggggcaaggaggagtccacaagggcaaacttgtttcttatgaattttctctttttgtttccatcaaatataataaaataatacgttgagtatacgactaattaccatatttctatggtatccacgaactaacatactttctttagataatgtcacgtagcaaagaccatgatattttatatcatgcagcaaattttaccgaatcaaactagatgcctactccctccgttttaaaaaaagacaaaccctggtttccgtgcccaacgtttgaccatccgtcttatttgaaaaaattatgaaaaaaattaaaaagacaagtcacgcataaaatattaatcatgttttattatctagcaacaatgaaaatatgaattataaaaaaaattcatataaaacggacagttaaaattggacacggaaatccatagtttgcctttttttagacggagggagtaatatttatccacttcaccttagcacacacatgagtagtcggtgccagggaaagagacgatgggagatgccttctgccgataacgatgcttttttttttccgaaaatgaggtgcgcctggtttgcgtgtcagccggtccgtcactgatgtgtacttaccttccgtttttgtgttaaacagacaagatggcagccatccttgctgcccatggactcagcctgcctgatacacactcagagtgcacagctccttttgccttggtgttgcgttggtcggcccacgttttccttttacaagaagcgaaaataaaagaaaaaaatgagcacctctcctgcagcaagcgaaaatagagaaagaagaaaacgagcaatttcccggaagctagagagagagaaatgaagcagaaagaataaaaacacaatcccctgattagaagtcacttcattaggccatgggcgtttctaggccttcaaatatatcagcgccatctcgtttcacttacgtttttttttaaaattacgcagtacaacgcagtcactcacaacacgcaaaccctacccctatgagcatcttcgaagactgggccggcaagtcaccacaggcacctcgctgtcgacgggtacgtcgcctaccactgaaagcataacgcgcaaaccctacccctatgagcatcttcgaagactgggccggcaagtcaccacaggcacctcgctgtcgacgggtacgtcgcctaccactgaaagcataacgccgttaaatcctggaaaattcgctcctatggggagtcgaacccaggacctcaggtgctactgaggctcttgtaaccactaggttacaggcactttccctcgtttcacttacgtttatatatacatgcatcaaattttgtattttaaaacttaagatttaagttgatttttttcttttttccatcgtagattttttttatagtatctgcttttacatcatatgcctatataaaatttctgaaatcttggaccaaattaatcacatagtccttgccaagaaagagtgcatgtcgtttgctgcttgaactgttcatctgttacttaacatgttatatgtccgcaagctggtgttaaagtgcctatatttgtggctctttgcatgtgcctatgtcctagtaatatggttgctaaaactaatgagaatatttctttttatgataaaagagttagttacatctatccattgttttgggaccacaactagagaggttttcatgcttttcaaaattattcgtaaacgaataattggttcatattcgatctatgtgtgcgtccatatgttacaaattaagcgatttttcttttcaatatggcttgacaggatttgattttttttttcttttcaatatgcaatgtgtcaatttttacgtggaaacaccggttcttttaggtaggaggttttttcttaactaagacatgtggcttttttacatgagagaaatacagtggttgagaaagaactggaatgaaggggttctatttttttttattagtagagaactctgagatacacaaccggatactagtattcatattcatgttcgcatatctgaaaaacgaaaacgtgaaccatttcaattctcactgccatgtttggctcgaatctctcgacttgatctgcacgttcatgctcattcaggatgcaggaggaggaagcaaagcatcctgtgcaacacggcaacgccggatccgtgcaaaaccaaacaaaaagcatccatccatccatccatccatggcagatttggcaggcctgcacagagcagagcagtaaaaaagaaaggagagtgcagtcaaaagctctcctctcctttcctgaacgggaaggcacagaaggcgtaggacagtcggaaggccaccacatctgcatgccattctcgtcattctcattctccctccaccgtggggcccacccatcacccctaacctaaccgccgtcgattcagggaggtggacggccaggatggaggcggcgcctcccacgacgcgcgtggtgcaggttcagagcagcagcagcagcaggtgtggcctccacattattaattcctcctctcctctcctctccttcctataagagagaggaggtggaagaaagcaaagcttagagagggagagagagacgacgtgctcatcgatctggttttggttggaaggaggcgcttcaggtcgttgctctccatctctctctgtgtgtgtatcctcttgttgttgttgttgttggtttcttggatcttgcaggagaatcttgcttcgtttttgctttcgcgcggatggtggtggataatctcctccctcgtcgtcgtcgtttttttctttctgggtgaatttgtttctgcgttgcacgcgtatgatatagctatagggtgggttttgatcgatcgatctctacgtgcgtactccatagtagatggaaacacacatccaagtactaggaggatatgggtttctagttgctttatatataccatgtgttcctctgctcgcttccttgctttttctccattttgcttcgattgattgaatgatttccacttggtttggttggtcgatctccatggaatctctcacccatccatacggaaatgccaagtctgcgtacgtctgcgtgctccttttcttgttgttgttgtaggttcatctcgcttctttgcctgctcataacacatttctgcacctgcatccaagccaagcagaagcagagctctcggcatggcggcgccggcggtcttcaccatctccggccgccgtcgcccgctctgccgacgagagagagatgctgccttgatgctttgatgcttgctgggctgtgtagtcactcactagtcaggcccatggcccgttaggagcctttcactggcccacgagagagagagagagagagaggggagaggggagagcaaccgcttgagcaacggagggaggcggcgccggatttttggtcgatttgagaattgagattgagaagatggattaaaaaggaaaaaagaagggggaagggaaaggcataaacatctcagttgcttgagagcactggttgtccatgggagagggacatttaattatttgcaacttttaagatgtgtcaattaagaatttatcactcgctgtatttgacatgtgggtccttatgtgtctatgacatgtgagtttaatggcaaatcctttagaactactcggaagagtggcaaatagttattattcccatgggggaagttatcatgggctgcggtgcgactaagtccgactgaactgatctttgatagttagtgagggtgcctaaaaggtttcttgattatacatttatacttggactgtgtagatatttcgagtttcgcttctatagggctgtttctgatgcaattgcaatagattgcatcacctctgttcattggcagtagttttgtttgctggaactttactggattgttgcttaggctagttcaggggtgcaaatggggatggcattgcctatcaggtcttctcaggttatatacttttcctgtacttgttctgagtgtagtggttcctgaaatgttctgtgctggtttctttaatggaaatgggaggggatctgcccttcttgctaaaaaaaagaagtagattgcaaaatgaacacacatcagtgagttatttcaaaactgtaggattttgtgttgcttgtttcataattattttgctgctgacttatttcaattcttctactgaagcacatttagtgttagagaatctgtaacactgtctaatgttgtgtcatgcaaatgcaaattgaaatgcaatcgtaattcctattctaatcatgaatgaccattgccctgttgttctgtgtggtcctctgatgttctgaacaatgccatatgcacacttactacatccttgcttgatttttttttaactgtggttgtaacaaaggtgcatccagtgctgttttcgagctcaatgcaatgttctcacctgaatatttccgtgtcactcaggtctgccatggatttcacctccgacgagtcagagctaagtgatgcagatattgatgactatgctgacaagtgctacatggacctcaagtctgggaagccggtggtgagtctaggcaatgaaaagttcagatgcccattctgtctggggaagaagaagcaggactaccgttacaacgagctacttcagcatgccattggggttggcgcatccaatcgcgctccaaaggtgaaggcaaaccacatggccttggccaatcttctcaagaacgactatgctgatgcagcaggctcattgccatcacgacaggccattggaccaagtaatcctccaaggccattgcaagatcaggaagcgtatgtttggccatggatgggcatccttgcaaatgttccagctgagaaaacaaaggaggatggagctagtctgatgcagcagctagctaatttcaatcccttgcagtttactgctgtgctctgctccgagggtaggtatactggttatgcagttgtcggtttcagcaaagattggattgggttcacgaacgccttggcattccacaactacttcaaatcacaacgtctgggtaaaaaggattgggcagcacttggacaagagaagtacatctgtggatggatggcaaaagaagaggactacaaatctagtgacccagttggtaggtttttgtcagcaaatggtgatctgaagaccgtgtctggtctggaaaatgacctgtctcgcaagactgagactctcatagctaacttgtcacaccagattacagctaagagcaagtatttggtggaactggaatgcagatgcaatcaaatgaatctctctgttaaaagggcaatggaagaaactgacttgctgcacaaaagttacaatgaaggtacatactacaaactgttcatatgaataattctcatgccatgggcatatgattgctatgttgttgtctacttttattgccaatttgccagaataataatatctattgtgttgtttcattttattgctgttacagaaatgcgaaatatgcaatctgctgctcgtgaacattcacagaaaatatttgaagagactgatcagctgaggaaacagttggatgataaagagaatgccatcgagaggagatccaagcaactaagcaagtttgttgctcaaactgacatagaaagaagaaaattggagagtgagatgaaaaaggtatgaatgtaaccacagctttgctctctttgctttatgttactgtttagcatttgcatttcctcttcagagttctatcttcaggaacagctatgacaatctttctaggggtgacaggatttctgtatacttgtcatgtatctatattacacttcctgttagctccgcatttacagtctggttacgatgatctttgttagaatatcttatctgactgtttgtcttactgatttcccctacagaactctgagcaaaacgactccatccacatggctagaatcgagcaacagaagtctgataaaaatgtgctaaagcttgttgagaaacacaaggtctgcactcttgtttccaattattaatcttatgcaagattcttttaatttctcatgctctggaatttactctggcttgtaaaaatctcacagaaagagaaggagattgctctgaacaaaatcctgcagttagaaaagcaattggatgaaaagcaaaagctggaactggaaatacaacaacttagaggaagactgctggtggtccaacacatggagggagagggtgttgatgtgaagaaacgtactgacgagctgactgaggaactaaatgagaagattgaggagatatattataggtttgaatcaaatcaaactctcattatcaaagaaaggaagacaaatgatgaactgcaagatgccaagaaagcgctgatttctgtaatgtgatgatatgctgatctttcctttctactgcttgacagagtctgaagatattttcatttgtgtttatttggactcatttcagattcaatcttattatactatgattgtggctgagacctgagtttgtgcgtatgttttgtagggcttatcagaattgttaggccctcgtagcaccatcggactcaagagaatgggcgagctggatgagaaacccttccttgcagcttgcaagaaaaggtatggtactgctgacggtgaagctgaaataaaagctgctgaattttgctccgagtggcaagaaaatctgaaggatgccaattggcatccgttcaagattgttaccagaggaggaaagactgaggtatgctcaacagaatgaaatcttctggcacagtttttcgcattcgatctcccgacaaatatatgatctacacttccatcactgacatgacaacgatatccgttttcttttctgtagcaaatcatcaatgaagatgatgagaagctagtgggcttgaaggagcagctcggtgacgaggtctacaaggccgtgaccacggcgctgctggagatcaacgagtacaatgccagcggcagctacgtggtgtcagagctgtggaacaacaaggaggacaggaaggccagcatgcaggaggccttgcagcacgtcctggagcagtggaagcttcggaggcgaaggagatgaagcacgcctttcactcacactggattgaactaaggctttttgttcatgcttcgtagtgctcagttattttttggatgggattatcttggcttagctgaaactggaagattatgcattgtgtgatcctggtttctcgctctgattgaaatcgctgggataaacacattaaggtcatgaactacattctgatagaattaactttctgatattcactacattctgatagaattgtgctgtcagagcataaatctttttgggacagtattataagaatctgtttactatttctgagacaattcctttccccgaactgtttgagttgttgttgatgatgatgatgatgatttcttttcgtacccttgaaaaaatacagttagaaagagttgcatatttggaagcaacgcagcacaatggtagcttcataggcctagatgtgatgtacattatgcaatgctggacgcctggaacttttgaattcagtaacagcagttgatgagattactctagctgtaaattaaatttctgaagacttcagattagtgaaggctaacattcagcatcatcgcagagtacacaagggtatcaacatcatacaagatccaggagggtgcagaataccgtaattaaatgttaaatgttatctcttttaattgttcaagagtaacatatatttgctgcatggtaattaggtgtatttagtcactttctcgtctcactaagagtatatatctagagctttctgaacatgatgggtttgcaattccctttcatttttttttctgagaaaggaacatgtgcatattatcttataaacgacattaagtaattgaatttttaacattttacagtttcaccatttcgtcatggatggatacttaacacccgaatacccaatcaagcatagatgaaaacatacaaacccagaaaatgctctgatcaatggttgcaaattacaagcaagaaagagcataatggcctcccatctcaaaatggggcacaagggcaaaagaaacaaatcgagaaatttcttatcatgtgatcaatcagaacccacaaagctcaagccgtatttttttttcatggtcctcacacgtcagccctaactaatttagggcaggccacaacggctacgtggaagaaaagtggaagcaacacaaacaaattacagaagcgggcacaggtgcaccacacgcatcacccaatatacacctaaaccgaatccgaatccgaatccttctctcttgttatttcagttcagctgaataggtttggaatgcaggctcccgagtcaggattctgctgttccttccagattcggccggtgacccgcaatttcaactctttcctctctccgcctgagaagaacagagccatgttccgctgaattatgaggccgtcatggctgtccctaaccttccggtggctgtcccttatgctgcggggagtgccctcccatatcatcttccggccattcgcgccaacctcaaggctataactatagttcctggcatcattttcgtcgcccataaaacggaggaaggccatgtaaaccggagccactccaagttggaaggcctcgaaatgcaagcagaagtactgcccaaagcagtgaaagacctaaaaggataataaataagtatcaaatatcaccttaaacatggataaaaaaaactcttgcagttaaattgtaccacccacaccaatatatatgttaatgagactgcaagtgatagaaggcaataaaggtaaacacttacagtcaacatccaagtagcattttcgacctctctggggtttgacttaacatagcgatggttgaatgtgcaccctgagtgcatgtcaactttatggtcatccctcagatgagcaactaggaaaggaatatccccgacaactgagcattcagagccagcataagggcagttgtatggcctgaaattgcactgtgattcatgcttgagtttgctgtagtacggaaagatttctggacaacctagtgagtaatatttgcagggtagctcaagcgattcagccactttctccaatgctagacatctaatatcaccaagctcctgtcgacaggttgggcagcggttgtgcacacgggttttgcaggttgaacacagagtatgaccattttggcactgtaatatggcaaaaaatattagtcaattattaattacttatattgaattctgacttgtaaatgctgaacctagaaagattcaagcttcatgctagcaatagctagatagtacatattttcactcagacaaatttctaccaggagtattactatgagcaagggccactgagcaatagttaatgtctacaaacaagaatgtactgcatcaacacaagatgaaagatacagtgaaaataccacaaaaaaagagagggagagggagaaaacatgtactatgtccatgtatttgtgatggaataccacagacgcaaaactcacatacaaatggtacaacatggacttttgtttaaaagcttcctgattcatgagatattatgaaatcctaacaagaaggattaaaatatggtttttattgtggtttgtaactgcttttggaaaagttcagctctttctggcataataacatcattgtccgcattaattgcctgcttagtagctaatcagaaatattttacagcctgggcaagcttcactatagctaatatttactaccgaaattctatctcaaattttctaattacatggaattttaatggattatccatcgacgagcccagatggatgtctggggtcaccgggcggtagatccgcccctgcctgctctatatgttgtgacgactcattgagatcattcatcaaacacagtttcctcacttgaatctgatcgctgtgccaaatgttgcgataaaactacatgtccgtgcacaggttattaataatggtacgtctttatgtttgatgttaggaaagacttctatagtagaaagatacttaacctacacctctaacaggatcacagaaagcatgcttggtaattcttcaggctcccagtgacctaactagcaacacaaattcacaatagacaaaaaaataataatctccaagccactccagatatgaaattttggtattataataatctccaagccactccagatatgaaattttggtattataacaaactataatgtgacaacatatccctgatataaaaaagtgtaacctttaggtcagttaacaggtcatcacttcgttttaaaaatgtgacacatcatacgacaccatatgaccataatagtccatcaagcagtaatacagtccaaagtgcatgcaggaaaagattttgatacattgggcaatacttcttaacaaacagttaatacagctgcttccaagtaaattttaataaaaaggtaataagttgcaacagaacgataaagaaaacgaaataacaggtaacaaaaagaataaccgatcatcttaaactacatgacatcttccatgtcccaacttaagccttaccttccacttgtgtaagggcatacaagcatgcatacaacacatcccctagactacaaaaagaaatgcactaaaaaaggctagaaatgaactgttctatacaacccaacacttcactagcatttgttgtagtgatcatccttgcatcccagtgatattttccactaccaagcatctaataccatgaaagagggcgtcaaagtaaagactcatgggattcgcgaagtgacgtaacaaggcaaagataggccgatcctcatctccaaatgttctgccgcacatgctgctgattccagacataagaatatattcacaacaggagatactcgattcctctcccaaaaagaaaaaagaaagacgaaagaagagatactagctaggtgttgatatttggtttcaatttgccgtaaacctgtaacctaaatggggtcaattataccgattgcattaactaaacgtgaagagcagtggtgtcactagacaataatcagaacaataattttatctcctgaaatgagaaattgctggatcctctcagtccgtaattgattatcgttgtttaaacagcattgcaagttgaaatcaacacgccgcggcaaccatcctatcccctgaaatgcagcaagcacgccatgttttcccgtggcagggaaaggcagtatccaagaagccccaggatcaagaacccccaaacagacacgcaacgaagatccagccctctcacagcaccggatcacgcgattccaccccaccgacgacgactcccttgcggtgagaggagatcctagtagtagaaagaaaccgcaagaaccccaagaatggcggacctggtggatgggcgggtacatggagttggtgcagacggggcactcgagcagctcgtggacgctcgtcgccggggggacggcgggggccccggccacgaccccgacccctcctcctcctccccccgcgccccctccgctgcccgcggagacgacgaccacgttgacggcggcggcggcggaggagggcttgacgaggatggggcgtggcaggtgggagacgccgccgacgccgacgccatcgtcgtcgtcgtcatccatgctgtcggagtaggagacgcactcgatgctcgccatgtccatggccacagatcgaacccgaattcagctctcagctcagccccccgcccgccgcccgcgagcccgccggggcagggggagtcgatcgggtcgaaccctcgtcggaggcggagggtgatccgccgcgattccgattagcggcggcggatggggatttggaattggatttggagaggaggggattgttgcgttagcgtttgggttgcggggtggtgtggtttggtggtgggggcggtcgattgacgggtgtaatggtggtgtggtggtgcgggaggattgggtgggggtggcttgtaattacgtttttcttttgcttgtgcgcttttttagcgacgaggggaggggattcgattttatataaccaaccaaacaccaaaaaagcgtggtgatgatgcggggggagtgcggataaggtgggggtgcggcgaatgttcaaattttaaactgacgagggaggggagcggtggcgttggcgtggtggcaaggctggccggctccgtatgctgctttgctgctggctgcaaatgcgatgctactacttctggtacatgtggcattcattcaaagcctgcagcagcattcgattctcgtgctactttgacagtctctgagtactagtacggcactactagtaaaaaagaaggaaatatatactgtcacggtccttcaacaatcgaactattcgtcctaaaagggatcaatttgtactaggaccggccttcttcaacccattttacgtttgaccactcgtcttatttaaatttttttttacaaatataaaaaacgaaaagttacgcttaaagtactgtagataataaagtaagttacaaataaaataaataataattttaaaaaaaattgaataagacgagtggtcaaatgttacaagtaaaaactcaaaatccattatattatgggacagagggagtagcaatcaaacattcaaacctcttctctgctctttgcactgaggtaagcattcaaatttttgtttagttccaaaataattcttcaaccttcctaactttttcagcacaatttttttacacacacaaactttcaactttttgtcgtatcattccaatttcaaccaaacttttaaaattttgatgtgaactaaacacagcctaggaatgaaaagggatcaatttgtattaggaataaatatgaatgaaggagtacgtgccgagagatggagtgcagatgataccaggattctacgagtatatgcggagaacatgaacaagcgaaggtctctcttctcttcttttctggtctgtcaccggcacattgctcacccacgagagccgtggtcgggtgagcgtgcctacacgtttaccagaataacaggcgggcgtggaccaaccatactgtacaagagattacccctagaaaaaaaaatatggttattatcaactttacaaagagaccaagaaaccggtaccgtcgtcattaccagaccaggtatggcggccagtttctttcaatgattttcctttttccaaatgatcaggactttttcgacataaaatgatgagaactttgaacacatgcttgctgcttaacctcccctgccaaagatgcaataacactagtaactgcacctgatcagtgtcccgacaatatattgccagtaatcataatgcatcgctcgacaggttccttccaggaaatgaacaggaggcttggaacttcatcatggccatgagaatctattcccctttaccttttctttttaaaaaaatgtcacagaaagggaaggttttgatcgccaagagaaattgcacccccgacatggaccttatacatgaatgtatgaggaggatgactttacatttgaattggctacagttacatggccgataacaagttatatacataattactgttgtcaggaatccctacatgctggccactctagaaggggcttctgtatcaatgtcaggttctccatccaccttctccgaccgtcgtagctgaaacgtaaatcttttaggagcgtacaaataagtgaagatggagaccaaccagaaatacaaaggctggtcttactaattaaacaatacgacactaccatgataagtgatgcaactgtttgcttgttctcccaaaaaatatactatatacatatcaatcgttgtctctactgaaaaatcaggagtgatgaagaaaactgataaacatgatgtattaaatattacttgaataagttcatcaccactagcatgtaaggctcaaggggaatgtaacgactgattggttctttaacattttcaacgtatatttctaccagtaactagaagtcatctttaggtattctgaggtgaacaggccagcaggggaattcacaaaataaactagccaataaaaactgctgaattagcatgcctctaatgtctgcaaccccatgtctagccactgaaatataacaggagcaacattaaatgctgcatcccatatctaaataatagtgctaaacggtcaagtgcacataagaaagacttttgaggtaacatcgtgtatggaaaaatgatgatgatgctcaccgttgattctttattatgttcatccaagtaaaggtccaatgctccttctccacaaagaatcttggctccagaaccatgctgatttgtagatccaacagagtcttcgtcaacaacaaccgcgtctattttgtcttttccagttcgtatttctggaatctgtaaaaaaaataatgttcattacaatggtttaagtaacaacaggacttttgacatagtaaaactgaaaaaaaaaacctactcaaacaatgtaatggaaccaacggacaaccaaaagtgtaaggccccgtttggtagggctccaactcccaactctcaactctaaactccaactctagtgagagctggctcctataggagttaaagtggatatgaaaagtgtttggctatattggctagctccactcgaccacgcccttgttggaatttcgtcgaacaccttggtggcgtcgctggcg

SEQ ID NO: 5157 - DNA, 28133 bp, Oryza sativa
  unsure (1)..(28133): unsure at all n locations
gggaagagaagccgggggtgcgtaggaaatatctgtggatttttgggggaggtcgccgtccgccctggagagtagcggagtgtttcttgcttgtgggggcgggttggtacggtacctatccttttccgcggctgcttcggcgaacgccaacgagatgcctagagagagaagaaggaaaacgtattgtagctttgctatgtgatgatcatactcctcgctccttatcatcaccattgaccaaatcacaaaatgatactccctccgtcccataatataagagattttgagtttttgtttatagtgtttgaccacttatcttattaaaaaaaaattgaaattattatttacttttttgtgacttactttattatccaaagtactttacacacaatttttcattttttatatttatataaattttttgaataagacgattggtcaaacactgcaagcacaaattcaaaatctcttatactgtgggacggagggagtaactattagtttgaactagctcagtgtaaagattaagtgatggatacgtaaaatgaaaaagtcactggtgtatagatatttgagttttagttattttaatcttagaaaataaatgtatttgatattttacggcaactactatatagaaagtttttatgcgaaacacaccgtttatcggtttgaaaacatgctaacagaaattgaggtaaaattgtattttaattagaaaagaaaagggcagtgcgctaatggtagtactagattattattatttttttacggggagtagtactagattattgattaggagggaatcgaagtaccctacaacccgccgttcttttcaatctactccttgcaatttaatttgctgcaaaagactagtcacaagtttatttcatcttttaattatccacctctatctatttttagccatttctcatatcccatgagcctccatagtagtgaacgatgttgctagttgccaccaaaggtgtgtaactcaacctccttgcatactttaattctaccaacgttgtagcagtaaacacacgacaattatcacatactatgaaaaaaggtgcatcaaatctcatgctcaatagaagacataaggagtaacgtcactcaccatactgggatctatatgatgcgagaaatcactgagtgtgatgaaaaaaattagcgaaaactgagttagaagaaaaaaatagacatgtaaagagtgtttatgaaattaagttgcaggggaagattaaaaagaccagtaggcagttatttggatttcccttattgattattagtagggtgtactccccccgtcccattttaagtgtagtcatggttttccgcgtccaactttgatcgttcgtcttatttaaaaaaaataattaaaagcataagtcacgagtaaagtactattcatgttttattatctcataacaacaaatactaattataaaaaaaatttaaataagacggacgatcaaagtttaacgtgaaaactcatggttgcacttaaaatgggacggatggagtatataatagtgggttacgatgaaacttggtgtattaaaaatgaatcacacccgtcttgcctttgaacttggtaggagtattgccctgataatttatagaatgattagatttatgactcattttgaaatgaaggattgaaaaaaatagaggaatggaaaaaaaatacaagatttgatagaaatgtatgagtgcaaaacaaagcagcgcaaaacataaggaaatatacatgaattgtcgtttgaatagacagtaagaaaaacacataaattcgattagagatatagcctcaaatgaaatatttttaaggggttaaaactctcgctaacttttctctaaaatatttataggattatctatttcatagaaatttcaaaagaagggataagatcctatgtttcaaaggcatttctagatttgtttcttataatattaaagtcatccaagtttcctatattttttctacaaattaaacggggctttagaggagaaaagaagagtttgtatggggtcttatccttagctccaaaatagtcagtatattgtttgtaagcacacgattaaaaaggaccaacgctaagttcgaattcttgatcttattaaattaatcaaaagttatcagttagatctttacctgcaaactaaatttgagtataactctaaataaccacggataaatctaactacagttttctttcataaagcaacgacatgtgtgattgtgttgaaagtttctttatctgaaaatagtgaaagcttccatttctacatcatagatggcccacatgaattcttctagactttaatctgtttgttataggactacacctttgaggcacacatcaaatgaaatcatccgtggcagagaagtccactccatttttttctcattcgctcgaaactacttcctccctccttaaaaaaaataaaaaaaaagacaaaccctgatttccgtgttcaacgtttgaccgtccgtcttatttgaaaaaattatgaaaaaaattaaaaagataagtcacgcataaagtattaatcatgttttatcatctaacaacaatgaaaatactaattataaaaaaaattcatataagacggacagtcaaacgttgatacgagacccacaatttgtctttttagagggagggagtattttagccagtagcatcacatcgtaacccggctttcctctttactggcttgtcacattctctagcttttgccaagttgagaatccttgtatgtaccgtacatagaaggatattagccatccgttttgaggaggtaagcaattggtgggatagagtatttaatttgcctgtgtccatggtactacatggcactatctatgacgtggtaatctctttttctaaagtagagttaggtaagtttgcaatggtaaaatattgttaaatttgttacctaactaaatttgcaattactaaatttcgataagatctaatttagcaataaagtgaacgccccaaatattactttctattacctagaacacaccaacagatacactcgcacgtataaaaatgtgtccctgattttgtggttgttgcactaggctacggtgtgtttgagagaagagaagaaagcagaaaaatgagaagataccactaacatatgattaattaagtattaattattttaaacttaaaaaatatatctatatgatttttaaaacattttctatggaaatattttggaaaaaaacacatacttttgtgtttttcctgccgaatgcaggctacacctagcataagtcgatgtactgttcctatattttattctttaaaataaccaacatcgatcacttcatcacgagataaaaggttaaagagcagggcttacgtatacttagaaaaattattacaaaacagttgctaataaagttgatctcaaacctttaattaattagttaatacttccgttctcatatttaactttgatcattcgtcttctttcaaataaaattggaatacttaaatagatatcatagtatcaaaaagtattacatactaataaacattaagaattaaaccacttattgtaatcaaattatttttaagagttataagtggtcaaagttgaaacaatatcgatcaataaacatatgatagaacttataaaaatcatattcatccacatcaatatttatgaaaagtttgtagctattttactttacatgtaagagtattagctttttctgacggtgagaaattggcttgtgggaatctgccaacttctgagttctaattaattttctatatttttctcagaatttaactgataatttaaactatgtagggaaacttgagattttaggagaacctccagtgtatggttaaaatcaaaccgtgcataaaaaaaatcgaacagaccatgctgtgaaagtcggctggtaagtgtccggaggaaaacatgttctttaaagagaagccgaacacaaccagttaaaaaaatatttgttgcgcacggctatcagactgtgattcttttttcgcatgggtcccacaatcgatttttacactgtgatggttaaagagaacttttgttcggctttcatggaagtgctagtcgaactaaacactataggtgccctaacagaaggtgaagctgttagagccgatataataggatgttttagcggcgatactgtatgtatcctaccaaatatgctgagttggctgagaattagcagagagagaaagagagtgtgtgtgagccggcgactaatttgtcgctgactacacacacgctccaagacaatggatgcagcaccatgactgcttctactggaacacgcaagcaagcacatgggcgatttcgatgttcgacggcaaaaggggcggagcgacgggcgaaatgatgcagcgggaggaaagctcgatggcgacgcgattgagagctaacagagaagtgagttcgttggcggcaatgccgacggaagccgggaggtcgaggatagggacagctttgttggcgatgacgccgacgaaagccgcgagcccgagtacggcaacaacgttggtgacgcgagtggcgacgggagctatgagcttgagggcgatgaccagagggacgatagttctacgttctccatgctccatggagcaagcggctcaatgcagctgcctgttgtcccaccccgcccgcactccacgcttttgctacgattcgctcgctggcagtcatctagccatggcaccagctctatgtccatccatctttgctagctgcttgcaacctgcatatctccataacaatagatagatcaaataagaggtggaaactagaaagggagttgtagcaagctagaagatggattggacatgaagatcgatgggaactgtgtacggttagggcagtagcagtgcgtcccacaaaagtgaggagcccatatgtccacataggagaaaaccccggaaaaaggagtcgaagcacctctcttcacagtgcgggcacgcgtagtgtagctttaggtggaccccatcaatttattttcctgaggccgaccccaccacgacgtttctcttcatcttcccggatcaatctctcctgcaccaaaccaacctccgctccttcccctctctctcttcctctccctccctgaactggcacatgacatcaactcccctccccctactctcctcgtcagggtggaatttgtggacgtgggtgcctccctccccctaccgtgacggacacttggcgacgacgaacttggcgctccgggtggctcaaatcgagagccggcgtgggcggcgaggtccgggtggctcggatcaaggggcggcgcggccaacgagctccaggcggctcagatcaagaggcgcggccaacgagctctccggccccacgccgcttttcctccgccgcaccatttctccctcctccccatccgacggcgcatcgatgcagacagagctggacgggagcaatgattctagcgcgggaacaaagatgcagagcgagggagcagaggattgaagctacgacctccacagcgcagacgcgaggtgattccctgtgtcacgcgtcctcctttcgacgagaaaactcattgcccagatagggggtgggcgactaaacagagtaccatgcttcgtcaccacatatgcgcgggtccgacgtggtgtgcgagataacgctccagctcaccacactgtaaaaggccttagaagaatactccatccgtttcagattataagacattttgactttgttcaaagttaaactattttaagtttgacgaagtttatagacaaatacagtaatatttaaaataccaaattagtttcattaaatcaataattgaatatgttttcataataatttgtcttaggttgaaaatgttatttttttctacaaatttaatttaatttaaagcaatttgactttagttaaagtcaaaatgtcttataaatgtaacagagggagtatatgcttactatatgaactagcaaaatgtccgtgcttcgctacggtattaaccaaagttattttcacactgttttggtactttttcttgctagaaaaagtctcaaatgatatagagaaatatagtagctcataataaattattgaatgtttgcttgctataaaaaatctcaaatgatacatagaaatatagtagctcataataaattattattcaatagtgcgttgcaacgggaaaaaactaatgttattaagttagtaaatttatagaaaaaagagcatccacgttagctcttatggtctagaaattctcatattaattggagtaaaatataaaaaataaggagaacttattgtagacaaggactctttcattttttttaaaaaaaatcgcgttgtccaatcataaataatattggatgaggagtctagaatattctccaaaagcgcctagagtgcatataggaatacaatttagaaaaaaaaaattaaaattcaaaataaaaaatattgaaagaagagtttaaagtccatatagaaaactaattagaacaataaaaaataggaatattggaagaagaatagagttcatatagaattaaaaataattgaaattatttaattttagtctaaatttaaattctatatcatgagaaataaataattgcatttttagttgaaaaataaatagaaaaatctagccaaatttttagtttattgaatttagttggaattaaattaataagcagtcataaacaattaaaatggtattaatgctatttcttaaaatagaaagatgcttaaaattactgagagagaaaacattgattttaattgtgggctatttggaggcccaataatgcggaggcccaatagtccggtggtccgatgcgggagaagccggagtcgttctatcgaatggactgtccagattgaaccaatataaatatatgcagcaaaaccctaaccctaaaattcttcccccctccccacttccaatctcctttctctctctctatctctctctctctcttgatcgaaaacttacggcaacagcggtgacctccgccaccgaacagcgacggcggcgccctcctcccccccacccacgagcggctgcggtgcgctcttccctccttcccacgagcggcggaggcggcggctccctctgtcccgtctcgcctccctcgccggcagccgctccctccgccctgtctcgcctccctcgcccctcctcctctccatctcgcctccctcctgtggtggatacggcggtgatggcggcgggttggcagtggccgcgagcggattcgagggtggtggcggcggatccctccaccccctctagcctccctcccgtggcatatccgccggcgatggccgcgggcggatccagcggtggcggctccctccccctacccgccttcctcctgcggcagatccggtgtcggtggcgtccgtggtcggataaggagcggcggctccctccgccgcaactcttctccctccggcgacggtagcggggttggcggcggccgaagatggatccggcggcggtggcaacggccgagggcggatccggcggcaggcgagtgaagttttgtgatgtatattgttgttcttctttttgatgtatatttttgtgaagttttgtgatgtattttgtgatgagtgtggttgattttttttttgcaaagagtggttgagttttggttgtgccgattttgggaagtgtttccatgtttctgattctaagagcgattgggattcgggggctacgaaggcgcaccgccgacggacgaagacaccttcgtccgtcttgtgatgaacggaaaattacgaatattttaattagttaagatatactccctccgtttctaaatatttaacaccgttgactttttagcacatatttgaccgttcgtcttattaaaaacttttgtaaaatatgtaaaactataagtatacatataaatatatttaaaaatgaatcaaatgatagaaaaaaatgcgtcagatatttagaaatggagggactatatacacagcaagcagactgcagaagcagaggagacgtgtgtagatccctctccctgatggcttcatcaaagtccgtgtgtaggccgccctggacaaaacggagtccgcgacgtgcgtggcccacgcgacgttccacctgggcctcgatctgtatgtgtgggccttcatatgttgagcccattaatttgtttttgcttgggctcagttgcctgaagaacactcggatgaatcggagagcgcacgaggaaaaattagcgcgattaatgacggacgaaagcacgcaatcacagatgtgacgaaaggaattatatgaatcatttaatttaattagttaaaattggtagtttttaacgctacctataataagctgatgtgccaatcttggagccagttgcactatctcgctcttaaaaccgagcggccgagcgtaaactagcctcaaacaaaccgacctggacacgtcgacacgatcacatggtccatcatcctgggcccacaagtcatagagccaacgaacttcaattcagccatccccaacaaatcgcatcgttactcctcttcctctgcctgccgcccccaatcgccggcgatgccgcgccccgccgcctcctcctccagccgccctccgccggaaggcgagccggcctcgagccgcgcgacctcctctgcggagtcctccatcgcgtccctcatagaccgcgccacctccaccacctccccctccgtcgacccggccctcctccgcgccatcaagtccgccgcccgcgcctccgacggcgccatccgcgacgccttccggatcctcctctccctcatgtccaagccccacgcccacgtgagtaagctcctccctgctggtttgattcccttgccgaattcgcccaaaccctaactcgcccaatcttcaggtgcggctgctcgcgttcatcatcgccgacgagctcttcatgcgctcgaagctcttccgctccctgctgaccgacgtgctggacggcttcctcccgctcgccgtcggcttccgccgcgcccacccgctcccgccgcccgctgcctccgcgaccctgctccgcaaggccgccgtccaggcgctcgagcgctggcaccacctgttcggcgcgcactaccgccagctccgcctcgccgtcgagtacctcaaggagtccgcccgggtccagttccccggcctccgtgccgccgtcgaggctcgtgccgcgcgggaggctcgcacgcaggagatcttaactgcaaaggtcgagcagttgcgccgaaacctggcagcgattaaggctgaaatccgctccgcgattgatgagatccgcaatgggttggatatcattcgcatcgagagtgaaaaatttaacaattatgcaaatgatgaggatgaggagcaggagattgcctctttggcgatgcggagtattaggatggcttctttgatggctggggagtgggttcctgagactcaggagaatgaagcagttttcgacgcgttgagggagtcatatcggctccttgtgtcaaagcatttggtcacagttcaggaatggatatctgtgctggttagggtcaatctcgcagataatcgtttcagagattctgctttgaaggaattcattgatgttaagaatgaaatacgagcggtgagaaatcggtgtagtgagcttggtcttaatcttgacaatgtccataggcggaagggtgttcaggaggaagaggatgatgacttttgggttgaggggaatattgaggttcctagccctggtagagtaggtaccagtgcagatgttgcaagtagcagcaaggacactagaaagggaaagaagccagtaggtggcacggatactgatgatggcaaggcacctaatgctggcaatagtcctcaagagctggatccagagagggcaaagctgcatgcagaagcccctgtgctgccatggagctctgttttggatcgttggggttctaacagggatgcacttgtaaaccaaaggggacttgagctcgagagccattggggaagggtggataatgatgctgttatacctgctgcaaagattgcagaattaaatgttcatagttcaatatatagagaagatccagttgagattctaccatgccttgcacctctgaagaaaggaggcctttgccagagaagagatctcaagatatgcccgtttcatgggcctattgttccacgagatgccgaaggaaatccaattcatcagagtgatggccattgtgatgcagaaggaaatccagttgggcagactgatggccattatgatgcagcagtaagtcctattgatccgaatgaagacagttctgatgtaagagaaaatatgattatgccagatggaagcagtgatggtgaatgtatttatgagtcctctccttcaagaacggcaaacataaataatgacattagcgacagcgatgtaggtcatgacctcggtaaaattacagtggagcagttggcgagacaggcagtgcagaatgtccggaaaagagacagggatgacaaaaaagctctggaaaaagcccaacgagcgagaattcgtcagcataatcaagatgttttgcgggaagcggctcttgcttcaacctcgcgctcagcggcagactatgacctcccttcgccagcagtgtctcgacggggacgccgaggtaagacaaagggaccaacactggcatcgatgctgaagaagaaagttacttccaaagatagaattgcagagaggcttctgaatgctcgagctagggatgcgacaataagagaagtttcacatactgaagatatgagctacagagaagcattcccaaatcaatggtagtataagaagcctaatttttgctgaataggttggtgaatcgtcatgataagagtgaatcaataattctttctgtgcgcagttttcagttaaccacatgtcttcttgagttgcccagatacaagtaaaattgtaggttttcattgtgaagtttagtttttgtacagtacagtagattgaataagtttcttttatttcttttgcatgttcattttccctttgtaaacatgtatatgtaccactccatacttgctggattaataactatatacgctgaggctgcagttcaaattgtgttattttatctgagtaatattgtggattaattaatattgcggttttatatggttcaagacttcaagttgctggtgcaactcgtgacctcaggttttacagaaaaaacaaggaacgaccgttgttgcataatagatgtaacatgttattttcacccatacatgttagcatatattcgctacttcctctcatagaaatacgatttgttgtactagattgtgttatattcttacttaaattgtttttttttttggacggaggaagaacagaaaaccgtttggaaagattagaaagcgctcttctgatcaatcagcacacctatctctaaaagcatacagagagtaattccactccacagtgcacttatgcctcgaatggaacagcgcaaagcaacgatgaacctctgcacatactcactccgcttcataatgtaaaactttctagcattgcccatgttcttatttgacacatatatataacatagttgctaacacattgcacaatgttattatttttcacacattactaacctaattagtacatagttatatacacattcacttacagaaatacacatatacacagttgctaagtacatcacatggttcagatcgataaacagaaattacctgtgttcagaacgattagaaacgctcttatctgaaccaggcacacgtaaccaaagctaagaacttgcagagatttccattccagagagccgcttatgcctcgaatggaatttaacaaacacaaatctagcaaaagcaatatacacctgcacatcatcatcacatacacaaattaacctaccaaactggacacacacacacacacacacacacacacacacacacacacacacacacacacacatatatatatatatatatatatatatatatatatatatatatatatatatatatatatatatatatctatctatgtaaccccagattcaaatccaacgtctcgttcgagccgccgtcttggaggttcttacgcgccaatggaggcggcaggttcaggttgaggtccagcgcggtggcggcggtcgccggcgccggcggaggtgatgccgacgtggtagtggtactactgctgccggcggtggagacggcgagcatcgatatcgcctgatcggcacaggaacgatccggccagtggcaccgcttgtggccgccgagcgcctggccggtggcgaacccgcggtggcagacggcgcacttgtggtcggcgcaggttgccggggaatgatgaggagcagcggcggcggcgggggcgagaaggcgcttcttgcccttgcccttgccggcgccggagcgggcggggtgagcgccggacagcatgaggaggctggcggcgacctcgcgctccctgagcgtgaactggctggcggcggtagacgacgccgcgcctgcgccgccaccgccagggggcgtgatcccgcgccagtggcgctcggggtggcagcgcatgtggccgaacagcgccttccacgagaggaactgcctgccgcactcggtgcacggcggcgcgtccccggtcggcgacgagcacttggcccgcgccaccatggcctgcagcgggcgagcggcggcgggcggcgcgagcgacagcgtgagcgtggtgtcgtcatggcgcggcggcggcggcatcggatcacacggcagcgcgggcggaggtgacggcggggcaggaggtgaaggcggcgagtgctgctgcgccatggtgggctgggagcgcgagaggagaggagaggaggtttgggtttgggagtggaagttttgaaggtggtggtgggaagggaggaacagtgcgtgtgctcgtggaggttaatgcgggcggggagagcgggaggaaggaaggagaaaccgctacttgccctcagcctctggcctctgctgctgtgtaactgtgttgtgactcacatgctcgtttagatcaggctgtgtttatttcacactaaaattggagtagaagtttggttgaaattggaacgatgtgatgaaaaagttagaagtttgtgtgtgtaggaaagttttgaagtgatgaaaaagttgaaagtttgaagaaaaattttgcaactaaacacggccttagtactccctccctttattcgttttgattttgattaaaatcaaattgctttaaatttaattaagtttgtattaaaaaaataaatgttttcatcccaaaatatatttaattactagaaaaaatacccgtgcgttgcaacgggtgaatgctattttagtcttattattgttatacggtttagctatgatgaaatttaatgtgggaatttgcttgtatattcttttttaagaaaatcatgagctacaattagaagtccgactttcatctcaagttttatgtaagtttttttaaaagaatatttccaaaagcaaatgaagttaaaatccaactcatacacgaatcttaaaccgtatgaaccgttggatctgcatttccaaaagcaaacgaacttaaaaaatcaactcaaatacggatgacataccaaaaagtaaaacctcttcaatttttataatagtagagatagctttaataaaacaaaaagtaaattgcatcgtcggtacacaaacttgtcaggtgggtgcaatctagtacacaaacttgtaaaattctcgtctttgtgcatgaacttgtctattgcgtgcggaggaaggcgaaaaagacactatatggataatcttattgatttagggcatatatttgagaaggttgctattagagatgtacctcttcaataaaaaaaatagaataggatatagtgatagcagaaaaagattaaaagacgagcaatgatataaatgttagaaatatatgaaattcatcatttccatgatgaaggatacaatatagaccaaatttataaatattgaatgtcttatgcatactcactacacgtatgcacgtcacatcctaatcaacgtcaacttcgtaaaattaacattgccaacatattttggtcctcattcgcacaaactagacaagtttatatactgaaacgagcattttacaagtttatgtactgaattgcacccaccaaaatagtttgtgtaccaccaatacaatttactcaaatttagatcaaaatcaaaacgactttgtaatccgaaacagatggttgtaatctgaaacggattgagtaatacctaatcagcctaaaaggctggggggccggcccttcagattcttctctcgtgatgggccgtagtaggcctgatgggacacatgcccaatcttttcggataggcccaatctgatttgtatctttttggttaatttttttcagtttatcacttgatgaattcataaatcagaaggttaaattggatccgtgaaaagaagaaaacaaaagtgaaagcgaatgtatttttgtagtcgaaaatcgtttctatatttgcatatcaaatttgggttgcgtgttcatggagggacaccggacacgcgatgaaatcatctgcgcatcctgtactttcaatttttcctgtgtcatccaataaaaaaaactaattcaaacaaggaaaaccaagtgttgaaacatggtaaatgatttaccgttggatcgaccgatcccgttctctcacttcaacagccatatatattatattaggcccatccacgaacaaatcgaaccgtcgaagtgactctgtagccccgtaactggaaatgaattcatattcagatttgctagtcctcacggccgcacgctctcgcatcctcgcgtttcatcctcctgtccgtgctgtggatggactcaatgtttttgttcattgtttctcggtaaaatttctgcaattttgtttgagaattcaaattttgtttgaaaattttcgtgatttcgctgacccccgaaatttttcccatttccgataggttgaaccattttgatcttcaagactccaactcgtactcggtttgtagcccatctccgactcggattacacgtaggcgcgcgcctatttatagctgctgccctgcccgtctccttactccattagcttgctagcgcgcggcacaagagcagtaagcgaggcgcgcatggcggcgcgcgccggcgacaccggcctgagcaaggtcaggcgctactggcccgggagggcgccggactgggcgtgggcgggcgccgctgtcgctcacgacgaggacgacgcacgtctcgtctcgacgcttgacgagatcaagcacgtggaggaggaggcgctgaggtcgccgcgccgccgccgccgccgtgtacggcagcctcccgagatcgtctcggcggcgccggcggttgactgctggcatgagcccgatcagatcgaggaggaagaagaagatgacgatgatgcccgggaggagcgcagagcgaggataagggagagggcgctgctcctgaggcagcatgaggaggagcagcttcttcttcatcatcatcaccagcggcatcaggaggatgaggcggcgtctgagtccgacgagacggcggcggaatcggactcggacgacgagcagatggccgtcgtctacatggccgcgcccctgttcgtccccaagtcacagcgcgacaccatccggctcagggaggaagaacagcatcggcagcgccggcggcttgagctggagctggacaagaagaggctcgaggacaggaaggctcagacgaggcggatcctgctccaagagatcatcaaagaagagctcctcgccgccaccacagcttcggccgaagccgaagccgccatcgacggcgtggacaccgacgacgaggtggaccaagccgaggagcacgagtcgtggcggcgccgggaggcggcgagggtcaagaggagcagggaggagagcggcatcgacgagaacccggtcgctgatgatcgtcccaagaagatgacgatcaagaagcagatgaggttcatgcggaggtactaccacaagggttgcttcttccaagacgacgccgacggcgcggcgcagacggccgccggagcatgcgaaatctaccggcgagatttctccgggccgactgggttggacaagatggacgtgagcgtcttgcccaaggtgatgcaggttaagcactttgggcggcgtgggggaagaaagtggacgcatctagttaacgaggacaccacgtacaggaactatagctagcctagagtagactgattttaaggttccttagaagatgggtactccctccgtttcacatctattcattaacatcaatacgaaagtgggaaatgttaaaataacttacattgtgaaacggagtaagtagtatttatccccacaattttgtgaagatgtgagcagtggcaagtttgttttttttctttgctccttgcagtgtaaattgttttggcttgtctatgctttgtattgcatttgcattcataaatcaaacatgaaaagttggtatatctaagcaatgttcagaataataagaactactccagtagtaaaaaatttctagttaacctagatatctcacttgaacttatcactaagtttactaccttaattaaattggtcacaatggtcagatttaaattaaattaaattaaacagcagctgcacataattttcagtgttaaaccttttatagtagtgcataaattgcagtacccaccaaagaaaaaaacataggattgaacaacattggttcaaagggagtgttcacctaagatagttgcgctatctctagcgagttttcctaaccgtagttgctacaaaccaatccttcacttcaaacaatccgttgattgcctcattttactcgtagtattatcatcagaggcacaagtcctcccaggtgtgtatattgggaattgaagcaaacttgacagtaaattgtaaaacacgaacgaattctatggcaagaaaaaaaatatcattcagaatttcatatgagccctaaaacacgtgtagcaggtttgcagagtgacagaacagaagggtaaaatttccagtactaatttcccgttaagagaagcttgattgcttcatctgtgcctccccacttttgcacgcaggttgaaacacgtgtggcctgcaaatggcagaatgaagatgagcgaggtttagatttaggtgcccacgaaaactaggcaggtcgaaacaaattagtaacagagtatggtattgaccattcacttacaaaactgaaaaaagttcgatgacaaagtaatttacatttaatttataaccatagtataaatgctttgcaatgtaatacctggtggcagtgacatgattttgcagtgtcctagataaaagtcacgaaactagagtgctcggttgcaattttttttggcctaaaagtatctatgtacgaggatcctgagacattttgatttaatgactaactaaaagcaaaggtattatgacagtgtttcacttccaggactaactgagctatctgttttatttccatatccgagttatctgtttttcatttttgtatccaaagaaaaataaaaattgaaattgtgacaaaaaaaaaaactaagcaatctgttttatttccatatccaagctatctgcttttctatgtgtaagtgcagactataccaggattcacaattttcgaatgccaaaagaaaaaaaatcagggcactgaaattcagaaatttcaggggggaaatgtaactttgcaaactgaaaattttaaattttggatagattttcactgaatttgaatttataaattcaaacaaattcaatttttttgggcagaggcacctcctgtcaagtgtcaagatccacctgtagactagaatctttgagctgaaaatgtaaacattagatttacctgacaccacaggctgcacactgttgagcaccatggtcaaaccaagaagccctgcaatcttggcaacggcctgccacagcttcacatcgctggtgagtagtgaatatgatggagaagtgatctccgagaatcaacacgacagccatgcaaagcagccaatcatcagcgactcaatgacggcaacaatgacatcgaacatgacagctcttggacaaccggaacctaagctcattggagactcgggtactgaaacaaatggcaattatcaaggttaaatgaaaagctttggtattataagttcatcaagtcttttgtttcaaagaaaataaattacaccgattcttgaagacactttctagttaagaacattgaatcatcaagtagaaacaaattatagtatatgtagataagagcaagagtctgcagccaaggaagacgtagcaaaaaacgttcatagctcaaataatgcagcagtataatcaagaaccttaaaaataatagaaggttaaagagtcaaacctgcgggcagcctggcaccaaatactgttagatttccttcaaatattatattgtcaacatgtaaccttaaaaatacttaggtaatattaattctgttagtatgtaaccatatattataaacataaaaaagaaatgccacataacaaggtagtattgaatatcgcaaaatggtaacctttttaaatgaaaaattactttaaatcctgtaatcagtaatatggtattataaaagccataatccaagaacaagactagaatccactttactccagactgaatcaagatataagataaatttaagctgcaggtgtcaacactcaatagttaatcaatgcatacacataagaatcaccaaatggtccctcaatttcatgagatcgaaattgcctcctcaaatatgaaagcggaaaaacgttagcctctagagcatcaattaacaggttcatttcagcccgtatactgagctgctctgacaccatagtgctgaccctgtacagtgagttttcttgctcagcactgttagaagtccaattgccatccaagcaatttactcgatggatagtgatcatctatagaaattttggaataatcagtgttgatgattgtgattaaattgcttggagtagcaattcagtcttcttgctatgtgtgattcaggaaaacagtgaccacactaactcagagtgccatggtgccctgtcaaatcagtaatggataaaacgagccaaatttggaactttgaggactactttggacattttagtagttggtggaccaatttgagtctagtgcgaatgttcagggatccttttcgtgcaataagcataaatacaaattgattgataaacatgacaattgcatgtgctttacgtgaactctttgttgccaattcttaactttatttacaaatagtatatggaatttaggaaataacatagcactgtggcgcctgtgccttggccttggtgcacgcatcctcagggctcctcttagaacttggaaaattttaaactattaagtatgtggttgtgaattggttttgcacaatgtcttaaattctttagtaattcaggcatattacattctgaatactctgataacttccaagatttaggagcaaactgaaactcaacttattatggaacacttctattaaataataagagttcaaaggtgatgaatgccattgccatagactgagtgcaaatcacctcatctagaaaaaatgtttatgtcattcctttttaaggagatattcatgttgtaatagtacagaattctagtgcagtcctatggagacctgtaccaaggaaacatgcttggaatcctagcattaaattgtgcaaccacacctgatgttacagaaagtgcaaatgacagtaacttgcacagatacacagaaacaaaaaagtaaaaatgataataaaaaaggtatgttttggtggcaaaatcagtgttctaaaagtaggtgataggtgaccattaggcactaggcaccgggtagcatgattaggcattagatggtgcattaggcagctgaactactttgggtggtgtttggttgctattttagtgttacatagtatacttttatgtaatatgcttgctaatttcttggatttgactagttgatgacctaggcaccgcctaggcgtcaattagacattaggcgccacccagccgctgagccgcctgactaaagcccaccaccttcttgagccatggggaaatgtttactgtccagatttatttctgaacaaagagattctcataacagttcaccggttccaatctattcagataaaacaatgcatcgtgcgtataccaaaaatatgcatttatcctattgacttctcacaataatcaggtaagagatgtcttgaaatacagatatgtacaagctgttatctagttctccagcagccctgctccagttaatttattgtatctccaccaagcatgagagttttttttcccttgtaacaaagtcatgacaatgatgactaacaaaaatgcgagtgagtttctctagtgatttagatatgctgatgccaaaatattttttgttgtggtgattgtaacagacagtaaagcatcaaaatctgacaaattaactatcatttctagctaaagtccctcaagaatggacatttatataggtgaaccatattagtgcattgttccctactagctacataaatgggattttaacttcacatcgattgttccactagtgcttgagggtgggatgcaaattttgcctatcatcattgaaacagtagcataggctgggattacgtatttttagaaaagacatgcgacttatgattatggcattgaaaagaagacctttggtttaaacagtatgggcaatcatgaggtaaatcaacttggatatcaaacttttcatcaattttattttgtacaattacctcactacagaagtagcagaatcatcatatatcatcacttgattatgcaaatcatctcgagggaaaccttgtcgaatcactctggttcatgtgttttgatcaatgctgggaagattggtggccaaaccatcatgaaggggtatatctcaaatagaaaatcatccttcattgccatctcatacaccttctccactgtcctgctgataatatccatgcaaaagacctcaccatccacctccaagaacacaaactcagcgttgtccccagacccaggcagactaatgcgtgaatcccctgactcccaactaggcttcacaagatgaccaaacacctcgcgcaaacaaatagtatttactagattccaatcggcagagctgtttccatctgttccgtgaagccaaacatggatcttaaacccctccacatggatcagataaagcccagatttctccgcttgcgacagcttaacgctcagctgaaagctttcagggcagtcatctcgcacggcatcggggacctcgatgaagaacaagctcatggacaccaattccaatccaagaatgtaccctgttgtgcccaacatatacagcttgccattgacaagaaaaccccggctcaatgatctcctccagtgcgccggtagctcaatgggcgccgaggtttgcgcgacgtcccagaccccagctcgcaagatcttctccaccttggcgaagacctcccgctcgctgctcaccagggtcaccacggtgcacgccacggcatcgccatcgccatcgccaccgtcctcggggaggaggatataccgcgtgtggcgctggttgggcgggagagggcgaggcggcgtgcggaaggtggagatgaccgccccgtcgctcgccggatggagcgggcggcggagctggagcgtggactcgccgccgcccctgtggcacacgaggaggcggccgttccggcagcagtagatccccgtgccgaggtggaagtggaggtcggcggcggtgcccaggtcgaagctgccgcggcggacgacggcggcgagctcgggcgggtgggggaggggcaccaagcgcgggcgcgggaggctggcgctgtcgacgtaaaaacccaagaaggcggggcgggtggaggacggccaagcggcggaggaaggcccggtcggaggcgtggcggagccagcgcctgcagacgagcgcggcgcggacgaggaaggtggggtgggcgagtcgaagaaggatctcgcggaggaggtccccgtcgtcgagcaccgaggaggaggaggaggaggcggcggaggaggccaccggcggcggcggcgacggctggggagggcgcgggcgcttgcgatccatgtggacgcggttttgggtggatcgtggggtaattaccaacaaatggagacttgggagacctcccgttcatttggggatgtaaatcgaaatcttgatttgtcctttcgatggaaaatccatcatcatttaccccatccagagtgctaaggttagtctattcggagcattgcggtaccaaataaaagtattttactttgttctaaaataaaaaaaaagaagtaaaataattatttttccttagagattgctattatatgatatctcatcccaggtcggtatggtaccatctgggtactgaagttatgtatgttatggtatagtgtcattaccagacctgatttgaaagagggagagatcgactctccaactcggtggctaccctcctatccgacgacagcgtctccctacctacctgtagccaccatcgtcaaatccagccaagcctagatcatcgaagtcgagtctaggctaagacagacaacgacgagatctggcatccttgagtttgggacgtaccaaattcggtggctagaaagtttgggttgtagatccatcacggattggcaacagagagggcgtgatgttaggggcttcggccaccttcgggatgtgcaggggcccaggtggagtggagctttgagacggcaacgcagttcactgatcggctaagaagccatggcacacacaggtctagtcaagtttaccttcccacaacacacacgcagcactaaggttcctgtggcaactgaactaggattcaaagccaggatgagtggatctaccactccaagccctttcctattcttatactaatatatgtaagttccttgcatttagaactagaacgtgaggcatagtaatggcgcatgtgtgatattttattgatcatatttaggctgctttaggaaagcagtcaagcgggaatggaaaaaatgtcttctactgctatcttatgtgctaaaatggaaaaaatcttctcttcttctctatgtcactcatcacagtcggagagacccatgagactttcttttctcccggtaggctctagcgctacaatgcttatggctgcaatccaaatagcaatggtcctcgcggatttatgtgcacccaatccattaaggattcctggtagtgagattcctctagtcaagtctaaggattaaatatgagggatttcatccagtccattgcggaatgtatggttacaaaatagactcatccccctgcttatagtatgtagcttggaaggccttggattcacacgtctggtgctgccctgtcttctccacatcaaagagtaaagtatgttgttgaggtggtaaaaagtcgactttgtttgtcactaaacctgcagcattctcgtatattgaagccgctgaagactagggcctaagtattgcttttatccgaggcgctacctgcgactctgcatgggagaagagggctgaattgcaaacttttgtgttctggcttctattattgaatcaggcttctattattcaatgtttagttaccatgggaaaagaannnnnnnnnnnnnnnnnnnnnnnnnnnnnnnnnnnnnnnnnnnnnnnnnnnnnnnnnnnnnnnnnnnnnnnnnnnnnnnnnnnnnnnnnnnnnnnnnnnnnnnnnnnnnnnnnnnnnnnnnnnnnnnnnnnnnnnnnnnnnnnnnnnnnnnnnnnnnnaaacgcccttgcggctgctgacgcagctattgtatatccattctttcttccatccatccctttccttcattcgggtcggtcacttttccgggctgggatcgagaagtggaagtcataaaaaacatttatttatgctatttgtaccggtcaccgttttatggatgagtgctattggcgtagtcggcctgactctgaacctacatgcctatgacttcgtttcccaggaaatcagtttatcaattctcgagtcgtcaatgattggtgaaccagcacattcgtttgcaactcctatgggagtctgggttgattctcggatatgaagatatcaaatagaatacatcaaactcgcatgttccgtgactcatgtgtggtatttgaaaggtctttctagttatatcacgcatattttagataaaccccatnnnnnnnnnnnnnnnnnnnnnnnnnnnnnnnnnnnnnnnnnnnnnnnnnnnnnnnnnnnnnnnnnnnnnnnnnnnnnnnnnnnnnttatgagtttggaaccctgaacagaccgccggtgttaagccggaggaaggagaggatgagagcttttcctagaattgttggcactacctggtagatgctttcaacacttcgagttggtctgccataatatacaggaaatgttgggagctctgtgtgataaatagaacattgttgaattggaaatgctatttgtgccggtgaatcgacgaaactatgtcctatgcagttttttgcgcaatgtcatgtcgtaaaaaaatgttggacataatattttaaatcttttctataagatatatttctctcaaaatggtgacatgataacatttttggtatctatagttttcggctcatacatttttgtattttttggtaacatttttgtatttttggtatctagagtcctagcctcacaaatccaccaaaaggcaaaatcgcattctcacatatctgtcatacatgtgttctacttagtgttcttagattaaacacgttgaatatgtagaaaccctaataatctgtcgtatgttgcattgactcttaaggggtatatataaagtacataggaaatagagatttgaagtacaagacaaagttagagtagattatctctaggattttatctctctagtttgtattcgattcttatctttaatcatatatgtacttctaacaaccttattgtcttacattaattatatgtgaactaaaccattgttttagtttgaaaaccatgggcatagtgaattctccaaccaacacacaacgccaaaggaaagttattaaaggatagcttgtcgatttatataactgaagtgtggatttgtgctcataaaaagcttgttagaaaaagccatctatttgtttgggcttagactttgtcataaaagctaatagctaatagtatatttgcggctatgaaatttccaaagcatgattaaaaagccaatagcttatttatttagcctctacatttttaccaaaaaaataaaaaatctaaggacacccctaaacaaataaggctaagttcgaatgtgagttttggggcgagctttttctggcatgggaaacgaggcaagcaattagtgtacgattaattaagtattaattattaaaaatttgaaaaaatatatttatttaaaatttgaaaacttatagattaaaagtactttttttagaaaaaaaatacatagtttagccatttaggaagtgtgctaatagaaaacgaggatgttactgaaagtgcatctaggcccctaatttgtttttatgattaatgacaatacaattagagaggactaacaagttttactaagtgaatgcgaaggattgttagtccgtgatgatttgtagcgcaatgcatatctcaacgaatgtgacaaaactatgagttgtggcaatgatcaaaggttatattgtatattttcatttctttgggtcattaggaaaaccgcactattaagattgatgatgcattgacatatgaggtgtgatgaatgtgctcaaaatcattttttataagtgtatctcagtttctgtattctggaaattttcggagttgtccgaaagtgatgacattccacttccctccatcacatattaacacatatccacctgatacctcatactctgccctggtgtcaagtggtaactggtaaccatgcatgtatcaccacagaaatatgtattctaatacacaacaaagattttgaaattaagaattgacaatttaaagttgttaggacgacaatgtggaaaagcaccctttcacagttttggttaatgaatgatgagtcgcatcatacagctcacattatttcccttaagattttaatcatgacatttgtgtggtgcaaataatatccatattgcgacaccaaacacttggttagtgacagaggtgagcatacttctattttgaacacaaggttatgccaatgcacacctcaatctggtttacatgaaaagaaaagtagcatggttaatataattagaacccatggttgttagcactaagtaatattacaaggactggcatgaacaaaagctttagtcgaaccaaaatttatagcagaaaacaaggagtggttggattggcaccaaggtaaagctaaatgtaaaatgtttacaaacattgattttgatatggtttgggatgcttggcaaaattacagacaaaattaagttttttggaaccaaataaatggccaaatgacacaaaaaaaagttgtttcgaacctaataaatggccaaattaaacgttggagattttttgctatatgatcttttttttaaatagggaagtatctgtgcgatcttttcccatcatatttacatgatatactcatatttatacaacatgtataatatttatctatttggttgtcaacaatatttggataattaataatttaatcatatatatatacataacatgtataaaagaattatataagtagtattaagatgtattttacattgttacatccttctcatttgtccattttagaaacacaatataaacgcagacgctcgtaacatgcgcacactcacccttataaacatacaccctacccctttaataagtacccctccgtactcgtaaaggaagtcattttggacagcgacatggtctccaaaacacaactttggctccttgtttctataaaaatatttattgaaaagtgatatatgtatactttcatgaaagtatttttcaagaaaaatctatttatataatttttacattttcaaactcaacaacttttaaaaatacggaaggagtcgtataagaaatctctttttaaaaaaaacttgtgaactaacttaaggcaatcggactcctaaattcttaattgaagctcataattttctaaaaaaataaatatccaaatgaatttccagaataaattttaccttaaataaaccgtataacaataacaagattaaagtagctttcacctgttgcattgcacaagcattttttgctagctgtaaaaaaaacaaacgtggcattatcaacctttacatgtcttaggctttgttcgttctagggagatagaggagattgtgtctcgttttccgcgcgcacgcttttcaaactactaaacgtgcattttttgcaaaaaaaatttatatgaaagttgctttaaaaaatcatattaatctatttttgaaatttaaaatagttaatactcaattaatcatgagctaatggctcacctcgttttgcgtatctttccaatctcctcaatcctcttcttctcagacacatgattttacttcattcaacacaggccattttaaggcccatttcgagtttgctaaccaatagttccttcctggtccaatagagtaaggatagaagtagggttccctagaagtttttcttttctttttttatttcattttctatattcttttctctcttcttctaggagtatctctctctctctctctctagcgaactacccaagccaagccactgccctcctccctttgccttgcgcccttctctttcctccttcctcctgcgtttgcgtgacgaggaacgaaagcatcatctccgccccccgccgccgcctcccgccgccggcgaccgcacccaacgcccccttcgtcctcccgtgcgcccgcccctctccgcatcgaatcgatcgcgccctccaaagtcggtgcagagttcgttgggc

SEQ ID NO: 5158 - DNA, 28933 bp, Oryza sativa
ttcttccacctcctctctcttataggaaggagaggagaggagaggaggaattaataatgtggaggccacacctgctgctgctgctgctctgaacctgcaccacgcgcgtcgtgggaggcgccgcctccatcctggccgtccacctccctgaatcgacggcggttaggttaggggtgatgggtgggccccacggtggagggagaatgagaatgacgagaatggcatgcagatgtggtggccttccgactgtcctacgccttctgtgccttcccgttcaggaaaggagaggagagcttttgactgcactctcctttcttttttactgctctgctctgtgcaggcctgccaaatctgccatggatggatggatggatggatgctttttgtttggttttgcacggatccggcgttgccgtgttgcacaggatgctttgcttcctcctcctgcatcctgaatgagcatgaacgtgcagatcaagtcgagagattcgagccaaacatggcagtgagaattgaaatggttcacgttttcgtttttcagatatgcgaacatgaatatgaatactagtatccggttgtgtatctcagagttctctactaataaaaaaaaatagaaccccttcattccagttctttctcaaccactgtatttctctcatgtaaaaaagccacatgtcttagttaagaaaaaacctcctacctaaaagaaccggtgtttccacgtaaaaattgacacattgcatattgaaaagaaaaaaaaaatcaaatcctgtcaagccatattgaaaagaaaaatcgcttaatttgtaacatatggacgcacacatagatcgaatatgaaccaattattcgtttacgaataattttgaaaagcatgaaaacctctctagttgtggtcccaaaacaatggatagatgtaactaactcttttatcataaaaagaaatattctcattagttttagcaaccatattactaggacataggcacatgcaaagagccacaaatataggcactttaacaccagcttgcggacatataacatgttaagtaacagatgaacagttcaagcagcaaacgacatgcactctttcttggcaaggactatgtgattaatttggtccaagatttcagaaattttatataggcatatgatgtaaaagcagatactataaaaaaaatctacgatggaaaaaagaaaaaaatcaacttaaatcttaagttttaaaatacaaaatttgatgcatgtatatataaacgtaagtgaaacgagggaaagtgcctgtaacctagtggttacaagagcctcagtagcacctgaggtcctgggttcgactccccataggagcgaattttccaggatttaacggcgttatgctttcagtggtaggcgacgtacccgtcgacagcgaggtgcctgtggtgacttgccggcccagtcttcgaagatgctcataggggtagggtttgcgcgttatgctttcagtggtagatgacgtacctgtcaacagttaggtgcctgtgcgtgacatgccggcccagtcttagaagatgctcataggggtagggttgcgtgttgtgagtgactgcgttgtactgcgtaattttaaaaaaaaacgtaagtgaaacgagatggcgctgatatatttgaaggcctagaaacgcccatggcctaatgaagtgacttctaatcaggggattgtgtttttattctttctgcttcatttctctctctctagcttccgggaaattgctcgttttcttctttctctattttcgcttgctgcaggagaggtgctcatttttttcttttattttcgcttcttgtaaaaggaaaacgtgggccgaccaacgcaacaccaaggcaaaaggagctgtgcactctgagtgtgtatcaggcaggctgagtccatgggcagcaaggatggctgccatcttgtctgtttaacacaaaaacggaaggtaagtacacatcagtgacggaccggctgacacgcaaaccaggcgcacctcattttcggaaaaaaaaaagcatcgttatcggcagaaggcatctcccatcgtctctttccctggcaccgactactcatgtgtgtgctaaggtgaagtggataaatattactccctccgtctaaaaaaaggcaaactatggatttccgtgtccaattttaactgtccgttttatatgaattttttttataattcatattttcattgttgctagataataaaacatgattaatattttatgcgtgacttgtctttttaatttttttcataattttttcaaataagacggatggtcaaacgttgggcacggaaaccagggtttgtctttttttaaaacggagggagtaggcatctagtttgattcggtaaaatttgctgcatgatataaaatatcatggtctttgctacgtgacattatctaaagaaagtatgttagttcgtggataccatagaaatatggtaattagtcgtatactcaacgtattattttattatatttgatggaaacaaaaagagaaaattcataagaaacaagtttgcccttgtggactcctccttgcccccgccaccaccagtagcggcaccgccccctctcctcccgctaacaaccactcccactaccttttcctcatcaccccagcggccaccgctatagtcctcctgctcgttatactcctgctgcttgtcgcgctgcacttcctgagctaccactgcacgctcatgttctcaccgccgccggaccctgcctgcttcgccaatacttccgtcgcgccactggtggattccacctgtgtagctttgcccgcagtgccgcctcgccggtctacctcaccgcctttccccaacatgtcgctcgtcgttgagagattcctcgattggcccagacggttcgccagcacccgcgtggaggcggccgctctgatcgacaccaagaacctcaccgcgcatctcatgtagatctcggcaataaccatcatgtcctgcgagggaagtaaggcagaggtccatgatagctccaccgccgatgcctattgtcggaagaagaccaggagaagggagaagaagatgagaagggagaagaagatgagggcaaaacaaacattttacatagtttttctctcatcaattgggtggatattgtatttttatgcgctcggtgtcctatggcaaattaccacgctttcgaagtgtcattaggaaaaaatcacattcttacgacgtctaccagcaaagataataagtttttaagtgtcatgtagcaaattttgcattttgattcaacaatatgtagtttacatgtttccactatatatatggtttgcaatatatattttgccagattatgaacttatgtgagacgtgtgtggtaccagtagtgtaattattgatgttctacttgttttcaaggatgagatatgtacctctagaatatatatttatggagttatgcgctttttgaggaccggagtctagttaattatatacatagtcaatgtttcatttagaatcttgaggctttctagttttacctttaggacatcgcaagagtaacattataggggaaaacactattaatgtggtaattagctaatgaacattgtgcctattattttactgtatttgtgctaacaacgtgtgagagggcctattttttgacatagggtgaccaagttggccctaagtgtatcacacattttgacaatttgaccctttaaaaaaactatttttacaaatgaaccgccgccaaacttattttaaaaataacatttttttcagcgccacatcatctggcgctgaacttgacaccttagcgccacgtctactggcgctgaatgccgtgccatcgcggatgggaggctaagtcagcgtgccaacgcacattcagcgccacactatttggcgctgagatgtctaagttcagcgccacatgatttggcgctgaaaaaagggttatttttgaaataagttttggcggaggttcatttgtaaaaatagttttttcaaagggtcaaattgtaaaaattgtgtaagcgtatccggctcaaattgagatggtctggctcaaacatgtctgtcgaggagtgatcctctctagcgggagatcgtgagatccccctttttgagttcagccggggaaaagggttcgcctctcgagatcgtgtatccaccctcagggtttccagatcgcgtatgggcgccaagattatacaggttcgggccgctatagagcgtaatatcctactcctgtgtgtgggatttatgattgagtgttacaagggttccccaactctggagagtgctattggtctgctccctctaaagctcaggcctgctgggagtcgtccccctttttcagcgggcaaggtcctccttttatagttcaaggggataccacatgcgccgctcctacctactcttttatgggagagggacccactttaccttgaccggaccacgatccgtgccttcgcccggaagctaagcggcagttcgtcctttagtgggatccggcgccgccccccgcctgccacgggggacagccctataatttcctcttaaatgagtgaagacttgtggcggtcctcgcgtggagggaaccccagatgacgccccgatgggacgggacatacctacctccactccgccgaatacagaggcgacgtgggggcacggccgcccgtccaatcggacgtggccggcaacaggccggtcacagactggtcacacccgattgacgtgggtcagtctagtggcaccgcacgttcgcccttaccgcattaaacgcggtgagggacagttggggcgccgcgcattgatggtcgttcagcctgggtctcctccccgcttgctccccccgccacatggcagttgggcgagggcctcggggcaaggcagcgcgagggcccgaggggcatgacgtggcaccccgaggccccccggccgcctctgcgactcgcgaggtgtaggggtagggctaggctgtagagccacgcggctggatgtgaaggtaacttcccctcactttgcatacccccgggcccatatctccgatagtagcccccggcaccgcgtcggacattggccccctgagggcagtctgacgtggcgcctcacgacttcccgtgccgaggttgtgggcccggcggggaacccagatggttgccgctgagcggccaggctggcgcattagccataatggcgatttgaccgccattaaccgcgctgatgatgggggcgcctagggcgcgaaaatcagggggtcgacctggccatgcccagaatcgtcacccatgccgcctcgactcccctacctgccaggcatgcgatgggaccgacggcgggcccgcctaatcgcgcccgtgaacatcgcacgccccgcgccgagtgtgccgctgacaggcgcactaaacgcggggcgtgggttcaatgggcgatgtgatgagtggacgcgagaaacgatgaggcaaccgcaggtgtaggaatcgaggaggcaaccgcgagggcgtgaaacgaggaggcgagcgcggtcgaggcggggataaaaggatagggaggcggagatttcgtccccttcctctcgccgactgctcgcccgcacactcgctcctcaagccctaacgcttctctcgctccacgctattccgtacaccaaactcctcgccgtttccccgccggtcatcatggcccaagacgctagtgacgttgtgctcccggtgtcgcgcatcacggcagagaggcaccttagcctcatccgcaagatcatgccggaggacgccgccatgatggtgggggagtcacggccgcggccgcggtacccagagcgatccgtgcacctcctgtccttcgccatggtggggttgatcctgccattctccaggttcttccataaggttttggatttctacgaaattcatgccttgcatctcacacccaacgccgtgatgacactggccatcttcgcgcacttgtgcgagatgttcgtcggggtgcggccgacgatgcggctgttccagtccttcttcgtcccacagctgctgcaaggcgcggtggtgggaggatgctacttccagccctggccaggaacagcggggcagtacattgagagccacctccacaacaagtgggaggattggaagaaggattggttctacaccgcgctgccggatcatccgcgacttcggctcctcgccggccctcccgaacgatccgccgcgtggttagcggtttcggaactaggcgaggagtacgacgctgtgcggtatcgcctcaggggcctgcgaagccagggcctaatgggggcgatggtgttcggcgactacttccgccgtcgcatcgcgcctctccaggagcggtcccacggcgcgtgggagtacattgggcacaacgatcccattcgcacccacgtgggtgagcgttgggactggggcaaggaggaagcgaagacggtgatccggcgggtggtgagcaaacgctgattccggacgggatcctcgccctctgcagcgaccgcgaccgggagagtatcctggttgtgatgtcggccatcggtgctggcaggggtcggtcccgccggggcggcgccggtggtggcggcgatggcgcgggtagctgcggcgcgaccgcaggtctctggcgggggcggcggctccagggcgcccagtccgagccgtggacccgggggggggggcctggccagcaacccgaacgggaagcgaaaggtgtccgaatctcggccgccttctcccctgcgcagagggggcgccgagcgaacggcggaccgaccaccaacgggccacaaacgccccgccacgtccgaggctggatggaagaagaagcggcttcgaaagatagggcaaacggagccgtgccgggggagtttcatcgggcccttgaagtagaccttcaaatgcccccctcgcaggtacgatcgctagcacccgactaggtgctctctatccaccttggcctcttgcttttcccccttcttttctttcttaacgtgatcagggttctccggtagcgggattccttcccagagggtcgcggcgtctgatccctcgcaggggtcaaaattcgagcgaccggatgaccgggacccggccgactcggtgctatggggccttcgcagtaccctggcggggcccacgggccacacgctgggtctggctccgagtccgccacagccgaggtgcagccagccacaggtgatggcagcggcggtggcgcccccccggggggcgatcccgagggcgcgacccacgaggagcgccactcgggagtggaggccaaagcaggtcgtggcccagaggccgaggctgggggcgggcccgaacccgaggccgaggccgagtcagcccgagggctcgaggcgggggggacgggggcaaccgttcccctctgcatctggggcaccctcggggctggccacgtagaagggggccgagagcagcccccagtcccgcgggggtttcaatagcactccgtcatcccgggggcggaccgcgactttttcttctccgactcctgcgagcatggagccactcctgcaggtgctcgctgccgccgactccaccgtccgggaggggctcaatgcccaagttcaagccctggcggacgagcgggcggccctggaggcggagtgggcgcagctcgcggcggaccgcgcgtgggttgacgaggggcgccgcgctgtggacgacatggtggaggtggggcacaaaatgcatcaagcccaactggcggagatccaggcgcgcgaagagacgctggactcagtcatgcgggagatggaggaggagcggcaggcggcgctcatcgcttcgagcgtcctggatgaggtgctgggcgacatccgcctgcagtacgaggcccacgccgaggatctggtgaagagggttgaagacgcccgtggagtcctcgacgcggctgccgcccaagagaggcgggcatcggaggtcgatgccttgttgcgggctcggtcggcggtgctcgaggccgagcgtaaggccttggacgagcgtgcccgctccgcgcaggagttcgaggccacgatccatcgacggatcgaggtcctcgaccgcaaccagcgcgaacaggacgggcgcagctaggaacaggcgcagcgagcccgggggtggaggagcatgctcgggtgctggaggagcgtacccgggcactggaggagtgggcgcccatgctagaccagcgcgagaccactttggccgcccacgagagaacggcggccgaggcggagtcctccctccacctccgtgaggaggccgctgccgagcgcaaccggaccaccctcgccgcagaggcttttggtggctcgttgcgcggaggagctgcggcttcgagaggaggcgtgccgggaacggaacgccgtgcttgccgtacgcgaggctgaggtgaaccgccgcgaggtggcggcacgccggctgggcgagcaactcgcgaagcgcgaggaggccgttgcgggcgcgaagctcggcatctggaaagcgcccgcgctgagcgcgcggcgatggcggcgagggcttccgagctggaggccgcgagaaagagctggtggcaggcgggcagcccagcggcgcggagttggtaagccaactcaccgcggctcaaagcactctcgccgacctggggcgcctggtgcaggaccaagccggggagatcgtggccctccgcctcaccaacgagattagacctggccaactctccgacgccgtcgaacagctggagcgcgcgggatgccgggtaggcatctccgtgcgccaggacaggaagctcccgcctacacagccggcacttgcgttccggctggacgggatggcggcagatttggagaggctggaggaggaggtcggcgaggccgtgaagtcatcgtcggcttctttggcgcgggctacggtggagctggtcctcacgagtcaccaagctcgcgaccccgacttcctcccgtggcacgcgctcgaggactgccccccggggaccaaggcgagggctcaggagcgagtccgggaggcggccgacgcaatcgtctccaacttcgaggggtcggccccttggttcaacctcgtacttgccttgaacgaggagagcgggagaaaggtcgatggtggtgatgacggcggcgaggactgggacgaggtggtcagcggcgccggactcgggggcccgagcactccgtgactatctccgcttttcttcttttattttgttatgtgctcgcggtgaacgcttcaaactttaggccatcgtgccatcctgtttgtaaataaagcttccccttcgctcctttatgttcttgctttctcctttgaatgtctgcggcaaggaaagaagaaaaaccaaagctaacgtattcaattgactttctagtgattaagttgccgctcttacccactttataccccccctcgggctcgttccggtgaaaagggaaattcgcgctcgatccgcgggacctaagtggcgaggggcaaggccgtcgccccgagggagctacccagcgggtctggccagaccgaggctacgacgaccgggggtcggggatggccgtgtgtaggcccttctgagcccccagggttcgccgcggcccgtgtttaggctccctttcggcggttttcaggtcacccaacgccacgtaggttctggagtaagcgcaaatcgtcctttgaaccaggacgagccataggaaagagtaagaaaaggcgtgcaacggcctccgcttaagcggaaaaatttattgatggggaggggaaaagatacaacatatttaacagtggtagcccccggccaagccagcacaagccaaaggatgcgcgggggttggcccgagctctaggaaagcaaaagacgcgcaactctatggatagaaacggcggaggtgttcgatattccaggggttaggcaactccgtgccgtcctccgtggttagccgaacggagcccggccggggaacgccgatcactttgtatggccattcccacatcggtgagagcttgctcagccccaagcgcgactgtaagcggtgcaggacgaggtcgtcgacttgcagtgatcgggcttggacatggcgctgatggtagcgccgcaggctttgctggtagggcgccgctcgcagggctgcacgccttctccgctcttccaaatagtcgagatcgtcgcggcgaagatcatcctggttggcctcatcgtacagcgcgacacgatgcgaacccaaggaaagctcggaaggtaggaccgcctcggcaccatacactaggaaaaagggcatttatcccgtggcgcgactcggagttgtccgattcgcccatagtaccgcgggcagttcctcgagccacgaatccccgtgcttctttaggacgttgtatgtcttggtcttgaggcctttgaggattttggcgttggctcgcttgacttggccgttgctcttggggtgggtgggcgaggcgaagcacagcttgatgcccatgtcgtcgcaatagtcgccaaacagctctctagtgaactgggtgccgttatccgtaatgatacggttgggcactccgaatcgggatgtgatgcccctgagaacttgagggcggaatgcttgtcgatcttgacaactgggtaagcctcgggaaacttggtgaacttgtcgatggcgacgtacaggtgctgatacccgcctcgggccgctttgaagggtcctaggatgtctagcccctagaccgtgaaaggccaagagagcgggatgacctgcaaggcctgggccggctagtgggtttgcttggcgtggaactggcacgccttgcatcgcttgacccattcttgggcatcttgcaaggcgatcggccagtaaaaaccttgtcggaaggctttaccaaccaatgtgcgtgaggccgaatgggccccgcactcaccctgatgaacgtcggcaatgagctcgacgcattgctcccgagaaatatacttcaagagtatcccgttggcgccgcgtcggtagagtcccttctacgagcacataccgcttagagatacgcgcgagcttttcagcttctgcgcgatcctcaggaagagtattatcgtcgagatatgcctggatgtcagtcatccaaacaacctgactaggagggtcgggaccgacccccttgggccccgaggcccatgggtcgtcggggattggggcagagaccgtggcgccgggtccctcgggggggggggggggtccaaccgcaacgacggttgtgcgagcctttcctcgaaggtccccggggagagtggggctcgtgctgatgcgatgtgtgacaactcgtcagcgactgcgttgtcgcgtcgggttacgtgccggagcttgagcccgtcgaagtggcattccatacgtcgcacttcgcggacgtaagcgtccatttgcgggtcggtgcactggtactccttggagacttgatttatgaccagctgggaatcgcctaggaccaggaggcggcggatgcccattccggccgccgccctcaatcccgctaggagtcctttgtattccgccatattgttcgtggctcggaaatcgagccgaacgacgtactggaggacgtccccgcttggcgaggtaagcgtgactccggcccctgcaccttgaaggttgagggagccgtcgaagtgcataacccagtgcccggcgcgaatgttggcgtttgggtctcctccatctccgaggagggggggggcattggatgcaacagggtcgtccaccggggtccactccgtgatgaaatcagccagaacctggctttttatcgcgtgccgtggttcgaagtgaaggtcgaactcagcgagctcgatggcccacttttcgacccgaccagtaccttctcggttgtgcaagatttggctgagagggtaagacatcacgacggaaacccgatgcgcttggaagtagtggcgcagtttccttgaggccattaagactgcgtaaagcatcttctgggcctgtggatatcgtgttttcgcgtttcggagtgcctcgctgacgaagtagacgggccgctgcacctttcggtggggccggtccttgttgttaggagcagccggtccggggtgcccgtgcttaggggcctcgggggtatctcgggccatgtcaggattataggcgtcggggccacccgccagagcctcccttcctcccccgggggcctcggggccctcccggggtttggggggcttcgggcaacgagccgtcgggagacgagggtccatcgccagtcatgggggcccctggtcccttgccatagccgggctcgtgacgcgggtcaccttcgccacgctccactacaagggtggcactcaccgcgtggggggtcgcagccaagtagagtagcaacggttcctctggccctagggccaccaggataggtggggggaagtgaggtaagctttcaactgattgagagcttgctcctcctcctccgtccacacaaatggcctagggcgtttgaggagcttgaataggggcaacgccctctctcccagcgttgatatgaatcgacttagggcgaccatgcatctcgtgacgcactgcacatccctaagtttgctggggggacgcatcctctctatcgtgcgtatttactcgggattagcttctatgcctcaggaggagactagaaaaccgaggagtttgcccgtcggcacaccgaacacacacttttcggggttcagtttcatgcgcgttgacctaaggctgtcgaaagtctcagccaagtcctataataacatctcctggtggcgcgtctttaccaccaggtcatcgacatacgcctctacattgcgccctatttgattactcaaagtaatgcgagtcatgcgctgaaaagtaggacatgcgttcttgagatgaaaaggcatagttgtataacaaaatgtgcctacaggagtaatgaaagcattttttttcctcatcttccctagccatacggatctggtgatacctagagtaggcatccataaaagacaaaaggtcgcaccctgaagtggagtcgactatttgatctatgcgtggtaaagggaagggatccttagggcatgccttgttaaggtccgtgtagtcgatgcacatccggagcttgccgttggccttcgggacaaccaccaggtttgccagccactctaggtggatgacctctcggatgaagccggcctccatgagccgcgtcagctcctctcggatgaaggcttgccgctccggggtttggcgccgtaccttctgccggatgggtcgcgcgtccagccgcacggcgaggtggtgctcgatcacctccctggggaccccgggcatatccgacggcttccacgcgaagacgtcggagtttgcccgcaggaaggagacgagcgcgctttcctatttggcgtccaaggtaccgccaattttggctgtcttggacggatcatcgccaaggggaatctccttgactggcacctcgtcggccgaggtgaggcgcttcttggaggcgcaggacgcggaggcctccgggacctgcggctccatggctgccgccaggttgtcggcgcgctactccgcgcaggcgagagcgaccctgacatcgccgaagacggtgatggggccgctggggcccggcatcttcatctggagttaggcgtagtgggtggcggccatgaacttcaccaaagcaggtctgcccaagaccgcgttgtagggcagattgaggtccgccacatcgaagtcgatccgcttggtgcggaagttagtggagtcgccgaaggttaccgggagctcaacgtgacccagaggccacgtgtgccccgaggttatgccgatgatcggcagtgacggctggagcttcatcccttgggccttgagcgtgtcaaaggcagccggggagatgatgctgaggctagccctcctgtcgaccaggacacgcttcatcttgatgttgtggatggtcggggagaccacgagggccaacttccctccccgagcgagcactgtcggatggtcgctctggtcgaaggtgagcttcacctccaaccagcgcgcctttcgtgttgcctcgtgagtcgggactgcagccagaagctcacgtctcatggccttgaagccacggcgggaggtgtgagcgcaagcacccccgtcgagggtggcgacggtcccctgaggtatctggaattccagatccttgctgtcatcatcgtcatcggcgggggccttcttcttggcctcccctcgccggtcattggcagggctcgcgggggctttgccctcccgttgaccctgccgcttctcctcatcggctttccgaaaccctcggccaagttcttgaccaagcggcagtcggcaaggctgtgccgataagtgttgtgcaccgagcaccacttgtctgccgaccgaccctcgccggatgtagcggtggagctcggcctgtcgccggtggctttttccttgcgcggggcccgtgagggcccatcggccgcaaggacgtggccctcgtcatcagagcggaccggcttccttttccccctcctatctcgccgcttagagtggggagcggactcgggggcagccgcagccgccgcgccggtgccgggggagttccaggcccacacctcctccttccgagccaccttgtctgctagttcgaagagctcggtgatggtcttgggctccttggaggcaattttctccagcatgcggttgtgccgcacgccgttccgaaacgcataaacgaccgcgtgggccggaatgcacgtaatagtgttgcggacctggcagaagcgctgtatatacgagcagagggactcatcgtccttccgctgcacagcatgcaggtccgcctcctctcctgggtgggggtacgtgacctggaagtttgtaatgaactgctggcacaggtcctcccaggagtggatggagtcagggggctgggtcatcagctagccgcgcgcttgacccttaagagccatggggaaataattcgccatgacccggtcgtccccccccccccgatgctgccacgatgattgtggtatagatatggaggaactcggagggattgatgctgccattatacttctccgtgaggttggggcgaaacttcgggggccaccggacattcccaagactcgcaacgaaggccctacaactagtccctccaggggtgaacgtggggggcggaccgcctcgcgaggaggaatgcggcactccgaacaaggaggcgccttctcccatgcgggcagcacggcgctcgtcccggcgtcgcttaagcatcctgctccccgtagaggccatcgtgatgcctccgacttcctgaggcccctgacgacgttggggccgtggaccgcctcgaggccgtggccgaccgacgggccctcctccttgctgacgaggagagggtggtgggggtacgcgacgtactagtggtggtgggccggccacctgcggccagctgccgctaggcagtggtgaccaggttggccacgtcgtccaaccatcgctggacgggggtctctggctccgagttcacgggaggatgccgtagaagggctcctgccgcctgaagcgcgcctcggggcgagccaccgtcaccgtatgtcaggcgacgtcgcgctccgatgcgccatggcttccccccgcccggaggcggggagagggccgagccacccgaccgggtgggatcctccctccgcgaggggtcgcggcggggcggagtccgagagttgcggcggtggtgacgggggccgcggctcccgctagcatcctcactcccggagggagtgggggtgtgcaccaccacttcctcctccaagacctcgaccatgatcgtcgaaggcggaggaaaacttggggcagaagaaaataacttctctttgaagcacgcgaattccccctacctggcgcgccagctgtcgaggaatgatcctctctagcgggagatcgtgagatcctcctttttgagttcagccgggggaaagggttcacctctcgagatcgtgtatccgccctcagggtttctagatcgcgtatgggtgccaagattatacaggttcgggccgctatagagcgtaataccctactcttgtgtgtgggatttatgattgagtgttacaagggttccccaactctggagagtgctcttggtctgctccctctaaagctcaggcctgctgggagttgtccccctttttcggcgggcaaggtcctccttttatagttcaaggggataccacatgcgccgctcctacctactcttttacgggagagggacccactttaccttgaccggaccacgatccgtgccttcgcccggaagctaagcggcagtccgtcctttagtgggacccggcgccgccccccgcctgccacgggggacagccctatcattccctcttaaatgagtgaagacttgtggcagtcctcctcgcgtggagggaaccccggatgacgccccaatgggacgggacatacctacctccactccgccggatacagaggcgacgtgggggcacggccacccgtccaatcggacgtggccgacaacaggccggtcacagactggtcacacccgattgacgtgggtcagtcaggcggcaccgcacgtccgcccttaccgcattaaacgcggtgagggacagttggggcgccgcgcattgatggccgttcagcctgggtctcctccccgcttgctccccccaccacatggtagttgggcgagggcctcggggaggggcagcgcgagggcctgaggggcatgacgtggcaccccgaggccccccggccgcctctgtgactcgcgaggtgcgggggtagggccaggctgtagagccacgcggctggatgtgaaggtaacttcccctcactttgcataccctcgggcccatatctccgacaatgtcctaagccaaaccaatctcgacaactgacgctggccaggcaaatctagccttctaccccattgcaagtacatcaagaaaagaactcaactcaacgaaatcaacaaaccatgcatcccaatcgaatcaaaacaaagaaaaatcgagcctaccctttggacacccattttagattcaccagcttcgtaacagattccacgccctgctctgacaacagtgtagccattgctgcaagccaattccactcctagcacgagatcacccttgcatccctattcctagtgggtcagggatgatgaacgggtcatggtggcaatgtcaaaatagagcatatatatggttggggtggcgacatagggctctaaagggttgacggatccagttagtctaaatatacaataggggtaacttgatcgcgccgtgtcaaaaagtgggccctctcatgtgtcatcagcccgaacacactgaaataatgggagtggtgtccactaggtaattatcacatttagagagtgtaactttactttttacggtgtactatagttaaaaccatgaacttatgtagtaatttgtcttgtttttttttaaaaaatggttgacaggattatgcacatgctatttacagaatttcgaaaattagaagaaacaatagaatgcccacaatttgctggtaagcgttgttaatttggttggacccatatgatgctgtcccgtatagactcctattgactttgtacaagtgtacaactaaccttttattatgtacaaataaccatacgcgtctagatcagtgtcagcttgctagcctaaggtcagttatacattttggtgatacggatcgaaatttgctttgctataaaagtagggataattgcttatttgaccctatctcgaaacgtaactatcaatttgaccctatttttctaggtttgtttatttgatcctttttcaaaaatgaagatcagagttgaccttattccgtgaagtccaactaacggtgttaacttacgggccagatgtcctttttcccttgctcatttgactatgtttatatcaaagttttttaatttgaatctttttaaaacatttataacaaatttgacatagctttgatagatttgagagctccaacagcaaattcatatcctacaaaccactaatattcatgtccctacaacagctccaacaaaccacgaattcatatcatagaaatcatggagtgaggagggagggagaggggcggcacacatgagcagcaaccaccgccgtgccactgccactgctcccaccacgaccaacatcgctcctccttcctctgcacgacaacagcgcccctctgccgtctgcgcagccaccaccgctccttcctctctctctctccgccggcgccatcccaccctccctcctcactccgtgtgcttgcgtcatcgctgttgtccatgaagcaaccaccgccgcgcgccgctacttcctctctctccgcgtcggcgccgcccctccctccctcatcactctgcgcgcttgcgccgccgccactgtccacgcagtagccaccgctactcctcctcgcatcaccgtgcgtcggtgccacccctctgttgatgcaaaaaaaaacccaagtccagtctatgattaaccaaatttagtcgttaacaccctccctcccgcctcaatccgtgcgcctgcaccgccatcgccggccgtgcagtagccaccgccgctccttcctctctctctccgtgtcggcgccacctctccctcctcctcgctctgcatgcctgcaccgccgctgccgtccgcgcaacaacctctgacgctgcccctcctcgcatagtcgccgccgcttctccttcctctgcgctaatgagttgtgttaggatattgttacgtataatcaagggtattttggttagttcgcgatagcaaatttattttctttatttccctaaccgaaaccctagcgcaccagtgaaaacaggtttagacggtggcttcaattttgaaaaactgggtcaaataagcaaaccttaaaaaaaaggtcaaattggtagttgtgcttcaaaacatggtcaaacaaagcaattgccccataaaagtaacatgctttaccattacaacgtctatttccctatgcatttgggtatcctggtctatatatccaaatgaacccatcgttaaatgaaagaggcataataacataagaaaaaattaaaataatttacagccaataatgcgcttgcttgacatctcactgaaaccatacagtccatacttcatccttgtgcatctgtcaattaacatcatcatcagagctaccgtacgagcttacaaaatcttgggccgggccaatatcaaattaactcttctcccattcgggaaagcaaaaatgtccaactcaactccttcaaaatatttgcatatctaaccgtaaaaccgggtatatcgacccatcctactattaaaccatgtaaaatgactcactggctgtttggagagtggttttcgctatgtggcgtccacgtggtagctcagtcatcacatgaattaaaaataaatgtgggtcgaacatttaaatgatatggaaaagaaacaagtactcatttgaccctattcaccaggctctaccaatctgatctcaccttttcaactatacttatttgatcccatttttaaaaattgaagattaaggctaaccttattttgtgaaggaagataaccgtgctagctaagcggcaaattgttatttttgcccttgctcatttggtcttcttatataaaagccctttttttttataaattacacccatagtacaacaacttggcgggtgggtgcgatatagtgtaagaactcgagaattaaacgttcgagtgcaataatttgacaaatgggtgtgttttagtacaagaacttaataatttaatattttgatacataaacttagctaagcatataagcatatgctaggtgagtttttctcatgatatcaatatgccattaaatagcaatcctatggatattaccttataatattgaattcaatctttaagaattatactgcatatctaattacctttaagaattttgttttcttcaccttcccaaatctcaaccaaaatatattaatttctacctccagtttaattgacttttagttattagttattaggataatataaatatgcttatatacaaatccacgctagtatgttgtcaaaataagtacttaaaaataaaatatgtataaaaaagtgctctaaataattaagttaccgcataacttcttaacttattgtatcaaaatcgtacatatcttgcaagttgttgcatttatgcgatcacttataaagttcttgaactaaattgcacctatctgccaagttgttccactagaacgctcatttctcaagttcttgtatgaaattgcacccacctgccaagttgatgcatcgtggatgcaatttactctaagatctttttgacatatttataataaatttaacatagctattcaaaccgtgcaaaaatgactcactcaattgttttgaggatggttttttgctagcgtggcgtccagatggtagctctgtcatcacatgaactaaaaatagatgtggggcctacatgtaagtgattaaaaaaaagataattgctcattttaccctattctgaaggctaactacccatctataatctcactttttcaactttacttgtttgaccccatttttcaagtttgaagatcaaggttgaccctataccatgaagacaagataactgtgctagctatggggcaaattgttattttttcctcgctcatttgaccatgttatataaaaagtcttttgtttattcagacctttttgacatatttatactaaatttggcatagctttcacagatttgagacaagtgaagtacacaaaggtttgagatcattaggacacaatgatataagtggagtacttggactttgcaggtggacactattatgaaattaggatggaccctttattttgtgggtgagcattgcaacggacccaaaaattcatcaacttgtgcttcgatgtcctacttgaaaagtgggggtcaaatgagcaaaattgaaaaactagggttaaattgcttcggtacagagtggcatgagcaattgtccctaaggaaaacataaaaaattatgggcccacatgttcgaaccgactcttcttctcctctatctttcatctttctttcgcagaaacaagcgcaagaatccagaaaaatagtgcagacttgcttgtcgccatctccccacaaggaggccaagtggcggcaatggcggaggaagctgaggaggccaccatcatcacctgggttatgaatggcatggggtggagcagcgtgcaggctgaactttttctgcatgtcggtgttgtcatcggggaagaaggttgtcgagctgagaaggaagtcaacagggttgcggcgcgaagctgccggtggccgcggagtatgacatcatggaggagatgggccgtggagctggatgttgggcgctgctgttgctctctctcctccgccgagcactcaccttgctgagcagaccgccaccgctctcacctccagtgacaagagacgacaaagaaaagaggctagtcctccccaccgtcatcatcttccacctccccacaggggatcccatcctcctcgtggctctccagggatcgttgaccgccaccgcctctcttccctcaggcacgctggtgagctttgacctcgtgtaggtcccttcaaggaggggcatgttgtggtggaggtaagtgagcgccatggggagatatgataggatggtgtgggccgggagtgccatggctagggtgagactggtgacgcttgtgccggacctaagctccttgccaccatcctctctgcctcccccggctgattttcctcacgtggggccatcgcctctcttgtctatgaggaagtagctgccgcctttagctcttttttttgtcgggcactgccttggtcccaccagttgtcaccgtcggcccgaccactgcgagaaaggagaggtggacaaaatgccacattaacaaaaacatctgccaatactgctaagactttgtactggttttaatagttggaggggttgatatacccgattttagggttgagggatacaaatcagatctaacctttatctgagggagttaaattggaccttttccttttctagagtatcctactcggcccggcctggtccgaactccaaagcaaaccagcctccatccctcacgtcatccctcctcgcgcctcgtcatcgtcgtcttccgaaggatgctacgcatcggacgttcgatattttgcaaatatccgatgtctgctagttatggaggtcttactttatgcatgcacctacacctgcctctatacatgtcagtgtgggtctattattctctctttagcagagtatagcaagtacctcccactcatgtacatgcatacaggatttttctcctaaaatatttatccgatcaataatctgattatgctattgtgtttgttgcaattaaatcttcacaacaagatctaacatcattatattttgataaaattatatatgttttttcatcacttggataaatgtttcagcccacttaataagatgtttcataggggtgcaacattataaaattactaactgcaacacccataatcaatgcatgaaacattgagtcgtaacgagtgaaacatcataaaaaaacatatgtggtatacaatatgtaaataattaattctattgaaacattttttatcacatataaaacaccaagatgtaattattgaaccatgataaaatacttattgaaacatctaaataacatgatgtacaacatttgcaaacgaagtacagaaacatcatacaatacttactgaaacatcttaataacgccatatgcagcataaaatttaaaaaaatcatcgtaatttaatcatatgagatgttgttgtaaagatttaattgtaactaataaaacggtgtaattggattttagattcactattggagaatcgctttttagtctcagttgggaaccctcctatagtgactaaagatgttcattttagtcccggttgaaataaccgggactaaaaatagatttttagtgccggtttgtaacaccaaccgagactaagttaccaaccgatacaaaagttattttttttcttttttttctaccgcaaatatctccaaatcaaataaaataataaatcacagattttgttcacacatcccaaatcattcacagcaacaaaccaatatctcaacatcccaaatcatccacaacaacaaatcatacatcattctcaaatcacagataaaatcagcaaacaattattcacattattcacacaacgagaaggaaaaaagaaaaagaaatccatgaatccttccgccgcgcggtcttccgcgccgggccgccgtcgctcagccaccgcctggcggccgtcgccctgccacgcctggccgaaacctccccagcccgccatcgcctggccgccgccgccgccgcccggcacggctcggccccggccgccgccgcggcccctccctggcacggccctagccgccgccgcccttgcccggcacggcccggccgctgcccctccccggcacaggtccggccgccaccgccctcgcccggcatggcccggccgccgccgtggccgcccccgcccagcataggctcggccgccgccgtctctccccgtcacgggcccggccaccaccggccgcttctcctgcagatctgaggaagagaagagaggaaggggagaggaagagatgagagggaaagaggaagagatgaggaagagaagggagagataaagagtggaggggaggaagagataagagggtgacgaggactcagatcgatgcgcgcgcacggagaaatgatgaaagagagagagcgagatgtgggaaactgatttgtagtcccggttggtataaacaaccgggactaaagatctgatctttactcccagttgtttataccaaccgggattaaaaatattagaagacttgccacgtcgtgccaaaaaagattatctttagtcccggttagtgttagatcattgcacttttaaaccgggactaaaaatgctttttagtcccgggttttttaagcaaccgggactattgttgtttttgggcaaccaatcaaagatggtttctcccgtagtgattggacaagtatttttggaaaaaaaaaggctacatcttgcttaaaaagttaaatgcatatgcatatgcaattcaaaaggcaaagaagagagagaatatgagtgggattggctgagagcgtccgaaagtattttcctcgtcttcctcgatccacgcttctcgcaagatccgatcgactcgatcgacaatctcagctgctgttcgttcgtgcgtgcgtgcaaccggatgtgagatcgatctcccgtgcgctgtgagacgcgcgtgcggagatcgatgaggaaggaggagctggactacgtgctgatcccgctggggatggcgctcatggtggggtaccacgcatggctgctcctccgcatccgccgccgcccggcgaccaccgtcatcggcgtcaacgccatcaaccgccgcatctgggtccgccacatcatggaggttcgtccgtacacttgatctggttttggtggcgagcgagatgagaatgagatcgccggagtgacggggttcgggtggatacaggaggcgtcggggaagcacgcggtgctggcggtgcagacgatccggaacaacatcatggcgtcgacgctgctggcgtccacggccatcacgctcagctccctcatcgccatcctcatgtcctccgccggcggcggcggcggcgatgggctcctcccgggcgcgccgctggtggtgggcgccgcgggcgagacggcgctgtcggtgaaattcttcgccatcctggtgtgcttcctggtggcgttcctcctgaacgtgcagtccatccggtactacagccacaccagcaccctcgtgaacgtgccggtgcgcctgatccagcgccgccgccgcccgggcctcgccgtcgactacgtcaccgcgacgctcaaccgcggcagctacttctggtcgctcggcgcgcgcgccttctacttctcctgcccggtcttcctctggctcttcgggcccatccccatgttcgccgcctgcgccgccatggtctgcgcgctctacttcctcgacgtttgcgacgactgggaggaggaacaccaagaccacgacgagcaggatggaagcgggagtgatgagagatcaggagaagcgaaggtctgagcctatgtgtgttaggatgctacgtagataatttttttttaaaaaaaagtacttcctccgtttcaggtaataagacgttaagtcaaaagtcaaactagtttaagtttgactaattttttagaaaaaaataatagtatttttaactcaagactaacatattatgaaaatttatttaattatagatttaataaaagtatgctggtgttgtaaatattactacatttttctatagagttagttaaacttaaagtagttgattttgaccaaagtcaaaacgtattataacctgaaactgaaacagagggagtaatttgaaatggataaccaactcaattttccgcaaaaaataataaaaagttctcttgtatatccacagacactgcacataatcagtcctgtgaaataaccctccctaggatgagcaaaatgcaagaaacaacatatgcaacgatatatcgctgtaacaggcaagcaaatcttacgaatttgtgagtatcaaaatataagtaatctctccatcccagaaaaatataagaatcttcgattagacaagacacttcataaaactacaaatttgaataatctacatgttcagaaatgtcttatccgattctaaactattaaattttagacattttagaccgagggagtactaaataattaaagaaccgcagcatagtaataataatctaggtgtgcaataattaaagtactactagataactagaacagaaccgagtcacattctaccgtaatttacctaatatatcctaatccacaggtataaacagatcagaaaagatgctcatcttgaccccataagtttatcctcgtcgttttcacgctctctccctatttacacaagtagatgcacctgttatcaacatagagatgcataattctctcgatatgtggttgaacgacaaatatgttcactttatttatataatgttagaggaattttataattattaagatgtaccaaaatttagtacaaatttggaaggtcaaatttggtaccttccagtaccggagggagaggtacaaaattttacattgggggctgttcaaattgatgtcatttttaaccatactatttttttttgcaaaactatcaaaaaaaaaatattcacgtttagttttgccaaactttggtaaatacataagaaatcctgttaatgcctaaattttgctattgccaaagtttcataaggtttattttggctacaatctaaacatcccctagaaaatagggaaaagtccattttacaccctccaactctttgttttgtctaaaatacactcccaaactctaaaaccggatatttcacaccctccaactttcaataccgttcactttacaccctcgagtggtttttcagctggttttcgcctatgtggcattgacgtggaagtctagggtggaaataaaaaaaataggaccaaatgtcagtccatagccacggaggcaaccacctcttcttcttcttccctcatctcctcttccctttctctctctatccttcttcctcccagagctatggcagtggcattcttgagctcgtggagtaggagatcggtggtggagactctttgaggcgacggagctcaaacacatccctagcctttccttccgcgccgactgccggcgagcccgagctcaaggtccacctctcctgcagcctccaggagcagctatcttctccatgaaatccaactcgctggtggtgctagagctgcttggggacgtagagttcggcggaggcgatggggcttggggatcaggaactcaagctcgatgaggcggcggcggccggcggatgcagatatggccttgagcttgacctcgtcctcgatcaagcagtggcggcgttccataggaggactcctccccacgcgtgtggctccggcgaggtccgcctcttccgcgcagggcagcaaggtccaccgctgttgccactctcctcgctggcgactgcgtgcagagcctttcgctggcgactgcctccgcgaccatggcagcgccgccgccctcgcagctccacgctgacgccgcagccaccgccctcgcagctccacgccccgccctcacaaccacacgccgacgccacagcctatgccctcgcagctgcacgccgatgccgcagcctctgccctcatagctccacgccgacgccgcaaccgccgcccttcgcagctccacgtcccgccctcgcagctccatgccgatgccgcagccgccgccctcgcaggtccacgccgccgccgccaacgcgaacagggcagggagggagagagagtgaatatgggcttggcccatattatgttgtggactgacgtggcaagggctgatgtggcatccgacgtgtcaaaaaccaccgtaaaaacagcccgggggattaagcgtccggtattgaaagtttgagggtgtattatattcggttttatagtttggggtgtattttggataagcataagagtttgagggtgtaaaatggacttttccctagaaaatatatgatgtctcccaatatcttcttaataactataaaatcactcataattttaaatatataatatgtatatggcatgtttatcaccagcacgtctagaagacctgatggagcaaggaacttacaacaactaatcaagaaaacagtagatcaaaattaagaagaaaaagtgctttcttgatcaaaatcaataaaacaggagttctgggctagctagttgctaccaaccatgatcagccccactgtcttcttcattgtcaaatcttcgtgctgaagccaagggtggagctcggaggacgtaggagatatgctaccggcgtgaaggctgacatcagtatacaaaggtcaaagggggcaagcgctctggatttttcacaatttggtcctttcaaaaaatcatttcgcaaatagatacctgaaaatacttatcccaaaaatggtcctttttgagcgccagagtcgctggcgccgtcctcctaccaccgtggcaggtcggcgctgaggtggcagggggagcgtgccaatgtggctgccccccccggcccccgcattttttttatttttcttttattattttgatattttttcatggttaggaatataccagaaccaaccatagaaaaaatgaactcaaatggacgaaatacgtgacttgtagaatttttcctctctagtgtagatgagagagatgtgcaacttttttatttttattttattgatatttttttcatacttaggaacccacaagaaccaaccgtagaaaagtttaactcaaatggacgaaatatgtgacctgtaaaattttccaaagctctaccgaaaagcttctcgtcttgaaaacacaatcttgaaagctgaatttggaggttttaatctcgctgaactcagcaaagccagggagaattggatgtaactttttctgtagatgtccgtggatatattatttgcctgattctaagtccgtatgagaaagttacgcctgttttaagaaatgacactcgaatatagcagaaaaaaccctaacttattttttttataggatgtaaaagaggttaaaaaaggctaagagtattcaaaatctaatctactttttttggtggggggagaggtggggggctataggaaaaccaaaacaacgaagagcagggatagcgcgggggagggggttggggggggggggggcctc

SEQ ID NO: 5159 - DNA, 8269 bp, Oryza sativa
tagcctgcctccccatggcatatgttccttctgttcctgcattcgaacgaatttggatggatttgatcaaaaacttcaatggaatccgcatttttaaatttcttgtgtttaaaacgtttccagtgtctcatattatttcgtcagtaatacagtaacctccaagcatgttggatcttggaacgtggcaacctcaagccctcaaagcttaaactgaattgaatattccatctcggtatttttagatgcagtgcacacaaccaagaccaaggtgatctagtagtgtttgaaacagacaagaactattctcaaacgcaattgaataatcaatcaacaaccaccctcccccagttcgaccctactcaatgatgatggagtaaattgctaatctaaaaatcataggattccgcgtgtgcgagtgagttccgctaattcagcagcaaccagtaaccagaaacgtgtctctcgcgccgttaaacatttgggcaggacagtgacgtgcatgttcctggccataggaggcttggggattgggacctgggggtatggcagtgacatttcttcttttttcccctcttgtatgattgcatctttgtatctaaatcatgtgtccatgttcacgctgcaaaacaaaatgtcaccaccacgcttggtagtggataccgatgcaaatcacacaagcctataacaatggtggtaagtgcagccatgacataagcgctttgctgtcaattagtacaaggttagtaccaactaaacacgaacagcacaggagccgttcgccaatgctttgtctgcacaatggatgccaactttggccttgtcagcaacagaacaagtgcaggaactttaaaaggctagacaagatatccgctgtaacaaattggatccacctacggacctaccaaccagcaacaggcaaatttggccgatccggcgatgacctactttgaaacacgctagttttaggcagcgttcgttctgggagattggaggtagaatgcacatcgttttccgcgtgcacgcttcctaaactattaaacggtgtgttttttgtaaaaattttttataggaatgttgctttaaaaaattatattagttcattttttaaatttgaaataattaatactcaattaatcatacactaatagctcacctcgttttgtgtatctcccaaatcttctctatctcccctttctcaaacacagccttaaatgccaatgcttttttaagacatgctttttagatggactcgagacacgtctgaaacactatagtttctaattctgaaatttcacaggacatagggaagattcatgtgttacaaacaaggactttgcatcagagctttctagtcagtaataaaaaaaataaattgcatcaattgcagcagaggttaaaatctgtactagttttgcaaatataactggtagtcatatcacatcttagaagaaaatgtagacgaggttagctattcaccttttgtgcggagtttgagcagaaaccagttgtttctcttgagaaatcacatgattgtccttcaagcacagcatcctggttcaaatttagcctttaagctttggcttcccaaccttgcatgcaaacttgttctgaatcatgctgaacaggaaacacatagcgtcgatttagatgcaaaggactacttcttggacatgtaacaagcaacagaaaattgtctgtcaacttgcattagccaattgtgggaattaaaaaaaaaagcaaaagaaacaagcggcaactgatgacatcataccaaattgaccggtaccataagaatatgcacaacgaaagcagtttgagacatgatggactgattttccagatgcatttgcaggacattagcagcagtgttttgatcggccatacctttttggaactcttacagtaaatttagatcaacagcttttcggagtcatcaagaatatttaggatctcactgacatgccttattaacaacccattttcacgtcagtgtggttggaggccattaaactcagtagagacctgccgcaagtgcagttttgcaaccccacctgcaatacatcccggcacctgagccctgaaaattacattgtcttgcttacttaaagaacaagaaaatgatcgtcattctttgatgcatgtgaactgagaggcatattatcaaggaggttaactttaacctcttgccctaataggttcaagtcctaggatcaacttggatgaccatctcatttttaattgaatgacaatattcacattatccaagccagtttttcttttactctttatcgtttcaataaaagaagattctggaagcacaatattacctcccacagtcccactagagcaatcatgcccatcactcaacatcagaaaatatgtcaaactcaacatatataacagtgtcagcttgataaacagcttgcttcggtaagtggcatattatcctgcatatgacagtatttcatgacatattacgtcatataagttatggccaggctgtactacaaatatccatttatcaagctctaatcagttcaagctagaaggtggcactggccagtagcaatttcatacaaatggtaaatgtaagcttgttagcaaaagattatatatatatatattgtttaataggagcatgagattgatatttaggcatgaactctctctagtctcatttggacaagaatatgattgatgtagatcatgtaaaaccaataaaacagtgattcagaaatcaaatgatggtgaccacgaacctacaactggtcctgtatcaatttgatttatctgaaaattctacaactattctggtgttaagtggatgctgattgctcaagaaattaggtatacgcaaatatctgaaaaatggagggccacaagtctctagtctacagcataattggagtgggcttcacaaatatttaactgtgatatatttccactaaattgcctaaaaaggaaattgtttcattattgccaatttgatgctaataaattttggccaaattaaagtgtcatgtcacaacataactccaatatgcctcaataaatctttgcaactgttagaaaattggctacataatgtatttactcttatccacataagtaggcattctatgtgcgaaccagtaaaaacagagttcacaccacaggtccattgcctaccattttgatgaaggatagagatgtgtacctaaataattactgaatggtttccctgccaactccaactgaatttctttgtacttgagagccaatcatgatccttgactggttctatcattccactccacgatcatgataacatgatgttgaagatggaacatgcatgatgcatcagtaaggttaaaaatctgtgcatttgcggaaataccagaaagggactgatactctaggattctagtttctacaatacaactttgaaacaggtgcttctcatctcaacacaggtaggggcttcaaagaagcatactgaaatgagaaggataaattacgcaatacaagtcaaatttaactttgaataaaagaagcgtcaagttttaccttcagcaggaacatatgtgagaaatctaccagattataggtgcaggttctgcaatcatgagaacataaagcttcctattagttggtacaactataacagaattctgaagtttgcatcttgcacttttgcagacacttgaaggatcacactatttgggctaaaattggcctccacaacttgttacccgattggacttggcccattaaaatgttttttcagttgccaggaacccagactggtaagaagatggaacatgcatgaagcattagtaaggttaaaaatctgtacatttgcggaaataccagaaagggaatgatactctaggattctagtttctacaatacaactttgaaacaggtgcttctcatctcaacacaggaaggggctccaaagaagcatactgaaatgagaaggataaattacacaatacaagtcaaatttaactttgcataaaagaggcgtcaagttttaccttcagcaggaacatgtgtgagaaatttaccagattataggtgcaggttctgcaatcatgagaacataaagcttcctattagttggtacaactataccagaattctgaagtttgcatcttgcacttctgcagacacttgaaggatcacactatttgggctaaaaattggcctccacaacttgttaccctattggacttggcccattaaaatgttttttcagttgccaggaacccagacatccagacaaaagatcgtaatcttttcctgtcttacaccaacctgttacttaacaactattcaacatttctaagacatgttgcaatatttttttatcagctacaactttcctaggtaggcaagctgacacttattcgaagagttctcacatgttaataccataaagtcaaacaaaccccttaaataggtcagaagtagagagaaaaaggttaatcttatttcaacttttcacctaaaagccagagcacacgtggtaatttgtgtgcaactgtgctatgggtatgcaaacaaacaaaagccatgcacatcaaatagcaaattactcagtgatacaaattttattcgtaatgccatctgttactttcaataattcaaggcactctacttaaccttagaagactcccttatgctaattctgcaatttcagaatggttacagcaatgtgggcaccatggtttgattatgccaaagacatactggtgactggtgagttctgtactggccataagcatagcttctcaacattactacctagaaggccattatggtacataagttgaatagtactgtaccagtttatggtagtattaaactggtcaagaatatttcagacttctattctattggcattcatattcgcatgtactagagattaaaaaattagccatattgaaggtggctgcaaagtttcaaacaaaaaaaaaggtggctgcaacctgcaattatagcagattaatattggaggatgatattcaagagcaaattcaaaataggtacgtcagcataagaaaagaagtgcattattgtgcaacaaccttatgttggtagcacctgacaagaaagcagctggtgtatttggtacttgtaaagaataatggaagcttcaatcttggcgcaaaccaagtttcaaacctggcgcaaacagtgtgtgttttcagaaaaaaaaaacgttttatataattagcaaaaacataaacgtttcacatcctccaggctacaagaaatgcttgcagcggtattcaaaggggtaccatcaagtgtatccatgtgcacacgctgaagtgcacaataacataatgaagaaaacaatcaaattgacaaccatgtggaaaagctatttcctaaatcaaaaggccggggtactgccaaaaggatctgtgggtttttctgctcaagtgcaaactgattatagttaacctatcaacttctctgtcaaagctctacctttttgataaataataaagaagctctggtgacttccaaaaagagtcctagactactagttatctagtaggattctaggtcaaagctgaattcacaatgtaatgtgactttagaatggcatgtcttcattgaacagactaggaccactaagaaagaacaaccgtccttcacattgctcagaataactaaaccaggaatgaggttttaatagccgacgttctttttctatcaatgccagtctggattgaggtaacttttaatcaaaagaagaactctaacatgcctagaatccatcccaaagaaaggaatgacgacctcatgcctcaaactgatacaccacccaccatcaatattcaattcttcccatcaggcgtcggagctgtgagaggcatatcccacctaaacaacaccttacacctacagcacgatgacccaattcataaaccccccaaggccccaactccccccatctccaggacgcgaacgcgcttgaccctactgccgcattacatcgaacacctagcgtgcgccccgcccgccacaactccacccacctatccgcacatgcggcgcgcgggcagccgagtaaatcgccccgcccccgcatccccgaacaaccgccatcgctgctggtttaagcacatttgatgcatcggtggtcctcgcgcctggcccgcgtgcgcgcgaaaagggaccgcgaccgaatctctctggcttctctagtaaagttggtggatgatccggagattaataaacatttaaacaattgggatcgaggtcggtggtaggatgggttgggtagccctggtaggagttgaccgatcgatcgatcgatccaataaacaactgtttgacttggggaaattaaaggagaggagaggaagagatcgtgcgtgcaaaatgtgatgcggcggagtccaaaactagtcgcctgggttggttagggcgactagtcccgataggaacagcaagcggtggagagaatggcgggtagggggtgaaacgatcaccttgtttgtggccgccgacgctgccggcggcgatgtcggcggccggatcggagaatcagccgtggtggcgtggtgttggtggacgactggtagacggtagtggcgggaaggcggagcagataatgaattgtgtttagggcaaatttgaattaagacaattgaatattattatccaattgtagtgtaaattaaggcaaattgaataatattattatcctacagtctgcaaattaaggcaaatttgaattcacctatccggttatcaaattgtactataaaagaatattgttaagacgaaatcggataggtgacactggtacttttataaatttgaattgatctattatcgttaaggtttctgtcaatatcttgctcccgattatttcttctctatctccggcgcgcatagtacaaaatgattgtcatagcggctgatggcatggatggccgtggagaagcagagtggcgcaagcgcatcgcagcgatgtgggggctcgagctcacctggcgaggcaacgatgtacggacttaagctcccaagggcgacatcgatgcggctttgagaggcagacaaagctcggtcacactgaaggacaatagtgatagtggttgctggagcgagctcctaatagcgatggcaatacaacttggagaggttaaggggagctcgatgacagtgagtagaggcgattgtggttgctaggacgtcagtgcatcccgttctgcctcgtcgtcctcttgccattgtcggatcccttgcctcctccaacaactcctggatctcctcctgtcacacctcttccacctgtcgctgtcaaatctcgtctttatcatgtctactctggtcgccattgttggatcccttcccgtccatctgtcgctggccacctcaagaggaagaagttacatgctttgacagctattgcacgtttcttattttagaatagtgaagtgacacaaatatactttcaattttgttagtgacatttttctaatacaatgtttcagtggcatgatcaaatttaccctcttgtttacgatgaagtctactaatcggacaaaaaaataatgaatgaacattcaattaaaggatatatgatagattatcttattctacattaatatttagagggtaacggagttaaaagttattttaaatactatcccaagaatgtatgtatttttttatggaaatgctaaataccgggataccgtttgctagcgttcaggacgggatcttctcccagcctcacacagctacagataagaatggtgtggagacaaccaggttccacggcagccattgcagtagagacagtctatttcacgcgaggttgcggcatggcgtctgtcgccgtaggttgtgggcgtcgccgtcgtgctgctcagctactcacgccaactgaggacggcgatggcgcgtggggcttggccgccgttgctgaatcgaagagaggtgccgtgttgaggagcagcgcgagctcgacatcggagctgatggatgtgggttgtcacgacgatcggggatagagctatcgtcgaagtggatagacgcggagcaaggaggacacagccgctggcgatgagctccgacatggcatggacggtggaggatgcggccatcagtgacgagcttcggcgtggggcctggatgacggagaggacacgaccgccgccactgagctccgacgtggcgtggacggtggaggatgcagccgccggcgacgagcttccggcgtgagacgtggacgatgggaccaccggcgacaatgccttgg

SEQ ID NO: 5160 - DNA, 28264 bp, Oryza sativa
tcggatacaaattcgaatacagtagcgatggtatccgtcggaaattggattcggtcggaaactatccgacctttttttgccagatatccgaatcaaaataaacaacaaaatccaaattaacaaacatcgaaaaacgctcgtcgccgtccgccgcacaccgtcgcacgtcgcacgccggatccgctcgtcaccgttcgccgcacgtcgtcccctcgcgccgccgagccccatccgtcgccgtcgcctcacgacgtcgaatcccgcactgctgggctgtcgaccccggatccggccgccccgagtccggcgtcgccgtccgccacacgccgtcgcctcgtgctgtcgagttcccgccgtcgccacgacccggccgccccgaggccggcgcggctggttccgcttgtcgccgttcgctgcacgtcgtcgcctcgcgccgccgagcccctgccgtccgccgcacgaggccctgcccccgacgtcgccgtcgccgtccgccgcacgcggccccgcccccgtcgtcgccgtcgccgtccgccgcacgcgggccccgcccccgtggtggtcgcgggagccgggaggaaagggtggcggctgggaggagattgggaggtgtgggagaaactagggttaggtttatatatccctccatctaaatgggccaacgggcctaagaattagctattaagtctatatgtcctccctcaacttcgaattaaattttatgatactaaatgaattcatgtgaaaaagttatcaaaaacaaagttgtagaatttattgagatctaccaattttattttggtcatttcttcatccgagtttgattgaactatataaattttgaattttaaaatataagaaattcaaataatttttcgggtagtaaatgatttcaaatggaaaaagttgtcaacaacaaagttgtataactcatcgagatcaacaacttttgtttgggttatttttctatatgactttgtttaaatagtttgaatttggatttcaaaatatgacaccttcaaacaacattttcaaatactaaatgatttcaactgaaaaagtcaccaacaacaaagttgtataacttatcaagatctacaacttttattttagtcattttttcatccgacaaagttatagtaacattgtttacaaaatttacatatcttgtatatggtttcataagatataagagagatatgcaaattttataaacaatattactatcacttggtcggatgaagaaatgactaaaataaaagttgtagctcttgacgagttctacaacttttatattcataactttttcagttgaaattatttactgcttcaaaatattatttgaagttgctattttttgaaattcaaattttttacttgataaaacaaagtcacaagaaaatatggccaaaataatagcagtaagaacacaataactcgatagaacataattttagaacacaataatagcatcgtaatgtcttactcttgattgaatcgtctccctcaaccaaaaaatcgaatacaacaaaattattaacactaaaatttgaaaatgttgatatgttctattagaaaaaataacgagttatatttattcgttgatttgtgaaggtcggtttgaggggcttttatgttccgattaatattcgttaccgtattcgttttgattcgtattcgcttcgtatctgtattcgataatattcgattccgttttcatatccgggtttctgattccgagaaaaaaatatgaaaacgaatataataaagctagttttcgaccgtatccgatccgttttcatcctagtggtgagtggtgactgggtgagtggctggggtgagctgtgcggttcagcggctggatgggaacgatgtattcgcggcgaggacaaacagtgaagatccagccctattttgctccacggaaaatatccagtccttttttactccaccgaaaatcgtcctctactattgccggtctgccagttgaaattcgacctccctacgggaaatacgtactctatggtgggcatatcgtgcgtgtaggaattgatgaaatgcgtactctatggtgggcatatcgtgcgtgtaggaattgatgccattttgaacaactattcagattgatggcattttgaaccatattatttttagtaaaattaataaatatgttaataaatttagtttgttatcaaatattggtactgcctaaagaattttggtaacaaaacatttaatctatcctatcaaaatttggtaatattaaaatctggtaatattgttaacttgtccaaattttggtattgtcaaattttgaaaaggttcatttcggtagcaatctgaacaggtcctagaatccaattcaggtaattttttttatcttttttttaatcttcaagctttaacttttgaaccactataagtgaaaatatatactttctccgtttcatattacaagactttctagcgtcatccatattcatatataactagattcattaacatctatataaatgtgggcaatgctaaaaagtcttataacctgaaacggagagagtattttttatcctaaaattactttctccttctataacgtctctttagttctctggcttacaagtgggcctgatcagctatggtagccactacagtacattgcatgctgctgcacggtcgattggttgatcagaggacccacgaaaagaaaaacaataagaggattttttttctctagaaattggttaatttttccgtaaccgaaaagactttgacttagaaaaggagggctaaaggcaacgtgtatccatgattgactatttcacgatggtgaatgctggagcctggagtacatctgccagagtgccaggcacacactgcgtttgagaatactgatctcaggcagtcaggctcaacacccctcaaggaaaagtattagttaaactcaggacattaacgacctttcaggccatttctgttgcttgaagccgtagttattttcgctaatgaaacctctcttgcttcaagccatcggagtaacacgctgattacgtgatgacttgcctgagaccctctttacataggactaaaaacttttaagtccctatcacatcggatgtttggacactaattataaatgttaaatgtaaactattaataaaacctattcataatctgggactaattcgcgagacgaatctattaaacctaattaatctatgattagcctatatgatgctacagtaaacattctctaattatggattaattaggcttaaaaatttaaattaacttttatttatataattagttttgtaaatagtctatatttaatactctaaattagtgtctaaatatagagactaaatttaaatcatgtatccaaacaccacccaaagcggaacgagcaagcaattttctatacgaagggtacgtctgcctgccgcctgtggccggcttggcttgccgccacggtttccttgtcgaacgcgttgccatgtccaagtctaatttattaatagtagtatcgatcaaagctgttcctttgcaccaaataattcacccctctcagcgtgtccatacgacgatttgtcaaccaaatgaccgtttcgcaccgagacacaactctatcgctcttcgtctgaaaagagaggcgtcctggctacacagccttttacatttctagtcgtttttttttctcatgagctgcgtttgtgggaggtgagtttgtttgttttgttttcacgtgcacgctttccgaactactaaacgtgtttttctaaaaaaatttctataaaaaatttactttaaaaatcatattaatatatttttaaagtttaaaataattaatatttaattaatcatacactaatggctcttctcgttttgggtatcttctcaatcttctcttttcctcctctcaaacttgatgtttaactatttgcttttcctatgccaataacttgtgaatcgtttatgtatgtatgacatatgaatccaatggtatatgctccctccgccaaaaaaaaaatgaatctaggactgtatgagatatattctagtacaataaatctgggcatatgcatgtctagattcatattactaggatatatcaaatccagtaatgtgttggttttttatggaacagaggaagtagttaattatcatgtctaaaagtagcaaatagttaaggcttgttaactttgttatccaaattaaccatactggattttgatagattttggcattattaaattttggtagcattggctttatttgatttgatacatttatcaaaatttggtaggcttttaaaagagaaaactactaaaactaccaaattttgctaaggttataatgattgaagtatgtttagtttgttgctctattaaaatttgataatactaaaattttataaggttaaaattggcattgtggcaacatgaccttaagggccattttggtttgatttaaaaaacatatcttaccaatttattagcaaatttaatagtatgtgtgttactttggattgagatcaaatatttgggagtactatatttagtcatattctaaaagtttcttcactatactatcagaatttggctttatattggcagcaattcaaatattaactaaataattttaccctaccaacatttttttaatagtatgccaaatttacatagtctttaaattatctccctgcgggaccgttgatggagacgctcgcgacgtgtacgttaaccctcccagatacggagcaccgagagcatcttgtcacggtgtgtctcattgcacgtattaatagccggttcgtgcacagccacagcccgcaacacaccagttgtcgagttgccccgacgaaggaagctaggggttatttggatggtgaccatactttgccacaactttggcaagctactttgagcacatatttatcataccacactttttaattttgtgaacacacttatcataggtatatatctttgccaacatttgtctaacttgtgaccaagaatttcttagccacataaattgtggcatgccacatcttagttagagaagtttggtaaactgaaacaaaaatccaaacagcccctaaatccaccaccgcaccaccacccgtctccgcgcgcgggacggcgacgtcggcatcgcgcgtcgccgcgtccgcttgtgcgtggactccaccgcacgcatccgcaccggtgagaaaaactgggaacgcaacgcgtggcgcagacgcgtgcgcgggtcgatcgtgcgcccggtgggttttccggggaaattggggcgcgagctactctcaggttgcagctggtgcgggctggatcggagtaaagcctctgtccagtgatggagtgagtggtgactgctgttactcgatcggccagcgaacgaaccagccggccgcctagcctaagatggcacgatcagcaataactgctgtcctaacctggggggtgacttgtgggagtgtgaggccaaatctgtgctttattttccactaataaataaataatacgggtcgagttgggtgcgttttgtggtggtttctttgcgttgctttttggactagttcagtgtggtttaccctggtccggtcctgggctacaggccagcaagtccagcagagcttaggggtgtcaagcaccacaaaaaagttgaatttagccgttaaagaaaccgagctccacggctagtggagatgaacacgtccaagaatggtggtttggcttctctgctttaccttttccttttaacttttatttccatgctaggctgattctctacgggccgatagtggctttttaaaaacaattacgagccaattcggtgggtgttgctacagcattgctgcggctgtgcttcagctaagggagggcacaaaccactgttatcgactcgcagttgcagcctacacggttgtgataaagggcagccgaatagctcctatgtatagcatggttcttttctctaaaaacattctacaaaaccattgtttaaatcacttgttctatactaagttttggttttattcccacaaataaccaccaataatctatatcaatcatccatacaaaaacagagcataatgaccgcctggttaatgtggactgtggagtgtggacgcacgattgagctattctactctttaaacggtgttgaatattgatctggtccggtcttccagatgttctactccaggaaaagccaacacgccgtgaaagcatactagcagcagtagtacagtagtacaaatgcttcttgtttcaaacttcaaagtaaacagtagtagttgtaaagagagcgaaattgcttcaagctaaccgtattgtttacttcttgaccaggcccagatgtcaactagaggtggcaggcagtgacgcacaaactgcacaagtgctactccatcagtggcaacgttgaaaagtaaacaccgctgatgctccaaagctttcttccgttgaggaagtcaacttgagagggcacccttttgaccagtaaccacaccaccaactggaactggaaacatgctctaatgtgctagtgctacgtgccgtatttctatgttgagtcctgctatacgtatgacgtttcagttatacaactcatattcaactagataaatataattataaataattaaagaagaacatgtttatatgcactgcaaccatttacaaccattgatcaactttagttgtatgtaagttagacaggtcgtacgcataacaattttcttctatgttccatacgctttgagatcagtgcatggttcctcgaagacccgtctgggaagcgggacatttattttaaagcattactagaaaggcacatactacaagtatattatattcatataccccatgaaaacgtttttctaatatgttaaatacatattagcgacaaatcaatagcatcactaaaatttgaaagcgcatccgcatatgcgtaacatttacgaacactaggattcaaacacatggtggatggagttatgcatggcctccttttagaacgagctcgggagtcctaggataaattcacaatcttaccaatttttttgtttaaagttaaccgtgtgatataaaaatcgttggtattaaaatttaactcctgatagatgctataggacagaaatgtttccccttcatttgacatttttgatgcacccattcatttgacctttttgatgacataggacagaaaactacacccaagctaccttgaatacagatgtttggactttggaagggggcagataagcgactttctgtgggatacacatcaccatgccagcatgccccatgactaaatgctcataggccatgacagtagtttatgaaaacagataattttgatgctatgcgtgtattgataggcaaagctggaactggaagcagtcatgcttggcttttcgttcatgtatgggtacgtagcaatccatcagtccatggctccatgcctctagatgagccaaagggacacgactaacacgagtattagtgatgtttcagctcagttccccgaacctgtgggaagttaaatcattaatcatactagttcaatgaacattgtgcgttatttactcgtcaattctgatcgcaatcagcgaccaaacgcgctctcatcattgcgcagttggcatgttgcctatgtgccgaattcattgcatccatttttatttttgggtgtcattccttctgaacatgtcacgcacatgcgatgagccatgtctctgttatcttttgttccactgtccccttaggcccttatcaaatttagatgaacaagaagtagtacatagccatgacaaacagagatactgaactttgtggaagcacttacaagttacaaatcgctacatggctgacacttgtgagatttgttcaaattcatagtaccaggtaactatattttaatacggaagtagtacatagccatgacaaacagagatgctaaactttgtggaagcacttactttacaaatcggtatgtggttgacacttgtgagatttgtttaaattcgtagtattaggtaactatattttgagacggaagtagtaccatgcaagctaaatatagttgcattaatccgatcctgctatcacaaatggagtagagctaggaaaaatattatacaagagagtagacctatagtttgtaggaatacacatcagcaagtagcatcattttcccttatagttcaaaaagatcactcaagttcaccaaaaaggtgaaaagaaaacgatgatgaaattaagaattcatatcatcatccacgttgcattctccaaggtagaccttgatgcttcttggtgacccgcagttgccttctgcaataagagctctatcgtttgcagccatgtgttggattattttgtatatcatttcgatctaaggttgcatcaaggaaaggagttagtgcgtcaatccattgatgtttttaccagtgatacgagaaaagagcatggattacgggttacctcttcaggacagtggcagcgatctgcaatttgatccagtgtcaatggctcagcagggtccttgcagctggaagatagtaaactcgactataagcagaaagatctcctagtacaaaattaacacaacaaactggagactagaaatgttatcgtaaatcatatctttggttctcaccaatcttatagcatatccgcatctgtttctcatgaaaccatgtggagaggaattgaaacggttatatgttcatgacaaagagatgcctatatgtttcatgttttctttgtggagtactttgttcttatttaaattataaaaaaaaatattactgcaaaaaaaaggtcccacagtcacctcttccaactatttgagtcaactgatcagctattgtaatctatatacatatcattttttaaatggttgccgctaaccaaggtactcaaacatctccagaacatttttaacaggctattttattccaaaaggacgtgggtgtagttcaagaatttaggtcaacacatctatatgattttgtttcaagttctttggactatagccatacctagaaaaacaatgcgtggttattactgcaatgaaatcaaacagtagaagaaaagggaatgaatgcagttcaagaacattgatgttgcccccatgaagaaaaaaaaaaaagaagattgatgttccatacctggcttcgttaagaacaagtaggatccttttctgaagtgccaacacctctccagcagcctttttccctgcttcgacacctgtacaaagcataataatttgcatagatcatagcaacaaattttcttaacaattcttgagaaaatttaaaaaattacgagagagtcaaaccaggttgatgataggcattgatgttgattaaataagcataaagaccgacagcacgctcatagagtgcaacaagtgctccaacagctctagggtttacttcttggacagtgactgtaatagattcgcggtcatttgcataaagagctgaacgagttccctacaaaaattaactttgtttcatcatcagttttatgtaattggtatcatgtcaaatctcacttcatatttctatatcagatctggaaaattacatgtagcattccaaacaagtagtccccacatgtaacacttggttcaagctcccactcatgaccaggaggcctatcgcgcaaaacttcaataaaagtaacaaagaagttgtgcacaccttctctcagctgctgaatgtagctgaaatcagagataaatcattggtcatgcatttttctaatctatatataggaaagtaactgacacagaagatgagaagattgtaaagatgtaaacttacgcatgctggtctgtgcttcctttgttaccataaacagttagtccctgattaacctgcattacactatcatatgttaaaggcctgtttaggacatagtataactttttacagaaatctgtacattttccacatgaatagggaaaaggcccccctttgaataaagacctcgacatgactgataatataagctatgagaagaaaaaggaataatgcatacccgatttccatcaaggtcaaattcttttccaagagattccatgacaagttgttgcaagtatctactcaaaagaagcaggctatccttgtatggcaatacagccatatccaagaacagcaattagtatcgtaaagactaaggataagccaaaacacacaagcagtcacaatgcatacagatgcatggacatggaaggaaacttggaaggaacagcgaataagccataataactgatcaagttgaaaactactaaccttactgcctattccatccgatgcccaataccaacacaatgcaagcaaggctgctggattttccttaatctggacacgtaaaacatcataatcatatatatatttagttacaggagtggcattgactatttaacttgtattttatatgttcaaacaaatcatacttccagtattccctttaaaaaaaaaattcatacctcagtattcctagtttcctcatccatttgtgcagcaccaactagcatttccttgatgtcaatacccttgtaagttgtaataagtctcttatcagttgcaacattggaagtccatggaaatatttttctcctcaacagacaacagaacatgcaaatgtgaggcactgacctgtaatgctgctggcagtaaaccaacagctgacatttctgatgttctaccaccaacccagtcaaacatgggaaatctagctaaccacccctctattctggcagtgttatctaataaagaattctcttgagtaattgcaacaccctgcaaaatagctggtcctacattatatcaaatttaatcatggatcaaacacgtgcatccacgattagaagaaaataataaaattcacagggacctatgattcttattttgtttggtagaatcacaggaacctatgataatatacagtaagcaattatctgatcaatgtttggtcaccatccttgtaaaagaatgtcaggtcaccattggaaaaggtttctaattagcataatggatacataaaaaaataaattaaaatctggctatctatgttatggctcaagtactatgattgggagaagaacactaagacaacatttagtaaagcataatattacagtgatcaaatcatcaaaagaagggatattgcaggagactacttttttcgtttagaaacaaagtactacgtgacagacggtaaactgagaatgaaactttcacacccacagtctcgtacagagcaacatacagtatttgataccgaagagaaagaaagcatagaaggacaaaaaagaaccttaggtcacaacctgtttcgagaattctagtccagcatctcggaaggccttttgtacttctaatagaccatttcgtgtttcaggtgtgcctccactctagaagtacgaaaaaaataagatatatcagattagccatgaagtagaaaaaaaaacagataattagggtgtgcatgatgtacctttgatattacaatcacaagagttgatgcaagttctggtcctagctgtgcaatctgatggtcaattccagctggatcggtgttgtcgataaatcttatctgacacagccatcagaaagataaggtagatcacacttcacacacacagtactttgagctgcagaagacattttaacaatacattacattgcaaacgagctcactttacttatgggtaaataaagtccataagcaagtaagctactcagcctactctacagcttaaagtccctattgaaggatttgaatttcaacttggatcagacacaaatgatagattatttcaaggcaaaagtaatgttacacaaaacaaaagttcctagctcaaatgggcctttgtagtagatagatatgatggtgtagaaagcaaagactgttcatattttctttgtggtattcataaaactgaattctctattgaatttggaatctcttcgatgggccctgaatactcttggacctattacttcagcaaggaatggatcctagtaactatatagacaaagtaaatgagaagaaaatgtatggcagatggtacagtttacaggaataggaaataccatcagaggagggttatctggagcaagtgcctccgcaacaaattgtggccccaaagatgaaccaccaattcctatagaaagtatttgagtaaatcggccagcaggggaggatggaggtcttatctgcattaagtaaaccatcacaaaagtagcatgataagttgacacaggacataaaacgtacctacaaaagatgcaatgtgctaatgatacaatattgtattgttacgacaagtaatacaccactaagttgtttggatgctctgttatcccacatagaaccagaacttaacaccactaaggccctgctcttttcagccacttcactggattattgtcacggaaattgtttcttctactgcattgtttagttctcttgttgtaaggtaaattcatcaagtttatttattagaatacttaatttatatccataatcgtgtatataatccactacaataatccggccaataatctgcttgactacaatgctaacaggtcaaattattaaattaattaatattaaccccgagaagcagcctatccctatgacctattccatgccttatcacaattcacaatacacacaaatcgatcattgctatccgtaaaattgaaaacggactatccctcaagcgagtggaagctcaccttggcggagatgacgtcgctggcgaacgcgaggatgcgttcgagcgtggtctcgattttgtcgcggaggaaggagttgggggcgagggccgggttgcgcagccagtagtggccgaccatccggccctcgtcggggttggcgatggcgcccttctcgagctcccgcatcgccgcgaacgcccgccccatgggcgcctccatccgccgcaggaactcctcggtgaacccgatccggctcacgtcgacgaacagccccagctgcttgtgctggtacagccactccacgtagcggttccacagcctgatggggtccttgtccaccgcgccatgggcgaggacgtcggcgtggcccgactgcttggagctgagcgagcggggaggagaggatgacgacgacgagcaggagcgggagacgtcggtgatggagctgggacgggcgaggcggaagtgggaggagcgcgggaggtggtctcgccggaggcggaggccgcacgacgccccggaggaggagggcgccgccgccgccgcgccggagatggaagccatcgccggagttggagcgtgtggctttgggagttgggagttggaaggggactgggagtttacgacagaattgatgatgagattaaggtgataatttgatttttaatcctaatatttagtttggtagagaagatggacattgctagggagtttagttggagattaggtctttaataaaaacggatggctgagatttgcttagacaaaataaaataaaggaggcattcactcccaattatctgcccctaccttggtattaaaaaggtccttcatcaattcttcatctctatcccaccaaaattaacatgtcttctaaccaaacaaaacacttaatagtctcgtccctctgaactctcactctcactccctcctacaaactccctccgaccaaactggccggagaggtaagcctcgcgagatggaagctgctaatggggcccacttgtccgtgacggagcttacaggccgtccgtacggcccagaagcccagctcacgtgtccaagattgaagattccgagtgacggaatctttatgggcttttttacccttcgtgggactagctatccatcacacgacagatttttgggtgcaaatcacacagattttagattagttggattaggctcatttgatcacttgattagaagagtctatacatgtatcaacatatattaattatatatattgcatatattttatttgttagatctttatattgaaaaaaatatatcaccaacccatctactaaaagttaccgtgtaattacactatagttacattgtaactacactatagttattgtaactatagtgtagttacagtgtaactgtacacttacatgtcatatcaactaaacttacaaatataattttagttatataggattgtaattttatattttaaaggaaataacaagtatatatttacttatacaacatttttatcaaaattatagtgcacttacatgtcatatcaactgaatttacgaatgtaattttagttatatagatctgtaactttatattttatttcttcaatctcttcacctagccgcaacgacgtgcaatgtatgtactcatcaattatgtgccaagttagatgttgctggcctcatgcgtgcgtgggaaggaaacacatcatagccgctaattaaatcatgcacagactaatccacaaggatagtaaatccgagtgatttcgagccaaaaatttgtcgccagatttttagcaaaatcgttataggattcgtttctcatagtgccttttttttaaaataatggaataaatccgttttttttttgctaacaagagttacaatcacttattacacaaactcgttcaatagggatcacatatcatgtgacgtaggtaaaatcgaaggcttaaggctgagttcgtttaggagggttcccaaccattttccctcgttttccgcgcgcacgctttttaaactactaaacggtgtattttttttaaaaagtttctatacgaaagttgtttaaaaaaatcatattgatctatttttgaaaaaaaaagctaatacttaattaatcatgcgctaatggactgctctgttttccgtgcgggagggtaaggttcccaaccatgatccacgaacacagccttagggtttgaggatttattgtatcaatgttctgggctacgaggatcaaaatatatgcatatcccggtttgcagagttggactcaaccttaaaatcttaatattattggatgtagaggttggatttttaattttatttttttttaaaaaaatggaagatataaactcattatgtggagagattttgcttcatgcacccacttgtttggttcattgccctttctcaccatgccaaaaaaattggccatgctaatggactaacatgttcatttgctttctagaaaaaccagcatgttcaagatgctagctagagtgataaacaagaggctatacatataccaaaaattttgctgcatcccaaacaatcattttttaccaaaaatttgacgataccaattctttcgacaacccaaaacaatagttcttttgaataattaatgctagatcttaccattacaaagatctaaacacaggcccgttgtgtttagatgcaacatgtttcagacaatctcttctgattgtacatgcaactgtccttgtgactctctccaagtactgtactggttccatccagctctttagccgcgaggaagtttaggactagtagtagtgtagtacttataaaccgtgagctaagttaagctaatctcctactagtcctagatgtattgatccaatgtgtaacctgccggcctatcggatggtagtacggcacagtccctgaagcagtactctgacaaagaaaactgcacggttgctacgtacaccggtacacgcttaactgatgccggaagagtacaaggacagcttctcattctcattatgatcgtttgctgtagttttcttttctgacataactggtgaattggaagcaaaagattaattaggaaacacacaagacaaagtggagagtaagggtgagtttgagaggagggaaaaagagaagattgggaagatacgtaaaacgaggtgagctattagtatatgattaattgagtataaactattttaaacttcaaaaatagattaatatgattttttaaagcaactttcatatagaaaatttttacaaaaaacacaccgttagtagttcgggaagcgtgcgcacggaaaatgaaacaaactaactgacaaactcctcctgccgaacgctccctaagcttggctagttgcctgctggaaggcgctctagtgcatatggagatggattatattcgttctgctcaattaagtggggattaaggagccaaatccaatgatagccagatccgtctgcaccatttgcctgacaatactaatactgagttgtaaactttgagcttgctgggtttgaagtcaattcttaccataccaatatgagttttgggactaccaaatttaccgcgggtaaaaaattgatagaaaactaaacatgcatgagacactattgaaattgtcaagaatttgttagaacaaatattggcatcaatccaatcaagcccttttaactccaaactataaattagttgttttccatcagcgcttcccgaacagctaattaatacgttttcgttttgtgcagaaatttactatatatatacaagttttttaaaaaataaattcatttttcaaatatatagttgttaatatttaattaattagactacttctaagtgaccagtatgctacttctattcgatatataaggtttcaaacgggccctaatactacgatcaatcaaaggaggcccagggtggtgatagcctgatacggtcagcctctcatattcttagcatcattgggagattgattggtcctggccaagttggcaaccaacatgaatgaattaaattgatcctggacaaatgaatcaagaaacaacgcgactaacaaggcctgatcatccatatactccaacaatatcgttactgcaagtggccatgcaatgcaacaaatcagtttgctaataagctaggcgacatctcgatggatggatgagagcttgcatagggagtctcagcgcggagggcggcgacacgcaagctaagctagatatggcggatgttgtgggtgtgtgtgcgcgcgtatagagagagagagcagctctctataaaatatagtctttcggatattactatacaactataataatacaaagattgtgctataagaaacattttttaaaaaaaactactattatattataaaagtatttttttgattaatatctaaaaaataatttttatgcacccactttagatatttcagaaggtattgacctttaaagtgtatagaattcaactgaaatatgtcgaaacatgcacatgcaattatatttcccacaaaaatcacatattcaacaactgttttgaggtatgcaaagcacaattggtgttgaacccaatagtttaaattatagtgcccacgaatattctacaatgtaattgctcttttaattaaaaaaaatagtaaggctaggaatttacgtttctgttgacacaaaattcatcacacacacgaaggcatgggagatttgcatctgtgttgatctatgattaaagttggacatgtaaactaaagctgcgtttaaaataggatgggggagtactacgaaatggcagattcaatgttagattgattttttttttacgaagggagtataatcaagcgatctcgtcacgaaaataatgacttctttcccatctctcatttctatctcatcaatatgtacattaatttggagttatcattattttggagctgtaaatgcctaacaatgattccattaatttcgatgttgggccatgcaacaagcatactcttaacctcggttcgtgtgcattaatcagctagtagatcacgcacatcaattgtggagttaagggtcaaataagaaaaagtgacagtactgagggagtacacctacgtacgtagatggccgaacaatcgtcgctctctttgttttacgtgcttgtacttaccttctcttttgactcaccagttaaaactagatctaagatccctctaatgcaaatgtctagctagatctcacaggccttcctgagaatcgatgcactgtaacatgtgaccagttgccagttgggttatcttaattaaattcttaaattagactattgctgctgcagctctagctatatatactcctactatatatatatatatatatatgtatatatgtacatatatatgtatacatgtacatatatatatatgtacatatatgtacatatgtatatacatgtacatatatatatatatgtatatatctatatatgtgtgtatatatatatatatatatatatatatatatatatatatatatatgtatatatatatgtgtatatatatatgtgtatatatatgtgtctatacatatatgtgtatatatatatgtgtatatatatacatatatatatatacatatatatatatatatatatacatatatatatatacatatatatatatatatatatacatatatatatatacatatatatatatatatatatgtataggacactcatatggggcaccatggtgcctgggcaccatggtatcaaatacacaaaatcactcaaattttttaaaattttcaaattgtgagtatatacctagttataataactcgattcatacctatacctatcaacaaaacaactcaaatttaactttatttcacaatccatgattacatacctaactaattatatgtatggatgctatatacctagaatcaaaatctaacaaaaacaagttcaaattcagttcaaacttgctttgaactagttagtaaagtagctaatgttaatatctaagtaattgaaaaagtttcatactcatttgaattaggtatatactcaatttcaacaatggtgcccgggcaccatggagcaccaaacaaatttactatatatatatatatatatatatatatatatatatatatatatatatgtgtatgtatgtatgtatgtatgtatgtatgtatgtatgtaaagagaggattaagcagagttataataatctctctaggtcaaaaagaagaagaccaattagcgttacatcagtcgtctatgattaatctagaggggagagatatatatagatatgggcaatgggacaagagccttaatgaccgggtcgaccggatcgcatatgcacacaaacagaaattacgtaccggaccaagctttaattgcgtgcattatgaatgagctgattgtgacacttcgtcgatcgcttgaacatgcacactgacacgatgcaatgctagggccctaaacccctaagacagcaggggtattattcgagcctaataaattcctttactcaaaccagtagtgctttatatgaaaatttctttgatttaccactcgcaaaagcttattgtacaaaataccgttaacgaaaatgtgtaacataggccatttcgtagaattcgttatggttttcctcctttctaccattatctctctattattacgtttataatactcaaaatatccgtaggcccgttattatttacccaatggccactctaccaaggatttggttgagatcaagggtgaaatataatgtgtatttagatgcgatagttgtcatccatattattttgaagtagatttgaagtgagtaatgtgggcggattgcttcggatatcgaagatggattagagtcgatgcaagcttagtttaaaaatggattaaaattattggaggttccacgtatatataatcagttattaataatgagtcaacaatgcaacaggcaacaatataataactatagagcatatgatttctgaacatgatttatactctcgaggacaataatcagtcagctatcaagagacgagagtcggagaggcatcgcttgctgctgtctaccatcgtgttgtaggccatcaccagccgtggtggaaatcacattatcatgaggctatatgctgagtcggagaggagattaggatggccggaaggggcgtctcttgccgctcgttacatccctgcattgcgttggtgagtggtggcggctacataggtgtgaggtgttacagtgtgagcttgcgatagaggagtctaggttatctgatgaattgatgcatgggccaacttatattctatggaacaaatggagtgattacatgggttaaaaacaaatggagtggttacatgggttaaaattttttggataatccaataaaaattccgtagcataattagtatccaccagatattaggaacaccatatctatatctgaatgcacgtattatatctactagatttctataaatacagtcataccatattctcatttcggatggatttgaagtagatctgatcttatctattttaacccttaggccctagtagtgtaccatgtaacgttgctagtgcatgtggttcttgatcaaagaagtcgtgtgtgggatacttttcattcaaaaagtacaaaaaaggtaaaaggggaagaaattttttcgtgtgatggcattcatcaaattcatttcgtagcggcatttagtagaacgaagcattttgtaatgacgaattgtacccttataaaggctactcagagtgagtatgacattttatcgattttacatcaaggtgtctaagtccgtcctcgtagggtctttcgtgtcctcctccctcacgggcgacacgggaggcggcaaccccgccgtcgcccgttccccccttcctcctccgcctcgccgtcgccggcaaagccgcgcggccacaaggacgatggcagcggggcttcgtttttctctcgtctcgccggtagtggggggccgtgcggatggcgaaagaccacccagatccgagccatcgcgatctggcggggaggcagccgacggcgaggcagcgtggtgaggcggcggcggttggcggtggtggcggcagggtctggaggtggtggcgatggagaaggagaagagatggggactgacgacggcgggaatggaaggcggtagcgaagatggtgacggcaggcaggatccagtcacgccggaggtggatcccccctcccccgaggacggatctggtgtggggcgagctcgcggcggtggcggcgctacggagcccgcagctggccgacaacagtagcggctgccggctgctgtggcaaccagatgcactcaagacggcgacagcggcgcggagctcgtggcgacggtggtggcagcggccggacaacggcgaggtggctggccattggcagcagcggctactgtggctgcggagggaggaggcacgatggtggtgaccgtgactacggtgggaggaggcatggcggtctcggacagctagctggaggcgtggcagacgaccgcacctagctagcacgacaatgattggaggaggagtcggaggccgacttgccgcagagaggcacaggcgatggcagtggaggctggcacggcgcgagaggcacgaccggcggtggtggaggccggcttggcgcgagaggcacggcgatagcgggaggccggactggcgcgagagacgcgtccgggggtggaggaggctgacgcggcgcgatgaggcccggccggcggtaaaggagacgaccacggtgcaaggagaagctaccggtgggtgtggcgcggtcttcgatgcacaaaggccgcccggtgggggcgccagtgcagtggtcccacatgtcggcagaggttgagcggtgatggagcatcgatgcgtcagccgtggactcgcaggtgatgagctgcgggtgaaaacccagcccggacttggccggaccgacaacgatggttcattccccctcctgagggcgttgtcgtgccgtcttatccctcaagggtggttgccaagcgaaagcccaatcttggctcttttgagtccctgccgaacggcggtgacggttttctgtcgcttatttcgttggagacgtcgtttaggcatcctcttgccgaaaccactcgaatgattggtgcgagcaagctctaggatagagttgggctttgtgttggttgtaaggactttttttgggcgatctcgtctgtgttcctttgttggcctagcggtggtcggtcacacttagcggcgaccggtccagtgctagccttctcccggacctgtgtgttggcaatgtcggtgtgtgggtggtggtatatttttttccttttttctagctacgaccttccaatattgtaatcttgtaattttttttctgctctgtaaatagaacttcgtaccatctcgtgcgagtcgttaaaaaaacattttatcgatttctcccaaactggtaaaattttctcataattactgcattctatttttcttaggacaattgcttatttgaccccgttttgagccctaactactaatttgaccctactttttaaagtttgcttatttgaccctccttttcaaaaagaagctcgcgtatgaccctgttctgttaagggcatctaacggtgttaactaaagcacaaaatgtctcttttgcccttactgatttgaccctattacgtgtgggacccacccgcagttccctcttctcctctcctctcctctcttctcttctcctctcctctcctctcttctcttctcttctcctctcctccacggggcggcgactgatgggccggtggcggcggcgctctgagggggctgagggagagggggcatgtaacatcccggcctagggcttaataggattaatagaatactcatatcaacaagttgcaacttcttttctggaagccaatctccaaagaactccagggttaagcgtgcttggcctggagcaatttgggatgggtgactgaccgggaaattcttcccagaagcgtgcttggcctggagcaatttgggatgggtgaccgatcgggaaattcttcccgggtgcacacgagtgaggacaaagtgtgcagaaaagacatgtgttggtctgtgagggcagtctatgacctatgaaaggtgttagatgtaagtgggcctggcctgggagaggcgggtcgttacagggcgagggtgtggcggcgctggctccggctctttgtcgtcgtcctcctcctcgtcagcagggcaccggcttcggctcttcatcgtcgacgagccgccgccaccactcctcgtcgtcgttgtcgtcaccagggctggtgccggctcgtcgtcgtcactggggccggtgcctgctcatcgtcgtcatcaccagggcggcgccgatctgagggggtggcggcgctgactcgccacaagtcgccgccgttgccgcaaggagagaaatgtggatagggttgggtggatgcatatggttttctaagggtattttgagtattatgaatattagttgtatttttttaattttaaatcaaaacttaatggactaatggaaacagggtcagacggaagctttgtttttgataaggatggtcaaataagcaaactctaaaaagtagggtcaaattgatagttaggattcaaaacggggtcaaataatagtcccattttttttataagtagagggcaaacgctcccattgcagttattttttactacgtgtatgttttaactctttaaccgcccgagacaaaattaagctacgtgatcacgaatctggagacaggagagagatctaccggacggactctgccctcgatcctctgctccctccgattccgatcgattgcagaggctcacaaatacacatatacatccaaaagagagagacacatactgtatagtactcgccctacatacgtacgcgcgcatttcgcactacgtacccggcacccacagccaatatgtatgtatactaattaacaaagcgtacgtacgtgcgtcagagatcacgtacgggacactgtgttgtacaagtgacaatctacgtatacgattacgtacgtacgtactagctagctaagctaactcgtgtgtagctagcaagctacgtggaccacgggatttattgacgttgtgcgttgcgtttgcgtatagcacgtggaccacggagacgtgtaccgtgcacatctacagtttcgtttttttttttgggctccgttaccgcgcgcgcccccggcaaaattagtgcacgtacaatgtacgggagctcggtttggtggaaaccgcacgaagtgtacatgtgaggtaagccacacgggcacacggaggagtttggttaggtgcagcgagatgatcatcttgtgctgaggccatcctgtgctgcgcgcctagggcgtaatggcgatatcaggcaccgtcaataattccatcgtgaatctggcggagccagagtttactcatcaagagtaggatgaaactactataatctaccctaatgccttttatcctttttttttaagttgtgcttcatttcatacaattatttttttccagatgtttcattacataagacgtgcatacatacatacaattaactaattaacacatcatcttcactaaattgttattaattaatttctttaccctcaagatctctaattatattatatgcatatattatatttactagtgtctagtgtgccaattctaccgtaagccttatgggaaaaatactacctataagacatcattgagaaattccccaatgtaatgttatgattttctaatcatttgattaattaaaatcaaatgcatcacacatcaccctcgctatctgtgttcatctgtctccaacacatcgtcccctaatcccggcccatcgattaggatttgagcgacgcactcgcatcgactttcctgctatcatcacatacacacctttctccctgcctcacgcgctgtcatccctttgtctctccgacttcacctctgatgttagcgagaagccgagaacaacactacagatcttctccctccacttcatttttctctctcccccatcatgtttctcattgtcggtgctcctgagctatcttcctccacttcttgtggtttctgccgttggatcggccatcaatatccgtcatctttaatacgtaccgtcttgactcccctactatctccaaccaaatctttcacctcccatcgccctccttcactctcacggctttagtggcgcccccaccgtctcatcatcctcctattgctcaccgtccactggtcttctagactcgctctaaacccaaccctcctttgaatcaatcctccgaccccaaaaacctaacccggtgagattatcgccacatcctcgttgtcggagcgagagaagaaagaggacggacacacgagtcttgagatcaatctaatggtttaaaactatgagaattgtttctcaaatgtctgtccaaactctaaaggtagttagcaaatttgcaaagaaaaaataaaacaaataatgtaagcactaccaggacagagtggggatcagattgcacgccgatacgagaggccagctgagccatatataccacgcactgataagatgcacgtacgcgggcacacctgcaggatacgatacgatctcgtgaccctccctccgatcctacgggccagagttttgcaccttatcctcgacagggcaatgattccgatctactatagctactctctcataaatcataatactactgcagttaataattaaacatacatgcatgctactgcacatatactgctatctctcttgcaaattttaatgtactacacgcaagtgaattaatgtaagctcctagttggtttttctactttcccttgtacgtacctgcaaattaaagcaattggggtcccaatggcaccttgagagaatagttacacaggccgtgcgttgtttaagccacggcgagagacagccggagttaagggttttgccgattcgtatcgacgtccttgtcaacaaaatctgtgcatgtctggtaccatcctttacgcccccgtccggccggccggcggcgattattgtcacaacaaaactgcactgttgttggagtactgttattttctcgtaccctacgcttattataatgaatctggatataccattatagtattagatagtatcccgtttacttctcgattagttttattctcggttggtttgttatggaacggagggagtacgcttagtggctcctttggatcatacgatctcagtcctaaaaatatactccattcgttttaaaataagtttatctttgtattctcttatttatctcaaaataagtgtatttttaagcagtttagagtttataaaagtaggagataaatgtattagaagtagataaatcagaggataagtgcattgggatttgataaagtgaaagttattccagtcattttacttttgtattagtatgtgttgagatgggtgaacaatatatttattttgggatgtaggaggtaaggaattttggttgcatagctaaatctcttatatttcgaaacgcaggtggtaggatttttaaaacatggggaaaaaatagaagtatgttgtcacatgctatacaatacttcgagattttagggtttgttctctttattgccactttgatacgtatcaaattttggtaagatagcaaactaaacaataccttatgaatgccatcctaccaaaatttggtagttccgaactttcgtcttataaaaacgctaccaaatttttgaaagacgtcaaactaaatatatccaacactaccaaagtttaacaacgtcaaaattatcaaaatttaaacattgtcaggtcgaaattggtaacaaaatgaacatgcccttcaaatcgaaaaacaatagatataaataatgtactctttggatggttcacattagttgaaacaatgggattttaaagaaaatcttatatgggagagagatagagagtttgtattggacttagcaaaataaaataatacaaagatttgatgtcgttattaaatttcttatagaatagggtagggaagcaacccatagaaatcttgtaacgctgtttttatttttttcaaagggtatcacagattttttttccaagtactttaatggtgcaaaaaattctatgaacttcattcaatctaaaggaaccatgcattactggctttactggatactgctgccatgttagaggaaggttaatagtatcggcgactgctggcggcaaccgagtgccacatccttcaatagagagctaatctataatgcatacaacaacatgcaacacttctttattttttttaatcgagctagtgtctactccaaaggaaccagccagattcatatgagaaaacataagtaaacgagcttccgcctgagcttccaaggataaaggtagatgaacagccatttgatccccatcaaagtctgcattgaaacctttacacactaatgggtgtaaacaaatagtacgcccctctactaaagtgggttggaaagcctgtatgcctaatctatgcagggtaggtgctctattcaacagtacaggatgtcccctcataacttcttgaagtatttcccatacaatgggttccttttcccaaattttccttttagcaatcctaacattagaagtagcacgtttcgtgattaaatcgcgaattacaaatagctgaaaaagctttattgctatctctagaggtaacccacattgatgtaatgaaagtgaaggacccacaacaatgacagaacgccccgagtaatcgacccgtttcccaagcagagtttcgcgaaacctcccctctttaccttcaattacatctgaaagtgatttgtatactttattgtgaccatccctcgttggttgcccgcgggacccactatcaagaagtgtatttcacgtccccattcattttttcattggttgtcgtgagagtaggtgggcctatggtaggtgaaatgcataggctcgcgcgaagagccagcgactaaatagtcgctcgtttttctctctccaagttttctttctcggccatgtataaaaaatcctatgtaagcatgctattaacccattgttgtacctgctcatgatactaatggtgcagtttaatctaggcatttttttagggaagataaactgcatatttttctgtgtgctctttcgggaaagccaatatatatctgagcactccctccgacggtggctgttaaattaaatcttgaaaaatccatcggtgaattcgaacttattttatctggaatagaaaatcacaatcagctactcactcagtctctctgttcaactccttcagagagggaggtagtagaacgttactgtcgtgatatgcgagagctgagctaggtagatagcgtttctagtacagtaataagcaagcaagcgatccgaaattctatgcaagtaaagcacaaaagaaccgccatgttgttagcttgaagctcttatctcccaaacaagt

SEQ ID NO: 5161 - DNA, 19311 bp, Oryza sativa
ttgtacacgttgttgttttcttcttcttttttactttcaaccagtaatattgtaatcataatccgtattcagattgaatctaagtactgtacttaattaaccaagacgatccgtaatgcttctaggacggaaatgcatgcgtgatgtgatcgagtacatgtcctgctcctggccatgtttgtactaacactaatcacagtgtttgtatagtttttacactatatctgtactgggaaggaacaataatatcagacacatttgtgaatgattgtgttgtgttatatcatcaacaggccaattgcatttgttgcagtagattgtaattgtagttgagcaaaattaaatactaactagcagatcgagctcctctcacagtttcacaactgcacggggccaggcatttcatacatgtctatattttacacaagtctttaccaaaacaggaatactcctggattttgctgtacatgtctttaccaaaacagagtactctcctagattatattgtacaagtctttaccaaaacagagtactcctagattatattgtacaaaagtcttgtccttgttgcttgaagtacatgtacatttttttcagcataatttttatcctgatgtattgatcaaaattaggcttgaaattaaatttgtgatgtgattggtgacaccacatatactatagttacttgctatattttagaatagatgtagtagcataattttacaatcttgtagaattgtttgtgacttgtgaggtcctcataggaatatctaaaacctctcattttgcatttaagagcgtcaccaacagatatccaacactcctccctttgagaatctctaaagagaatttgagcattaacttcctaaataaaaaggtggctacttgaaaaacatagtttctcacccctcctacgtggttgtgcgcccttccttacacgatatcccgagcaaagactctgggagcgagagcgctcccacatatgtcgatagtaagaactcttggtgaattcaatttttgattaaattgcctctatagactataaatgcatgtcggattcaactttatatatatatatatatatatatatgacactcatatggggcaccatggtttcaaatgcacaaaatcacttaaatttttcaaaattttcaaattgtgagtatatacctagttataagaattcgattcatacctatacctatcaaccaaacaactcaaatttaactttatttcacaatccatgattacatacctaactaattatatgtatggatgctatatacctagaatcaaaatctaacaaaaacaagttcaaattcagttcaaatttgctttcaactagttagtaaagtagttaatattaatacctaaataattgaaaaagtttcatgctcatttgaattgggtatatactcaatttcaacaatggtgcccgggcaccatggagcaccaaacaaatttactatatatatatatatatatatatatatatatatatatatatatatatatatatatatatatatacccaatttgaatgagtatgaaatttttttaaatgtttagatatgaacattaacttttttactaacaagtttgaactgagtttgaacttttctttgttagattttggttctaggtatataacatccaaacatataattcgttaggtatgtaataatgaattgtgaaataaagttgagtttgagttgttttgttgttaggtatttgtatgaatcaaattcatacctaggtatatactcacaatttgaaaatttttaaaaatttgagagaatttgtgtgttttataccttagagcccgagcaccatggagtcccatatatatatataatttctggaaattccataacttcagtagtactcccttcgtctcaaaatataagggattttagatgcatatgacactttctaatacaatgaatttaaacatagagccagtccaaattcatagtactaggaaatgtctcatacatttaaaatcttttatattttagtacggagggagtacttgtagtgtagacccaaacatggaaagccatcgttttcagtttgcatgcattgctactctgtttgatttcttggttacgctgaactatagtgtacagagtgtactcctgtcatttacttaccacacagtaatctcagcagcacgaatttcggatctgatctctactcgagttcgttagtactatgagtcttcagacagtacgtgttgtacacacaactagatacaaacagagagtagctgctcgtcagccaaaacgccctaattagcagagtacagtagtatctttttttttcttttcattttggcgctagagatgatcaaacaacgttctgtacagtacatgttcagcagtgaatgattttaggtggagttttgtgcttgtctttgatgtacatctacacttcaaatgactatttatgggtcattcgtgtggttaattggattgctagtagcgaatgcgtactgcatgtgtactgacaatagaatttgttacttgttagccccttttattggatcatcagctatcatgtacattttgccgattccgtttatctgtgtgtcataactaaccttggttgctctgtgatctagttcagctatatgtgctcgtaagataatcaccgggttatttaattggacaatcatcatcgctcaattagacaatatcacctgtttttttattataagacattttgtttcattaggataagattttagctatcattcgctttattaataattagttatgtgacatggaagcataattagtaagcatttttttaataagaatcttttctattaaaatagcgtaatagagaaattgtttgttaaagtattatcctcgtaaaataaaatatgtatatgaattccatttagaaaaacgtcaaggccttattaaaaagaacaccacacactaattatatacttgagctacatagtcatctcctatgttataaaatatacttaagctacatagccctctaacttactattgtctaactttgagggactgatatgtggacctacatgtcagtgacccacgttagagggcagtactttagatgagccctttcccaaccaaccatatacgatctcgaggtttctcatatactctctccgtcccaaaaagaaccaatttctcgctatgaatctggacaagatcatagccaggaattggttctttttgggacggagagagtacaatctaggtataaaatactccctctatcctaaaaaaacccaatcctacgtttgaatatgtatgtccaaattcaaacccaagattagtttttttttggagggggtatgtgtcaatcctgttataaaagcaccaacttattttgtctctcgttatttgcttgttagcttatcaattccaactcaaatttaattttattaagttgattttgagtcttttttttattgtagtctattttctagccttgccctttttctattgtaaccaccaaggtttaacggaaaaaaaattgtttttggttgcttttttttcgacttatttgtagttctaccatcatagccaaaggtaaatttagcaagggtttcgccaatttaccttttaattttttaaactgttgaacatataggggtgggcagaaaaagaccgaaccgaaaaattcaatcactaggccagtcaggtgttgaaagattgaattttattcggtcaattcggttagtactcgatcaacaacccaattaaaccgaattttgacccaattttagccttcagtatgctttgatttgatccatgatagtcaagagtctattttgtgtttatatttttttatctagaaattaagacttcgcttgattattttggaccttctaaaatttcggtcatgatttagacaaagaccgaatttcttggtgtccaagaccgatcgatctctaattttaaatgaccaaaatttctaaataacagatcgagactgaatttttcggtcggattaaacgcccaccctataaacatatcggacgaagcttcatgtaacgttacaaataccataaaaaatgactaaatttagcatgtagtactacctaggtataactcgctaaaagtattttataaccgtgtccaaaatcccaaacacggaagatgatcctctgatgttacccttcaacgtgactgatatgtgagctccaccactctcggacccacatgtcagccaccaaaccatttgaaagttacgtcacaggagcacatccacaccgaacgtgtttacacggccgagccttttgggcaacccttcgcgcgagagccgcaaggggcttgtcccgtgtcctcccagcctccaatctcagccgcccatccatccgatcggacggcctccactaccgtgaccgtgccctcttcctgcgcccccctccctccattcccgccccggctgtcccaatttcggcgtaccgtcgcgtcgcgtcgcgctttcccaaactgcccctctccctcctgtctccctccccagtacaaagcgcggcctcggcggcagcagcacagcgcgcagcgtctctctctctcgctctcgctatctatctctgtccttgtcactgtccgtccttgactcgctagcccaagaagaagaccaaccggagaggggaggggaggggaggcggagagatggctccgagctcgtcgtcctgccacgacgcggccgcgtcgatgctgctctgcgccgaggacaacagcagcatcctgtggctggaggatgaggagggggaggtgggggagaggaggagcggcggttgccggtcgatggtcggggacctcgccgccggcggcggcggcggcagcggcgggggtggagtggaggaggaggaggacatgttcccgcggcagtcggaggagtgcgtggcgagcttggtggagagggagcaggcgcacatgccgagggcggactacggcgagcggctccgcggcggcggcggcgacgtggatctccgcgtccgcagcgaggccatcggctggatttgggaggtgcattctttgatcgatctggcacaggatgcgccattgcctgaaagaaagaaaaaaaaaggaatgatttttgcgctgttttctttggtctttctgagtaaatgcaatagatctgccatgattagctccgttcatttaggggggaaaaacgtgtcttttttacttcgtttctggatggattcaaaaccattcctgcaacttgttttctcggccagttttcactaatctgcagctagcgttcgtccacgggcgtaaatgcaatgcatattatgcactgaagagttttttttttcactgtgtttcgagtaataaacattgtttgtcgtagtgcgataaatgtgacgatgacaaaagcaaattggggttaaattttgggaccatacatctcggacgaagctggcctttcatccgttcgcttactcacgagatgtcgatgtgcattgtctgattctagtttgtactactacaacgtttgcaatgatggggcggcattttttcggagccaaaaaaaaaaacttctgataaaagcatagaagataattgctgtggagttcttgtcctgaaaaatttgtttcttttaccatgtgatctctaacttattgtgttttttatctttctacaggtttacacttactacaacttcagctctgtcactgcctatctggctgtaaactacctggaccgtttcctgtctcagtacgagctgccggtaagaatcaaaaagattgtgtttgtaatcatctcaagatgtggccaatgctgtccatgttcatacaagtactagatgatgagctaagattcatgcttgcaaatacaggaaggcagggattggatgacacagttgctctcggttgcgtgcttgtctatcgccgccaagatggaggagaccgtcgtcccgcaatgtttggatcttcaggtcagcatcaaaccgtgacaagcatctcagatttcgcaatgcgttgcgtttttgtttgatattgttctaagcgttgttcttgttgttgatcagattggggaaccacggtttttgttcgaggtggagacgatccatagaatggagcttcttgttctcaccaacctcaattggaggatgcaagccgtgactccattctcctacatcgactacttcctacgaaagctcaacagcggcaatgccgcgccgagaagctggctcctgaggtcgtcggagctcatcttgcgcatagcagcaggtgtgccatgataggaagctgctgaacatggtttcattcagtgacatcctatagatcagaccataattcagcattctcagcatagtctgacgatgcatgttaaacttgtcaggaactggattcctagagtttagaccctcggagatcgctgcagcggtggctgccacagtggccggagaagccaccggcgtggtagaagaagacatcgcagaggctttcacccatgtagataaggtacagattgatgcaaaccctcacgtaaactcatcctcatagactcttactagctcgtttaattctgaataactcatgtgtactaccaatttggatccatcacattcataactgaattataataactcataatttgcaaccggtactttcgtagaacacagtaccggttcagaatgcgtgaaacgcatttatgggcgtgtgagctcggggagttaatgtgctgttcggcttttgccgctgtgtgtctgcaggggagggtgttgcaatgccaggaagcgattcaggatcatcactactccatggccaccattaacactgtgcaacctaaacctgcaagcaccaggagaggctcagcctcagcctcctcctcctctgtgcctgagagccctgttgcggtgctggatgctggctgcctcagctacaaaagtgatgatactgatgcagcaactattgcctcacatggaggaggaagaaggaagagttgctttgatagctccccggtcactagcaagaagaggaggaagcttagcaggtgactgaccagtcaaagtgccaaatgatagatcactctctctgtagtctgtacaccactcatctcgacaaaggcaaagtcaattggtttcgattgcaacgactgttagaaagaaagaacactggaagggggccaaaagggagggaattttgacatgacgagagagagctagctagcaagaagttgctgatgaataaagaggtgaggttgacaacacctaattgctaagcttttgcaagccagcaagccatggtgatgagaggtgcccccaaagaacaaagaaaagctttgtagcaacataaaagcttgatgagtttcaaaaaaaaaagaagaaaaaaaacataaaagctacatgagatgatcaagacaaaggatggtgaggggctttaggcaacaagtccaagaactaggcatgcactgacctggctgtgtagtattcttttgttcactagctctagttgcattagttgcagtattgttttcttttttccatttcatttgtaaggagaaaattagaggcggcagcactcctttttgtgatcagcaatgatgatcatccacatgaataaaataacatggtgtaaccagaaaagaaaattaacaagacccagaaaaagaggaaatgggtttctttcagtatattgctctgcctgcctatctctatattgtttgactgcttgtctgctttaagagcaggtataatagtaggctataagccagctgtaaatatattttaaggagataaataaggagagagaaggatagcgggctataaatttgtagccagctgtagcacgaactgtaagacgtagtatgtgtatgacaggcggggccaggtatcaatagtgtagtatgtaactattgtacgaatgaactattagattggctatagatgaattggagctagtagtaggctatactattaaactattaaacttgctctaagaccatgagcaccgcattccctaggaaataaaagaaggggaccttgtgacctgtcagcacgaaccttgggaagacaaacttaacaataccatgcggtttcagcgttgagcatctgtctctttgttcgaattagtaggtgcttctgttagtattttactccttaatttaagggctaaatgctcaatcatctaaaaagaacagttacatagggctgtcaagagtatgaatggtcccatgccgagttgggttggatacttggatcctatcataaagaggtccaatttgttacgtaaaaaagaatccatcgagggagatgaaaataggacaatttagaatttttcttcaaaattgaaaataatatttcagtaattttgttctctagtcatcgagggtgattggcggcggcgctcgaggacttgcggtaactagcgtgcctcaccgtggtgaatgatgacgacaaatgaggaatgtgattgagcaaggaaaactcctagccttgtttcactgtatgctacgaattcatagatttaccaacacccggtagtatagaaacacagttttaatccttttaactataatatagttaagtgagaggacacattaatctaaacctttatatcacttatactataagtatactagtatattgtagcgtaaaagttcttaaatattactccctccaacctaaagtatggctgtctctaacattacactgtcattaatcttttataatatattattaacaaatacaaaattaatatcatataaaaatacttccaaatgtgaatataatgatacaatatacataacaatagaaatacatttattggggttgtttggctgcactgtaaaaatgttgcattgcagtcagctgccgcttgacatgactgtggcgcagccaaacaacccacttgttactgacttgctagttaaagactacaagtgttgttttttcttaaaattactgaaaccttatgatatgggatagagggaatatgagaatggaatataactcaatttataaagaaaattctagcactagcactttataagaagcaattcattccccacaaaaatgagaaagagcccttagtttttatttttggctgcaaattgcagtgatgaactctcaccggattggaaatttcactgctcattcaaactagaagaccaaagactttttggctttgtgcccaacagtggaggctgaagatgtaaagttgtaaaccatttccattatctaaaattaaaattcaaacttggagacttaagaaaattggaatgatattgtaagctagtcactttaaatatatccttacacattctcttataatctactacatgtgaaattccttacattttaaaacggtacatttgcattctcacaaagtgtatataatgccagatcgatattcatacaagtgcattatcaccaatgagtgacatactggcatcaggtattagtatctcgggaaaaaaaatgattgtctataattcagttgttggcacttgaaattaggaaaagtttaccatatgaaagtttgtgctagtgagtagggactatctctatgtaatcatcatgccatttggcccatttctccggcagcatttcaagggaaaaatggatctcgtcaagctcttgggcagagatctagtacgttgtctacgcaaatcctatcatcagtagcagtgatgttatgatgtgtattagggcattggaccacagggtttaggcgtctacggagattatcctaagcgagagtctccatcatatctagtactactcaacgctgtcacatacacatttataatccttgtctcctttcatggccgttctatatgtgatcttgatctctgcacattacctaacattacgctcaagtataaatctacttatctacatatacccgtcagtgtacacaacgtctcttggcacgcagaaaggttaagaacaagaattccatttgattaaatttgcgtatgccacaccgttaaattatcacccgagatgtgagctcttcgatgttttaagtaaagtttattaaactcatcacgtttcgaggaatcgaccagtggcacagcaagaggcagcaggcgcgtacgtacaaagggaaagcctggaagtaactggtaagctcgcagtcgcagtggctgtcactcacagcgcgcggcaaaagctggaacggtacgtgcaaaagaccagctgatcaccgatcgctgagattattaacttttaacaggcgtgtgcacccgctaaagacgccgtcttttttactagtttttcgccgacggcgccgtgcagcgctgcatcaaaccaaccgtaactaatctcctctccctgaggagcatagttaaccatatcttggtatatcgctggggcgatgatgaacgtgtagcgacgcgggcggcagagatcgatggaatcgcgggtgtggaggcgaggcgaagcagctcatcgcgtgtgcgttccaggcacggtgctgactatctagctacggagttggtggagctcacgatgcgaggcggtcgactgcgtcgtcagactggtgtcgtgttacatacttacatgtttgggcaaaatgtgcacgcaggatggtgaatcttgtgagttgggacctgttggaggaagcttggggatttcttttatggttagcctgcttggattgcatttttgtgggatgcaacttgcgaagatacatgaccgatataacgtaattttagcataaaagacttttatcctctccagacaaagaaacccctccatttataatattatctttatctatatactacttaaaacattgatagtgtttttgtctaccataaatccaacaatcatgaccctttatccaatagatctaatggccagattcctacccctcgccttctgcctccacccctgcttcccgaatcgaactcggagttgatgagcaggactgatcggctccttcccctcgcctttcacctccgccctcgctttcgagtcggagtcagagttgatgagtaggatagatccaacagccatatccctactcctcagttgcccctcaaccttccgtctccacccccgcatctcgagtcggagtcggagttgatgagcaggaaggaagccatgttgaacatggagaaaaagaaaaaggaagagattgatcggttgatttcttaggctgaggtgatttggacgcaacgagcaggggtgcgacacatggccgaggtgcagcaacgtatggcggcaagagagcttttggtcggcgttggctgctttgtgaggaggcggtggaggggaggtccaacggcggtttcctatcttatcgatgttgtatctttacaatgataagctacctaatatgattgccattattgttaaaaaaaacatgagataacatgtagtttaatatgtttgccttcacccgttacaacagactggcattcttgctagtaacggtataaaaaaaagtaagtggtggacagtgaatctgtcgtacgtcccaattaacctcttagcttttggaaggtagaaaaataataggtgtggagccaaatggctcgtctataggttggaatgtagaaattaatatgtgagaaaaaagtaatggcgaaaacatattgagaacaatgttttatcattaaagttagtttaaggatgacttataattttttttcatatttacactaaaattttgaataaaacatataatgaaatgtaatgtccaaagttgtaataaaaaaggtgataaagaagagggcctcggtgttgaaataaattagttttgccggtttgacgtattttggaaataatttttataatgggacctagcaaaaacattttgtgtaaatcgatccttaataatggagtattgtgatcacagttagataccaattaatttaacgtcttgtaaattgatacgtacgatagtgcttgggcagatggcagatcagtagtgggacatggagaaaggggccattgagacgccgccaccgcaactaaagccaaggtcaggatagagtggtgggttgaatctgtagcgagagcaaacgcacaacgatacattaggagacagagggtgcataaatagatcagcggcaacatccgtcgaagacaaggaagaaggtaacattggggcaccgaaggcaagttcgatggcaatggacatggtagagaggaggtcaacaagggcggggtagtccagtgggctttctcaacatcaaaggtgacaccagcgaggcagatggatatatataacgtgttaggaagggaaatgggaggcaacggtacaatactagctagatcaagagggcgaaacaatatgtgttgggttgacgatatagaggagactaatatagtagtaagtccagacctagtttggacggttggattaaattttatcaaaaaaaatctcatgttacatttaatcgagttacatatcccggtgattttttgacagtctttaaatagattgcgtattgtgttgtccacgtgtaacaaatgcttcgaagagtaagttttctagcaaatcagttgtaaaaaatacccgttgaaattgttgtgtagggaattattaacatacgttaattaccccataattggctgcacaagtgggtaaagctaagctgcagcagagctcatcgagcgttctgctctgcaaactcggtccggccaatcaaaggaacttgcccgagccatcatgacggcctgcaaaaaaggaagatacaaaaacacagagaattttcgcacgggggccggctctcgagggcatcgagaattgcggggcgtccctgacgaggcgaacgccggttgaagcgatcggttcctttcgccgggacaccgccatggccaaggccaacaaacacacacggccagggtcgtgccgtgcaatgatcatcccgatcgatcgatcgatttctacggctttgcgagctcgttggcgagatgattttaccggtggaccagatctcctagcccagccaaaaagattgggcatggaggtagtaagctataccagctagtgccggaaagattcgagcaacgcgtgcacgcgcgcccgtggagacttccgcctctctctctctctctctctctcgtgcgtggagagaccgagacggggagagtatgtgtgtgtggctatcgtggtgtcagggtgcgtgccacattggatgctcggttttgttcaaggggaccaaccgaaatatactgcatggggatgcatcattgcaccactcaccacacacagcaaggtgcacatagtggtggtgcgcttattagagtacccgcaatggtaaagtgctatctataaaacatatacatctcagcaatagattagattaatagtaaaccacttcaatggtatgtctatatgggtatctatagctctctaattcattgccttgtttttctctatagactatctccaggttagtagatagctttgctctctctcttcatttaatctcttccaagtaggaaaatatgctgacatggatctcttgtagagagcctatagataaccattacgggtgcccttactcttgtagtagcagtagctacctatcctatatactccattcttggaggcttggagcagctagagcactagcgagacagaacggtgtgttttcgctggaaagaaagagagagcaaaagccgtgccaaagctaaccgttcgtttatagtactacgagtctgtgacaacgtgagccccaacattcacaacagaacaaaatcacacgctatcagctgatctctttcacagcaacacaacaacaaaaccctgttggatcttacgggtgacaaggtttttacaacaagcatttgtcaccatgcctctgcatggggcccagggacgtgcagggcagctagcctgtgttgtgtgtgtgtgttcgcctgagaccaaacatccccagcctgcaaggctggcgcacggctgcaattggattgctcgcgttgcagagcggcacagcttcgcgttcctctgccaagcgaagcgcgcgtgcgcgcgcgcggagtgtacgcagcgagacgaagtccccaaatcacaagtcggctctgggccaaacacgtcttgggccaaaaaacagacatgcttgcccatagatacgccgtacgcgttcacgagatccacctaggcttatatgggccttaagcccacaagcccacatcgacttgaagtccagaaaaaccatggccatccagaggacagtgaggcctagtgggagagaaggcagagagctacagtaaggactgacgcagcaacaatttgtggcaactagctcggcaaagcgaggagtgaggaccatacatatatacgtacatgacacagcaacatacccctgggacacacgtacatccgctcctttatactaccagcgtgcacatgtataccgacgactatagctagccaactgtggccaccatatctccgaatcaaactgaacagggcgcgagcatcgtcctcctacgtcggatagcagtgtagcgccactgtgctcacgtatgcacgctgcacaagctttgattttgctcgtggattcgtgcccggtagtactagaagacagttgttacagtagctatatagctacatcccgatcgataagctgttttacagcgtactgtacttgcgcacgatgctgtgtgcagtgcaaataatactgttcctgctgctgctgtactgcagataccctaatttggcatcggtcagccatccagccaggctcagggggctcaggctatcctgcacgcataaatccggcgacatggcatgagatctctaggagggcaggcatcacccatcacccgacatggcatcgctgcgacgcgctgcacagtgtcgcggcgccggggcgtgagccgtgagcggcgtcttcgacgacgacgagctagcgcgcggccggcgatcagcgtgcatgttaggcttagctaaaggccgtcctcgttttgtccctttcacgcgtagtactacgtacgtttacacaaccccctgcgacgatacgtccaagacggctttaaagcgcgagagagctagctaggtcctctagtaagcgtgaggcctgcgaaactctcgtcagtttttacggatagatagatcgatggatggatggatcatggatagctcgatcttttgctgagctgctgctccaacgtttgactacgagctcggccatgccgctgtctccatcaggtgtggtggacctacctgcaggtgatacacagcatctgatcccatgcatgtccaccaagtaaaggaggcgcctgctcgctgcatatgatcaccggcttgccatgcactgttacccgtctctgtctgagagagagagagagagagagagtaggaggaaaaggttgtgcaatggggatcatatctttagcaacaaccggtccacagtacaagtgcgtgcatgcagacagccgaggcatttggaaccttactgccgctgcggtcagcgagacagcgagcgagctgcatgcccatggatgatggatcaagttgatgtcgtggtggtgtctctttagctagggctttagcttggctagctagctagctactactacaccttttgggggtcgactcttcttcctcctacactttgctcgctttccatcaagtcgtcgaaccggaccgaacatgtgcaacccctactcccatgtcgactactgctctcttccgtttcaaaatatagtaatcttagtatgtgattacacatgtgctaattctacaaacttgatcaatttcatagtaacgaaaactatgttttatttcatactatatatgttgctgtatttttttttttaaaggatggaaggaatacatgctttgcggtgttgcggtaggcgatcgatcggcgctgctgctgcggctttgctggctccggagtccggacggaccgccggttcggcccagaaaccacaagttgggtccatgctcttttgccgctggtgaaagggctggctctgcattttgtcgcatcctagtgaagtaaaggctctccctcgatcgcctctcccgagaactacgacaacaaggctgtgcttatcctgctctccagctttgtatgtgtagttgtgtactatagcaatgaagggaaaaaaaaactgcacctcattactgtgttctgctgttaacccaaagtacaggaatggaaatttggattatcgttccagattaattgggcaacttggttttgagcaccattgcaagtttgcaaccagcaatcagtgcaacaatctctagtgatcacgggagccttagcagcttcagatagtaatctccctaaaaaaaaaatccaaattctaaccaaaattttatgggtttgttcattttgaaccttttctaaccaaaatttgataagataacaatctaaacaaaatattaccaatccaactctaccaaaatttgataattccaaaactttctactctcaaaacttctaccaagagttgaaaaggcttccaaccaaaccttaccttatcatactaaaatttgacaatgataacatttggcattaccaatagttgataaggtctctttttttttggcaaagaagcgaattatccccaagacacgcagctacaatatcaagaagataaattagtagcaaaaaatgggatgactctatagctagatatgcatatgggaatatgtgcccgaaaatgaccgtggggcaataactgggaatgaccgtatcttaacgcctcctcacactctttaaagccagcgaatctcgtctcggtcaggtacggtaccaattgaacaagttgatgatcgcttgcttccactgaatgtacagtactaagttgcagcattgaggatcacatgtattgcagcattgaggatcacatgatgtatacggcatctgtacgccgtgttgatgaatgggctcatggttaaatggcctcgacggacgtgaccggaccggccggccggatgcccggaagcattcagcgtcaacatgccgacgttagccttacagggttacagcacacgacggtgcaaggacatgcctggcaatctagcatttcacattttcactagagtgttggcacggtcacctagcttgcgacctgcttgccagtacatgagtaattgctaactacaccgagtacaagattactactgctccagctcgtgatcattcctggtacaattcgaaaaattcccccaaagggtcacagctgtattacatttgaaaattttgtcaagggttaagtccaactttaactcatggaatttgcccaaagtccatttctatctcacccaaaaccaaactacaaaaccgtttgtttttcacccacaaacccaaaaaagtcaggtaaatggtttttcactaatatgaacatacgaatgcttgcgtaataaaagtacgaactagctagaaaaacaacttacatttaaaacaaaacaaataaaaagtactagtaagttccaggatgtacttcggtttgcaacattagtcatcttttgaagagttcataatgaaaataatcaggttgtagttaagataaaagatgaacttcgaataaacttcaaggtccataaatggattctacccattttgtaagtggatgcatcatcattttagaaaatatcatgaaatgaacaaaatgaagattgttgtacaaccaggaagtttttctccggtccctcaatattttcaagaatcaaggaaaaaacatattgaccttttgtttttccttcaattgaactggagtacaaaacaaaatgggagcggaaaatatgcccctctcctaattaacgaacaccaaaaatctgtccgacttctagaccacatacataattgcatgtgtaattcctgcatgtataatatttttcccatcctgattagtgctacgagctatatatacatcttgattcctccccaaaggccataaagaactcagaacgtatatatgttcacgagactcaaatatttagatcattcgggagattaacacccaccgccaacgcacataatcccccaagcaatataccctccaactcaaaaagaattatccatgtgcatagccaaaaaccaaagtttcttttttagacgaaggtagtgcataatagggaaactatcatgaactctcgaggggatgccccctcaaatagttatgaaaaaaaattaagatgtattagcatgtgatatatcactccataaacatacaacttagattttaactttatatttcgcaacaaaaaaacaaattaaactacagctagttaacgtatattgacagtcaaatttgtttttttcgttgcgacatgtaaaaaataaattttaagttgcatgtttgcaaagtgatatatatatatatatatatatatatatatatatatatatatatatatatatatatatatatatatatatatatatatatatatcacatgttaatatatttctcaattttttcaaaatttttcataataatttaagtaacatgcaagcaacgaaaagacatcccctcgagagtttaaaatcaactcctgtgcacgtaacaatccaatgggacagaacaatgccaactgggcatgtcctgctccgccgatatcctcttgaccctaatctgttcaaatttccctaccatgaaactgaaatatagcctaaatttttagtacaggtcaactgtagacacaacttccctttcgccatatagctaaggattacatatgcatgcacacagttcaggcgtcgaacccagtggcgcaaccagtggacatgtgagagcggccgcgctcagacagcaaacttccaactccaaccgccatccgaaacccaaccagatttcttcccaattaaatccccctccctcctctactcgatcgctctacacgaccgatcgatcgatcgatcgagagcctgacccacgcgtcgtaccggaccaggatgttggattccattaatgccagcagctatagcccaagtagcttagctagccatacaccgccgtcggccagcttggcgagaccgcgacgttcgcgcgccgcgcggcaccggccgggagggggggggggggggcgagcgcgacggggacccgcggccgcgcgcggcacggcgccgtggtccacgtacgccgatctacctagctcgtgcagtgcggactacgcatgcagcgcccactaccaccttgccgcgcaacaccagcatttctctctcgcctcgtctcgtctcgtctcggctcggggtcggggtcggggtcggggtgtgcagtagaaaacaaaactttgcaccattcagattctgctagcgcacgcctcgccaccaccaggccgcgcgcgcgcggccgtgtctacagtctcgaagtggccatcaaggatggcttcaataatggcgggggcgggcaaaagtacaacacgggggggggggggggggg

SEQ ID NO: 5162 - DNA, 30943 bp, Oryza sativa
ggggggagaggagagcgcgacggggaaaaggggaggctcttcgcttttctctcccccccttctgcgctgcgctgccactgcacgcagtgcaccagcctagctagctcaaggccgcagcagctaatcctatccacgctctcgatcacgcgccacgccagcctttcgcacggcgcgcgccgccgctgtcgacgacgacggcgaaggcaatgcgcgcgggccggtgaaaagcaagaaagtggccggacggacggccaaaagagagatcaccggagttgttttttttttctccctctccccgtctttctctcccccggcctttccttcaaaagataaaggagaggcagcttgcaaggctggctcccggcccccggccccggcacggccgtctccttcctttccggccgtggagcctaccattttaccttgcgagccgcgccattggcggatgccatgatgctctcaattcctatccctctcgccaagcataccgcatggtgatcatggccaggacataaatgtgcatgctagcctgcgagctagtagacgggaggagctcgtcgtgatcatcaatggcgtatcacgaattcgatcgcaatgaatgcaacggcctcgtttaataaaagcagaaaggtggatcgatgttgccacgaagtaaatggcatgagcagaaatgcacattgctgcaagcaagcaaagagagtagcaagacaacaagcagtagtgtagagtaaaagagaggacgaggcttcattgaattcacataggctaaattctaaaaagtccccggccattgctatagcttctgcaagctctgcgtcctaacacatgggcagcaatgcggcatcactgctcgcgagatgtggaagacgagtaaatgcagcggatacagtgagatcgagaactcggaagaaaaatgcagcgaacatggtagctagagaaattggaatttcagagtagacaggtgaagcggacggatcatggacaagttggtgcccaggtctggaaattggaagcgagggagatcgatgtgaatgcaacagtgttgcagctcatatagttgcagccgacctttctgaatctttatctgccctagttgttagctagacgaactacaagtgctactgatgatgaagtgccaagcacaagaaatataggggaaaagaaatgatgaaacaaacaaaccgtgcagcaacccaaatccccaggaaggaaatttcaattgcaacacaaaagtactacattcccaagatctaaatcgatcggcaaatcgccatccatgtcctcttccttcccaacaccaaacgtcgtcgtcatcatctactaggaaacaacaacgacggcaaccacaagcccaaagaacccaaccacaatggaataaaataacgaaaaagaaacaaggaaggatgcaaaagcagcagcagcagcaaccaccacctcccctaaaaccaacaagaacagcttgctcgctacgaacctagctaagcttctactcaggtgaggtaaaagaaggcaaagaaaaaggctaattagccgcgggtaaggaggtagtagaagtagatggagatggtgatgcatgcagttgcagttgcagtgcaggtacctagcaccgggaggagatgagctgagctgagcttgcttggcttagcttagctatggcgccttcttgcccagggtgtgcttgttgttgtgcatccaaaccttgaggacatggcgcttgacgcagacctcctcgcagaactgctgcacggcggcctcgtcgtgcttctggatgcgccacccgagccgctccgcgaaggcgagcatcttgtccttctgctcctgcgtgaactttgtgcggaaccgcttcttgccggagccggagccggaggggccggcggagccgagggacatgccgaccatggggccaatcaccatggggccgaccatcccggacatgtcgtcgccctcgtcgcgtcccgagtgggaggtggacggcagcgcgaggggccgctgcgggtagccgcccgctgcggcggcggccgcggccgccgccgcggccgccatctggtgctgctggtggtggaggtaccctgccggggtgcggtagtagggggagaactggtggtgcggcgaggcgccgtaggccgagatggcggcggggacacggcggaaggctcggccggcccgacgcccgtgggggactccgactccttgcggtggaagttacggtggcagccgcaggcggcgcagcggagcgcgtcgatggagccctcctcgccggaagccatgaactcgccgcagccgtccacggcgtgcccgccgatgccgacggcgtggttcttgaggcactcccgatacctcgcccctcctcctccaccaccaccaccaccaccaccgccgccgccgactccacctcccggcttgggcaccccgccaccgccacctccaagcccgggctgcatcggcgcgtcgtagcccgagctcagaggcatcggaggcatctcctcgtcgccgtcaccctcgtcatggtcgtcgaaatccatggccgccgaccgaccgaccggccggccaccccctttcttttccctcccttttggatttctcgggtgtgttcttggcgagcttaagaaaagcttagggagtaatagaggaaggagacgaggctatgagcaagtataggggagtgtgaaactgtggacacacacctgctaattttgacgcgccgctgcaagcagcagctgctgctgttgctgctgtacccttcagctagtaggagtagctagctagatgatgcaataaactctctctcactcactagtgagagtgttactagtagtacttgtctggggcgcacctgtcgcgccggggcaatgacggggcggtgtgtgagtgaagtgtatctctgttgtctcgcgatgtacagtagtatgtagtaagtacacgtctccgctcggcggcatccgtgtgatgttgtatgctactggaagtgggtttggctccaactcgttttaaaaatgggggtttagggctgtactaggagtgtttttcggttgattgtgacaggtgcttcgtgtttgaaactcgttatccccatcataacaaagtagattttgtgttggactaacgcatgatttggagtttgaaggtacggtagtagtaccgtgtttttagccccatgttggaaacgggcgtgatgtgtcctactgggatttttcgtaagagttcaatagtagtagtaacaattaataaccagtccattgtttcacaagatttccggatttcagacttcagagaagtcctccaattttgtttgcttctgcaatctttatatggctttctaaggagcaaccacacgctccgtccatcccaaaatatagtaatttgggagtggatagttcaatgaatctagacaagaggttgtgcagatttattggactaggatatgtcacatccagtcctaggttgttatattttgggacggaggtagtacgtattttgctagtacgttgtaatgacttatatacaactagtatggtggtccgcacaaattgcgcggctaacatcattatattttctcttatataacagcatatgtgttttctcattatattattcaaatatattaaaatgacaacataattttaaattttgcaataactttacaaaactactaatgtgtaatattcatatatattttatatacgtgttagttattaattatttttaatatcaaattttagttatttgtaaattatatatattcctatatggactctagactcgtcttttcatatttctttttttaatttcgaattttctgtaaattgtatttctatatacactctatgttcttcttccaatattatttatttttatttctgaatttttattatttctaattgtatttctatgtggactctaaactcatttttcaatattctttaatttttaatttcgaatttctgttacttctaaattgtattcctatatttgtattcctatattaaccttaaactcttcttcccatgtttttcttaattttgaatttttttattgtaaattgtatttttatacggactctaaactctacttttaattttattatatttattctaaattttagttagttttaaattcctatatggactctatactctatttctaatattccttattttttaattccgaatttctatttttttcttaattgtatttctatatggattctatactctacttctaatattctttatttttaattctgaatttctattattttctaattgtatttctatatggactctatactctacttctaatattccttatttttaattccaaatttaagttatttactaattatatttctatatagactctatactctacttctaatattccttatttttaattccgaatttaagttatttcctaattgtatttctatatggactctatactctacttctaatattcgttattttaatcctgaatttcagttatttcttaattgtatttctatatggactctagtctcctcttctaatattccttattttttaattccgaatttcagttatttcctaattgtatttctatatggactctagtctcctcgatcttctaatattccttattttttaattctgaatttcagctatttctaaattgtatttctatatggactctagtctcctcttctaatattccttatttttttaattccgaatttcagctatttctaaattgtatttttatatggactctgtcttctctttttctccgattaatgtgagaatttctaggccatgagagcgaacgtggaggcttatttttctattcctttaataatataatggatggatggatctttaagaagatatcaatatgtaccaagtacgagtagataatccttatatccatcgatggagcaaaggaaaaggaaaaaaattctaaagatgaatttgacaattttagttagaaattatatattttcaaaatttctagacagtatctcaaggttttacatggagatttttatgagaatgtcactcatttgaatatgtacgaggctaaaagatacagacccaattcaaatcaagttcgagtccacctcgtcatccatgagcagccgcaacaaaatcgccgcctggacctcattcggactcccttttttatgttctagatatgtacagaaagctaacgagaccacctttccaatggatttggtatcacgtcaaacatacttctaagtcaacggaaactatcgaaacaagagagcgtccaaaaactgtcgggatgttgtatcattgtctttaaacctattgagccgtgtatcatgttagagtccactagggatgtgtttaggggtcttaggtcggccctagaaccaatttaatcagtaaccatcatcgaattagagttgtgttttacttagattattctgtcactacagttttgttgctagtttggtttgtggaacccagagatatcttatcaacacagtatatttagattgaatcttccactcccttactagtgttagcgattcgtttgcaggagacgactttttcgatgaggccaacagaggggcagtgtagtgattgcgaggagttcggtcattctagtaatcagagcctctggatcatcaactttgagtctccatgatcaacctatctagtatctaatggaagattgggaccctagtcctcatcagtttttagccaaccctaaggctcaagcattgtctcaagcctggctctgcccctgattatatccaaacattttgttataaaaacaggtatgatcggcacccatggtttgaatctccaacaccattaatatgtgcattgatcatggctgcttttgaggtaaaccaccatgccaatttattgttgttggattctggatcatttggaactagtattttttagggcaatacgaaaataccatacctgcatatagcttttgataagggaaaaagttttgtcgcatatatattattagaggaggcctacaacaaagataaatgtatgtataggacaggcaaaaaccatgcctacaaaaggaggtaactaagtgagctctcccaaacagaggttttcggagtttgtacgcctccgctttatcgaagtcactggctctttttctttgatctttgctattatggtaggtagggatgctaccacgttgcagaaggctcacacattgcacttgcatcagacttcccataccacatgtagtaactccttgatgaagctctctctcatagcctgatcttctggtgaggggataactctcacttcaatcaaatgcgacgtagctatcaaccagagcaagttcaggatgtcatgcaatcgctacaccataaaacgatgtcgtaccaattgtgacacgcagttgatgatccctgcaatgcaaaggagagaacactgcaagaacatgataaatgcaattagatattgcgaataggtaattaagcacaaagaaatagctgcgattgaagtggtagatccaatcgacccggcaaatcaacacaccaattatttggagctttgagtctatagtcgttgactaatcaagtgaggactagagacaagacgaatgtcacctggcaaaattcaactaaataaaatccaattgttctagagggtgtatatagacatttataaaggaaaataaagctaggattaagtgctagttcatggaggtggagagaagcacttctaaaatgggcctaacctattgcaaggcccaaggcccaagttcggtttcaacaacaccactttattgttttgatgattcccattgacttcaaatgaatttggatatgaaaccatatgcgtttgacaggtgacaagataagttttccaacaagtctaagattatctaaatcggagttaacatgaatgtgctaggttcgtttaaagttagtgttgtctctggaggccgaactggacttggacttggaattgtcattggaacgtgtgaagttatgtgcgtatcctatgaagtgatgttctcgagagtttaaaacactttcccatcaagtatcattttaaatatatgaagacatatatatagttgccaattgtttcgacactagcaatcataataagaacataattattgtttaggttaaactaaatactttttttaacagccaacactagacggtgcaatgattcattaagtagaacagaaaaaattacaaagctagcaccctagaaggtagtagctaggaaaggaaagaaaaacaccaccaccacgcaccacgcaccgaaaacacatacacagaactcagcagaaagctagcaccgaacctgttgcacctatgccaacagagaagctacaaccgggccacccaaagctaaatcctaacagcgagcaccgtactcagctctatccatgcccttagggttcaaggagagaggatgagagagaagatggaaccgctctcctctacagggcccgtcaacatggccaacttgcattgactagggcgcctccgaaagaggacatcaatcaagaaagagcacgcacaacctgtcggagagaggttttggtagtgtctcctgggagaaaaggcgacgatgaacacccatatcgttgttcttcgaggcctcgaggagaatcaagacaaggttttcaccaggctgcctacctgagagagaggggcggctcgacaacgctcctaagagggaaaatgacatcgttgcttgcccggcaaggccaagctaggatttacacctgctgcctgcccctttaatgctccaatgctgcatcatcgaccatcctctatcggcatgtggtcaccgatgtacctgcacaaccccacaagtcagcctccccggcccccctgtcgtcggtgatgtcagcctcccgctccatcgagcgggccggcctccttgccatcgcccgaactaaccctcctggtgccacacacgccgcgccagcctccctgcgccgccaaagaaaactctagcctcccacatcaaagatacctgcaccgaggaggtgagttggatctggctctagatccggcggcgcccaatgcggatcctttggtgcccatcgtggccacggcctccgacctgtcgtctcgtgcttcacgctcggtctatatccctccgcttgtcgcctccgcctctgtttggttctggatctggtggcgcctggcgtggattcggcaacgctcaccgcagccatgacctccccaccaccaccgtctttggtctaccccaccacttgtcgtctcctccgcccccgcctccacctccgcctatcaccgccgtccatgcgtaggatccgtctggcgccgcctccgtctgcgcgccaaccccgacaccggcaccactccgatcgtcccccaccttcggatccgaccgcgttgtatctagggtggtcgccatctcgagccccgccgctgctatcctagcaagccgccggcaaagccggtgactctcttaggaggcggcaaggcagaggaggaggggaaggcgggtggcagcggcggctagcgtttctgccgcccgagtcgcccgagccggaggtgacacatgtatcacttatgttttatgacatccctttatttatcttaaaatacttcatatggagtcatttgttaaaataggagtttattaaggttctaaagaatactccatttgaatcccttatgcttacactaaatgattttttaggggcacaaaaattaatttacaaaagtttggatttctcatcaactgggcaacagcaccatccaacaaaatgcgaagctagagaagcaatgcgttgtcattcaactgctaatgcattgcagtattgcaccatcaatggccgcggttgaacatcgacccaggacggctgatgtgctgtgttttgggccgggattacaatcttcttttgtacaccctgaggttaactacatatacttagattccgtgaacatttgagtgtttttaattatgtacttgtaaactcactcgatcaccttctgtttttcttgctcaaacaccgtgccgtcctatatatatctgcctggcataaacgggacagcctcgtagctaattaagaattgccatccaaacatccaaaaccctcgatcaatctcgtaactaatccagctagccaacgtatactcgtacgagagagatactgtaaatctgaataatgatcctaactatacagatcttaattgttgttcagatcgataagcggtacaattacgtactctacttagagcaagtttaatagtatagccaactactagctccaattcatctatagtcaatctaatagctcattcatacaatagttacatactacactattaatacttggttccacctgtcatacacacactgcgtctcgtagtccgtgctacagctggctacaaatatttagcccgctgccattctctctcctcatttatcttcttaaaatatgtttacagctggcttatagcctgctattgtacgtgctcttaggtacacgtacatcaccgtttgctacgtacttacaaaaggaatctaggctgaacactttaattatcagtacatattttgatgatctgagatcgatcagagctgtacgtgttatggcgaattggcgatcactgttcatttgtaatggcctcacatgaaaatggcaaggtcacccggtacagtttgactaactagacgaggtacatacatacaggatgcatggcagtatagtaccgtatagtactacgtacgaattgaaagtctggtacatatatattgcgtacttcacgtaccgaagctgcaaatcttaattgagtgaagtgtgtacagtagggatcggatcgaccactagctagctagcagctcccacacgtactagctagtacgttttctttttattcgcatgatgaattaaaccgtgttaaaaatgtgatgtcgtagtaataacggatcgccaaattcttatatgtgtgaattgttttagccttttaggaatagattgatgagcacccaacctagacaaaacgtcgccggccggtcaaacagtttcatttggctgtcaggcaaactcggagttatatgttactcactttatcctaaaataattttatttttcacctaccttacatatatcaatacgtacaaaagcaaaatgactataataccatcactttatcaaattccaatgtaattatttctcattttatctactcttagtgcaattattttctactttcataaacttcgtcatgcgaaacaaaagatctattcactccatttcatattattataatttactttgactttttgctaaatcaaacttctataagtttgatcaagttcataaaaatgtaacaactcttataacaccaaattagtttcattaaatctaatattgaacatattttaatattatgttcgtttggtgttaaaactattgctatgtttttctataaatttgatcaaatataaaaatattaactaaaaaaagtcataagtctaataatataaattaaacgggggaatagtcattactacaacatttgagaaaaaaaaaagacgagaactagtgtccgatggaactatattaattagaaacacacgtataaataatctaggtaattagactgcaacatccataataatttgaaaagatgaaacattgttaaatccaaaataaaacaaacattaaattgccaacatctgtaagatgaaaataattaataaaatcacaaattaaagatgtcagacatattaaacgttgcattcccatccctgaaacttcatattccaactgctggaacatcaaataaattgtaaaagcattctaaatatgtccctttctcttgacgcctcataaatcggaatgtggaggacatcccattagttggctgcaacgtctcgttggctctagtgtagttgttatcggcttcgtccttcttgtacgtcatctccacttatggacatgagaaagcaatcctgatgatcagcttgcctatccgaatgtgtcgttttgcctttgaggttgaattgtcccaaaattgctaccaccgcaaaggtcaccacctccacgatgcttcacatgggcaacccctcacttatcctcatgcgcaccttcccatgaccgatcgatatccccaaatttgacgtctcaaagcttagcgtggccagatctaatagggagacgatgataatgaggtgtccaaaataggtgcacggaggggagggagggcgttggggtggggatgcacctagggaactccctggtggtggcaatggacacagtcagcgttgttggatgctagcaagcttactcgcaaccgggaggagcagtagagtatgagagtgagtggacgaattagaggagcgtcttattttctccttgggagttagccgcacaagcgaaagcatatcaatgtttttgaccctttcatttcatttctaaaatgtaggttgtttcatatttacgtacgatcataaagtatttgaggtggaggatgcaactaagctatttgagtgatctagccattaaatccaagaactgaaaccaatcaaatatattgccctactactctccttttcaccttcctgtatccctgctgccggccggcttgcacccgcagtcaggactagtcacatcctgcacatagatttatccacatggatttcttctatgtgattcttacctcactttgaattgttgtgtaggttgttgctgtgtattatctacttaactataaggataaattacatattttaatagaacttaacaaataacttaaaacacgtagtctaagaaatataagtagaagaaagttttccaagaaaatgtatttctttacacgtggaacaaataatttgtttcagcgatctggtaaataatctgcaacaaaaaatattatgaaaaaattgtccactcaaaaagtatttgccttatttatgcaattaatgaactatgatagaaattcttcataagttctaaacttaatttccaaaatactcataaaaagtaaatggtagatgtctttccacaacacttaaaataaacaaaagaccattagcacttaattagtacacacggaatttaaatgcttacatctgacaacaataaatataaatatacttgtatgcttggcttgtatagaatcatgtgatctcaaatgactagcaaatcatgtgacatgatcataaaacatgcatggtcagaaagagatctgatatacctaagaagttcatcagccacagaaataaaagatgagcaccacatagtgggatgggcttgggagagggcccataagccaccatggttaagtacttttgtaggatctaaaatagatttgggagtactatctttcgtaaagagtgtattatatactaccgatcatattgacatatgtatatcgcttaatactacctttattttaaaatttaatatatttgcctatgtagtacttggataggttcgtgtctaacctctttgggtcatctagtaagttatcctatttagaatatgtcaacgctaacacgatcacttcatggcaccacctatcacgacaatgtagaatttgatttgaagacaatcttttcattttccattttgcaaaaataaagcttttttttccaaaagtgtacacgtgacgtcctcgtaatgggtaactccaatatgtctcccttccttccatttggcgacattgggtacgtcatgtcgcggttttagtgagtgataacaactttgacaatgaagttggataagatggggttttttttactttgatgattcagtatattttttgtaaaaaatttcaccattggattatttattttataaaaaaatgaaggaaaatactttttttttaaaaaaagggaaaatcctgtgattactcgctattaccacaagaacacaaatcccatagtacattggtgttagccgaatacgaaacagatatcctaaattcttactgctccctccgtttctaaatatttgacgccgttgacttttttaaacatatttgaccgttcgccttattcaaaattttttatgaaatatgtaaaacaatatgtgtacataaaaatatatttaacaataaatcaaataataaaaaaattaataattatttaaattttttaaataagataaatgattaaatatgttaaaaaaatcaacgatgtcaaatacttagggaatgaacgagtactcattttctcctgtcgatagaactagtgaccactccacaagtgacggtggcccaccggccggacattcaccggcgcgtgtttgggtccaggaaagggagaaaagctctcgcgcctctcatttttggcgcgggagctgctgctgaatccgaatccgatcgaattgtgtgcgagtcgcatgggaccccatagccaaactgtacaaactatcgggtaatgtctgatttgtcttatcattgttactactacaatatagctagcacacagtgtgtgagagctatagagtggaaacagttacgagctagcaggccctcacttttactatgtgcgttgaagctaaacaggtattttatctgatctgccttggaaaaaaaagggattgtgtctgcctgtctggtctctgttcatacttgcaaaattgcaagctggtcaatatctcacattctatccatgcaataatctgtgtagaagtaggaattgccatcatctggtccataaattcatcccacacgaataagttattatattcttttgcctaaaaaaagtgaagttcaaaggataatctaattattttttttagataatagaatgaaagaatcccggcctttgctcaaaagagctgcagccaattattagagtctagcactctcgaagagtgacattcaaaataatctaattaataaaagagtgaagacatagacattcaaggtttaaaagatatggattccaagtttcagcgtggatggtgagtattcgctagggtttacaaaacatgtacggagtataaaacactttattttcaagctactcgagatcatagaccactcattagttaacttacgaagttcaacaaaattcaagctgattttaagtttatgcaagatttggacaaatttcactgttggtcaatgatttcatgaaaaccgaaaaaccacttgggagcgttttccaaggtagatcaattttgtgaacccagggatccaatttctcccaccaacaagtgagtacacatcgcaagttatatcaagggcaatgtatcttgcttaaacattcttactacctccgtcttaaaaaaacaattttcaagggttaatttggataacaatcagttcagtttcattctgacaaaagttaccttatctctaagtcaaagggtgcaggataaaatgaattactactaattcaagtagtacaatttatgtagtaaaattctcgtgtttctttttttaggggtaaattctcgtgtttcaaagaagccataaaagacatgaacaagattgggttacagtagtgtagtatagtagctaggatgcgtggcgcattttcattttgcagtacgcaatagttggctaccccctcaaggctcaagctatagtagtatcggcaacaagtcaacgaccaccatcaaaactcaaaaggacagtactgtgtcgtctgtgagcatatcatactgtatcctccacctacagtatgtctcaaaaaaaaaaaacgatcgatgacgatgtgacgatcctttctctccatggttcggtgcgtgcatggccagatcgatcagatggaccacacgatctccatccaccactacacacccgcgcgcgcacacgccacgccacaccacccagatcaccagcaggcggcgcacgcgcgcgacgcaagcagacacatggtgacctcggatgcgcgcatgcatgacgcgcgccgccgcctgatcggctgggcatatgtacgtacggcgccaccgcgccgtgtgctagctccggcaaaagatccggccgcgcctctgctgctgctgctgaggcgcatgataccgcatgcatgcgcggccacacggctcttcgcgtttccgccgctttgtagcctttggcgggggatgcgcgcggcgtgtgcgtccaaagaaaggggatgaaaaaaaaaaaaggcgcatggatgcaatggatgcatgcagcatgcaccaacgccaccaccgccagcagctgccagcagcagcggtagcaggttggagtaggatagcagcagcagctagctacagcctacaggagggacgcgtccaagcagctgaaaagatggatcagaggttagctgcatgttgggacttggtgccagccgaggttataggcgacaaatgcccaacagttctccagctctactcctccagagtccacaccatgacgacgttcctatagctctagtcttgatgcggtagtaccgagtacactcttcttccactactcacgatctactcctccgttgtttgagcaagtttaatagtatagccgaattctagctccaaattatctataactaatataatagtccattcatataatagttaactataaaagtatactacaccattaatacctggttccacctctcatacacacataatgtcttgaagcccatattgcagctggctacaaatctatagcccgcttgttgatgaaaaaatcgaacacactgacctgggagatctgcttagctcctgtgcaggtccaaatattgatgagatgcgggcgtgccagtcagtttgatcctacaactcacaagatatgcaaatagtatatctaaacagccgatcggctgacaagccgatggagtagttccagccgatagccgataatagccgataccgataccagccgatagtgatagggtttaagcaatcggttatatgtccaatgtggataatgatataaagtcaatcggctgatgatgatgtacactacaccatgcccctagtttgcttactacatatctgtcaggacaggacctatatgctgtcaaattatttgtcagcaaaacttttcccgacagatagggtctgtcaggccaagtgctgccggcaaaagtctttcccgacagataaatatgtgctgacagatagactgatagtgttgctacatatttaccgacagatagttttaccaacagatgggcatttaccgacacttaagaagattcccaacagatagcatatcattgtgttatagatttgccgacaattaatgtatagatggctagcacaataacttacaagcaatcagtcggtaatccacacaaaaaaatatactaattacctattagcatccattttatgaaccatacctcaaattaaatttgcaacatacatggatgaataccactccaaattttgcaacacagattatcatttttagtaagttacacacatgcataacacaatattaaactattcataactattgttcatccatcaagtagccttcaagtaccagtatcacaatagcagtattctgatacaaatagcagttgtccatcagctcaaatagctattacataaatgtccaacttagatataatggagttcttcaagtacatagcaataattacataacttagatgcaactaaggttcttgtaggtgtatcgaggttccaaaaacaatacaaatcatctcttttatggttcttgtaggttcttggttttcttttacagcacctctgctagccctttttatggttgcctgcaaaataaggaaagctatgcttcagtccacaatatcacattctctttgctgaaataaaaaatgtaaacagtatagaagatactgccaccatatgtgaaagcccaatttttttcatctaacagttccatggactatttttttcatagaagcagcacatgatagcccaacaaaacaccatgtgaaacatgatagccaagattcagtgtcagcctcacttgtggtaaccacaacgaaacaacatatatatgtttgcagctgaaatagggaaaggtgaattggaaaaaaaacaggtggtcgacttcagaataagggaatactatattgatagacttcagaactactatcatcaatatatgtaagctaacatccaatgctataatcaatgaactgtacagattcagatgccccaataatgacaaaacattactgtattcagattcagatgccccaataatgctaacatccaatgctatgcaaaaatgtagacacacctacaaacaggacagtcagtgacgggagtaccaaggtccaatagaccacaataccttgcagatacaatgttaagtataaccctcatggagaggactcaaatgaactaattattgcagatacaatggcatttcacttgtcaccaagaagtgttcagttaagtgatcatgtctatgaatgttttcatggttccacactcaaattgccatgcaatttataaaacactcatgaaaaaaaagtttgtagtactgattcagcattttgtatattggtcctatcactcacaaggtaaactgttgagtgatcactagttgtttccatgatgagttcacacattttctacatgggtataatattttatctcctattgcagacttgctaaatgcaaaatcaaggaaattgtccactccttgtatatagatttgtgtgtgcctaggctcatccatccacgccttatccatgatgattagctaacgtccaacttgagtccacagtaatcttttgatatattagttgatatattagttgacagaatcagcaaacagtagcataaacgtagttgagcaactgtgattttttttctagcctatatacaagtccagtttctaaatacacaaattaagacatgatattggtccctttctcttgagtaatcttgcagtgtattttttccagaagcaactgagctagagacaatatacactacattgcagcttaccaagtataaatagtatgatttttatgtactcagattatagaataatgggagaatatataggtactaatctgataaaaatcttgttgatctaaattttttaaaggttaaacatactaattttggatttatttcagaatactcacagtgtggcagtgaaaaaaacaaagtgcataactctgaagtgtgaaacaacttggtatgttgcattattttaattttattatgtaacttagtttgtcatatttccaggctatgtctgcggagatgttttccagtacactgagtagattagccaaagaagctaatatccaaaaaaaaaacatctagctagctacaccacatcaatccaaggggaaaaaatgcatgggattaacttattgccatcgcagctaataggagagggaggaaatgctgtacatgttgcaatcacatcgaattcagaaacacagctaatcagatcgagagttaattgaggtacctgctcactggacagcaaggccttcttcttcccaaatcgaaacacaccttctctggctcagggaaccaccgcgctgcatggcacacatagaaaatcatcatgatgatcttgcgggaaaatatgatttcgtttctaccacgtaccttgcagcttcgaactttgaactcgccgccgccgccgacttggatgaaggtgtggagaaggtgggaggatttcgccgaggcacagggggaagcggggcgcggtggatggggagcgaggtggcggcgcgcggcggatttggccaaggaggaggtggcggcgcccagtggatggggaggagcgtggaagggggagaggtggcggcgcgcggtggaagcggggggaggaggcggcgcgcggtggaagggggagaggtggcggcgcgcggtggaagcggggagaggaggcggcgacctagctagggttttttttggcgtgttttttttttggcgcacagaatatcggcggttttttttatttcctgcctgagctttcaccgcgctctatcctagccgttgaatcaagatctgacggacgaagtattgctgacagatggattatcattaagttttcctgacatataattggtttctagtcttaaaattgctgacagttattttgaccccaaaaaaatttagaattgctgacatataatatgtcttattacatagtattcccaacatataatttgccaaaagcctttgccaacaaatagcctatcaataattgtttatctttaccgacagatgtctgttggtaatctagtgtcatggtgtagtggtaataaaataacaatataatccagtataaaccaatcggcaaataatgatatgataaataagcatcgatccgaaggttaaagcacacatcggctggaggtccgatgtcatgaaatccacaggatcagattaaacaatgaaacctttgttgtcatcggctaaatccaacttatatgtatatgcaatccttatgagctgatgcaacgtccagataactcatcggctgaaaccccgatgaaacccttattggcagtcaaaaagcaggctagagattatggctctaagcacgacttaatagatcaaacttaactgatgcagcactaagtatgaaaagaaccataatatctagacaatcaagccgatgactgattttcagggtggtagatgtctaagctaatctaatctagcaacacgatttagcccataccggcagaaaccctaaaacgagaagcagtcgatagagctaaattgatatgctaagactagattaacagagacatatgataaatatgtaagcaaatatagcatccaaaccagagcaatccaagaggtcgaatgtactgatgcagccttgaacgacgccgacgtagacgatataactgcctagaccgacggaacattggacttaccacttcgccggagatcgaacaccgatgcagccctccgtcgggcaccaagtcccgccggatgataaaatgaagtagaaaaggtaaaaagggtggtgatgcgccgaattgtattaattgtgaagattgattacatagaccccgggtgtacatatttatacccatgggttgatacaagtccttgtcggacaagaaagaaactttcctaaagataaaaggaaaagataaagtccttataggacactaaacacactttcctaaagataaaaggaaactaacaaactatttctaattaatagataacttgccatgccgcattctctttgaactcggtctcttctggataagctttctttagtagatcaatttccttaaccgaatatagcaagaatccgacaactgacgacttgacaactctcatcggctaatctcaggacttcgaagccgatgctgactctaagccgatgactactccgggcttaccaaatttcactgttaacaccgctttcttctcttttctctcttttcttctcgatatgtggttatagctggcttatagcctgctattgtacatgctcttatgggcctgtttgcttgaagggacgaatatccattagtccctctactttaggctgaagggacgaatccattagtccctctactttaggcatgtgtttagttccttccaaagttgaagcttgggttgaaattggtacgatgtgactgaaaagttgtgtgtatgacaggttgatgtgatggaaaaagttggaagtttggatctaaacacagccttagtcctaaacagggatgagtagaaataatttaaaagtgtattagtctattagtccctgtgaaagaagcttatatgaactaaattgtagtaccgtagtatttgagataagaagaaagttttggtttcgtattgatcaaatttttaattttatattccttggattcttcttctgagcatctaagcacatgatcgattggctgaaaaatgctttctttaattcctatgcattggaatcactatcacacaaagtcttatattttgtgtaaaatttaaatcttagatatgcttttctaaagaaagcatttaggaacggagggagcactaattcttaaaatgtaagtgaaaatcttgactattttaaaaaaagaaaggttactaacagaaaccacggcctttaaaactccccaataaaaccttgatctctactactctcgaccccactttatacggagtagctacttttagggtttatattttgtcccgtaatattgcaacttcttcatttttttatatcaaccaattataaaaaatttctcaaataatttttacattaactttcttatcttaatcaatcactgtcttatcttatttaatttcactccatttgttaatctcttatcttatcttaatcaatcaccgtcctatcttatttaatttcactccatttgttaatctcttaaggaagagtggtataatatgagacgtagagagtagtctgcagcatgatgatgcatatatagtactccctccgtcacataatataagggattttgatattttacttgtactgtttaaccattcgttttattaaaaaagttagaattgttatttattttatttatgacttactttattatctaaagtatttcaagcataactttttgttttttatatttgtacaaattttttaaataagacgagtgatcaaacaagtgaagcaaaatgtcaatatcaataagtagcaggtcaaaagtaaattaaggggaggaataaaatcgactgcatattgctgcagtaattgtagacgtatacatgatcgatgcagcagctactccagctcttgcggccagtggccatgcatggtgcatccagtctgcgtctgcgtgttgcctccatccctccctctgcccacaatattccaggtggacataaacaactgggtcatgcatgcatagcaggagcggccagaaacagcagtcagcaggccatgatatttaaggccgcatcagggccggcgcacggaggaattgcgggctggttgacttaccaatatttgtcaattttaatagtgttagtatttatttggtttgaagctaaattttagtatgcctaagaaaataggccatttcaatagtgaacttatgctattttggcttcaatctaaacacaattttaccttactaaaattagttatgccaaaatttgacactgataaaatttggtaaggtctatttagaccacaaaccgaaccaacctacgtatacccgtatagtacacactggtataaagtagtgcgtgtcatcacaagccagcactttcactactgcgtctatacttgcacattgcatgccaacgtctgcatacccagaatgctctctgtacctcacagttgatcacatgatccgtctgcgagttactcgtactactactgtatttagtacaccctctatactcgtaatcgtaataaaagtcgtttataataatatttaaattaaaccttagaaatataaatcatgaataactcttaagttgttgagtttgaaaatataaaaattatatgaatagatttatcttaaaaaatacttttataaaatatacatatatcatttttcaataaatatttttatagaaataagaagttaaatttgtgttttgaagaccgtatcgctgttcaaaacgacttacaagtacagaggaagtaattatactgagtacgagtaggaatagtacgcagtgtttacgtgccagtgcgcgtatagtgcttgccttgcctgagagaaggtacagtagttccaagtcgatcgcaaccctttccgtctttcgaacgttgaggaagagacagtatatgcatgctcggtccgtacgaattactagtaggaacattggcatggctaccgtggcaggagacacgcaggcagacagactacgtggcagaggcaggactgtctggcagccatggggccatagcgtccgaaacaagggaacgatcacatcgctggaaatggccagtcgcgcagaaggcagaggcatgagaacgagcgcctgatcccgtgcatgcatgtggtcacggcgtcgtcccggccggcgagccgcagatcgatcagcaggccggaccccctgtccgtgccccctgtccgtgctgccgtgcgctgacacggcgacaccgcgtcacggccacccacaccgcgcgagtaccacgtaccacgtacaaccttcccgcagttacaaccgttcgtcccccgatccgtctcaccgaccggacaaccgaggcgatcaccgtcgcacgcggcaatctgcgcaacggaggcgcagcgcgcggtgcgggaacgtatcaccgctagcacgagagctggaacgcgggggaacgagtaaatagcgagtaaatatccgcatgatccgtggccacggcgcgcacgggcacatagctaggcgatcgacccggacgctacaggattattctgggggcgcatatagctactgcacgggcaacatccggttaaatccgttggtgacgacgttaacggaactgtctggcggtacattacatattcgaaaggtacaaatcagtatgatgaggatttatgagaatccatatcattgttggatattttagctagattcatactccctccgtcccacaatatctcgattcctaggggagggctttgtcaaaaaaaaaaaacgattcctgcacagaaaaccgaataacctcaactctatcgtatcatgtgtggggataggtggatggcgagttggcgacttctccataaccttatctcctcctagccgcatatcgcatctctctcttcctctcgcgtttctctccctttcttccccgtcgcccctctggatcgattgcatcgacgcggcggcgtccagatgtacgaccctgcaagcttccgactccctccctacctccctcccgctcctccccgcccgtctcgcctcgctccacgctgctcccccaggctcccacttatatagggtttgttgtagtggggtgcgctgagattcgtgatccttgccgccaatgaagcaatgctgagattcaaattatttggcgccctggtggctgtatattagtagtatttatatattgagcacttaatggttgcagcagaagtaataatccaacctgtactactattttatttgtaaccaatgattggatgtactttcactgagggtatttcagtcttttgccactttgttctaaaattgccttgggattctagggttggagatattgtgggacggagggagtatgatgttaggtaagaaagtattattttataaatggtgtgtttgaatttatctattcgataatgacataggctatgtctatggattacattaaatcaaatttaatatggaacatagagatgaatatggtcttgggggagtatgagatgccccaactgagtctaatttcacttggcaaaataactatgatgataggagaggaggtgcaacactttattataggtagattagaggggaagaagttacaataatatagcagagactcttgattacggtgagcctggtgaatacttgtcgggacaattcagagtgaataacaaatgaaaacaacacaagtcctgacacacggaggttcgcgcaacaaacatatttaggttgttcagcatatttctcaaggtgtggtttgttagagattgtgccaaatatttgtacaaagtcggtaacagtttaggacttcgaagttgtaataggtgtaagacatagttaaagtcaaattcatcataggctctcttaaatttagagctggcatcctggttataaccatatgtgtttagttcacgctaaaattaaaagtttgattgaaattggaacgatgtgatggaaaagttggaagtttgtatgtgtagtaaagttttgatgtgatggaaaaattaaaagtttgaagaaaaactttggaaataaacacggcgtataataacgtagctgttggtatgactggtatggctagtcagcggtccagtcaatcgaggatcgtggatacgatgtaatatgctatatagggataaacgcatgtaatcagtatatcgggatataagattcagttaaacctcgttaattaacaaatatcatgtctgaacactatttgattatcgatctcgattttggatcgattttataacacatgtattatttcgcgtagtacgagacctggaacgcgggaggagtaaattagccaacgcgatcctcatgatccgtggcgacggcatgcacgggcacgagtagtagtgaacgatcgaccggtcgctacaggattattctgggcctgtgcgcgcactgtggcggtggtggcaactgcgtgtgtccggacgaatggccgtgtgtcactgtgcgtggccttgaatgcggggttgcaaccaaaagtgattaaatttcaaactgggctgtccccttgggagagggagagagagatctgctggaaaaggagtgggtagatagtgacaagacgacgaaaaggaggaggggccggggggacgcgaccgtgatttccatttctattcctggcagccttttgttttcaggacccctatttttttaatctttcaaacgttactcccagctgaaaataatcctgtcaaattaccgagctgcaagtccatgtttcatactttcagcaagtaatcagctgaaattaaattactgaagtaactaggacaagtttggtaccggtggcctggctttatttcctgatgacctgaatcatgcatgggtagtacagtactccatgcctctagcaacaacctgtgctgagagcctgcaatgctttgagagtaaaatttgcattgctctccagttttcacctcagtaattaccagagagcagtgagcgtaatgtacgctcggaagcagtaattattcagtcgtgcacgaacagttggcagcagatttgggtgccccaccaagactagccagctataggggagtatactcgccatttcgccatggatccagctgcagctgcagctgcaacagcgagccccatccaggtgagggagccgaggtcactgaacatattccattgttgtctctattctcccctcatgattgccataatttcctcctgcctctcctcctactggctacagctactccagcctagcctagcctagcctagctactgcccatcctcaccaaaggaacgaataaatggcgccaccctccaccggacagtatcagcccagattacctctcttcttttaccaatgtgtgcattgttcatgtctccgtctcacaaacatgactctactctacgctcccatgcataaccatacatgcgttacaggaaatggagtataaagcgatgggtttggatagaaaaagcggaaattctgttggtcttgagtagtggagtactactagatttacccgaggttagctgcgaatgagatacatacgtacgcgtgtgtgtatttcatttttatttgagaaacttagtacaagcgtggccatgaacatacacacccacaatctaaaccgacctataagcacatatttaattaaaaactagttggatggcccgcgcaattactcggctaacacccaaacaaaatcatataatttttaagtatgattttacttaaaatttattaaatagctatcttcttctcttaggactttgaaagaccaagccttatcatccccgtatttctaattaaatagttgttaaaagtcacaccagttagtaccccttacttctgtcatatccttttttattttcttactcgatctaccactattattcattctccttggaatctttaaaaatttaatctagaagtcccttacagtttattgtctcgttggttttcatttttatgatttatagaagtcccatcaaacgctgccattatacccctctacggcccgcccactgtcttttctctttattgtcattggaattttaaaaatcaaacataattatcgttcgagttcattttttacttttagaagtcccgccaaaccgtcaacggctttgccattgtactcctttatggctcgcccgctgcctcccttctttattgtcattaagattttaaaatcaaacatgattttcattggtttttttttactttttagaagtttcgaacctttaaaagagttggaccttatagttttcagagtttattgtctcgttgggtttcattttttataatttttagaagtcccgtcaaacgatgttactatactcctctacggcccatctgccgcctactctttattatcaatgtgattctaaaaatcaaacataactatcgttggaattcatttttattttttagaagtcccgctaaccgtcggcggctctgcaactatactcctatacaccccgcccgctgcttttcatttttattgtcattgagattttaaaaatcaaatatgattatcaatgaggtttatttttttttactttctagaagtcccggcaaccgccttgcctgtttgcttcatggcctgcctgttgtcccttcttttaatcatcattaggattatatttggtgttttactaacagttttatatgtcgtatcaaccgccaccactctactcctttataggtctattacttaatttatctcgtcatgtgtttcagatggtattttttttcaatagtttttttatcaccaactttagttatttataaattgtaatactaactgaaatctttttttttcttttccaactttagattttttttttcaaattttaattaataccgtataatgttctttaaatatttttattttttatttttgaatttcagttgtttcaaaagtgtattcctacttaactctcttttagtttttctaattttggatatgattttattttttattctgaattttaattgatctcgtattgggtttttatatggattcttctttcaatatcgtttatttttaatttcgaattttagttaattttaaattgtattcctacttaaattttccttgtactttttactaattttggattttatttttattttattttgaatattagataatctcgtactggttcttatatgaacttttctctcaatattccttatttttaattccgaatttcagctatttctaaatttgttactacttgaactctccttttcttttctaatttcggattttattttatttttatttcaaattttgaataatctcgtattggggtcttatatagactcttctttcaatattacttattttttgttgcgaattttatttttaaattgtattttatacttggactctctttttctttttctccgattaatgtgggaatttctagcccctaagcgaacgtggtaccttctttcaaggctgttttaataatataatagataccgggctggtatattttaaggttgatagtcatgatagacattgacatcttaagattaacaaattaaccataagtatgagcatctatgctaagtttaacccttaaatccggttaattagcatgtttcataaaaaaagtctaaccaattaattattctaaaaaccatggtgtcaactcatattagtatagacgtttgaggcttagtctgaaaataggtgaagatggcagttaagataacctttctgaatatgtagtcatactgtagggtgaaaacggtcccagtaattcccgaacatccggctatcttttaaattgcattctagataatataattaattctggcttttggttcacagaatatacatccaattattacatatacaccctctgaagaaatggttactaacagaaataaaaataaaaatactactattttcgtcccaaaatatttgtcgctttgagtttttgtttgtaaattttgatcatttgtcttattaaaaaagttatggaataatttttttattttgtttgtgacttgctttattaccaaaagtactttaagtatgacttgtctttttttatatttgcactaatttttcaaataagatgaatagtcaaacgttacaaacaagaagtcaaaacgaccacaaatttggaacggaggtattactagaaacacaatatgaaagtagaaacaaaaaatatttttactagtctactaagcatggttgttaaggcgtctgtaaggcgacgccttagcgtccataaggcggtaaggcgtgtccagggcgtaaggcatctgctccgccttacgggaaaaactagaggagaaagagcaaaatcaaggagataaaccgatcctgtagaagcagcagcagcaggggaaggtcctggagaagcagcaacagcaggggaagggggaggaatacaaagaactaacctaaatcgtcatcaccgtcgtccccgaccactagcaaagccacatccacctccctcgatggctagcaccacccgacgatgagtggctgcggtaggggaagaggaaggaccagaggagcggaagggatgaaggagatggagacggtggctgggcagggttcttgccgtcggcggtagtggagcggacgcggctaggtgtcgacgggattagggataaggatggggtcggggatggggatggattgataaatatctatcaccatctttcgttttagtccttggactctgtagatattgtgaagaagtccttcatttcctattttcatcatccattttagtccatcgactttgtatatattaaaaaaagtccttcatctcctatttttctatctgcataaggcgtcgcctcgccttacgctttaccgccttagggtcctcgccttatgccttaccgccttaacaaccatgctactaagcgttctgttttggtttattatattttcacagaaattattagtattctataatatggtaattactatacgtctaaatattagagtacctgtatatgtggcccatgttttgatatgaaccatatatgccataccatagaggcccattaactcctctagctgctaaaccttatatttatatgtttctgtccaaataattttatttttccaatattcctaatattattttcctttttagctcagccgttttcggcaacaaaagaaaaaaagaagacctgcatgcatttgccgaaatgatccacatcatttctggccacttttagctttagttgtgttttgcccatcgtctatattgctcggatactccgatacatatatcgatacatgatatgccatatgttaaaaatatagctatttctggaattttcatggaaattgaaccgagagttaaaaaaaaagagagactagaatgccttcattaactgtcctgattagtgggtggtggggattgtaaagatgatactttctccgtttcaggttacaagacgttttgactttggtcaaaatcaaactgttttaagtttaactacgtttatagatgaatataataatatttataatactaaatttgtttcatcatatcaataattaaatatattttcacaataaaatttttcttgggttgaaaatgttactcattttttctacaaatttggtcaaacttaaaacagtttgactttgaccaaagtcaaaacgtcttataacctaaaacagatatttgaatatttcatcactacaaataccaattttcattatggtctgggagtttttttttataagaagttcctatttggtacgaacacaatttagtttctacacagtcccagaattatatatatatatatatactccatgatggagtttacataattacagtacgtactagtagtataaccaacgtaatggcaatctatatctggaatttcttttagctacaactcctcctactactaaatagtactccctccatcccaaaatatttgacgcattttactttttttaaaaatgtttgaccgtttgtcttattaaaaaaaattaagtaattattaattcttttaatatcatttgatttattgttaaatatacttttatgtatacatatagtttttcacatttcacaaaagtttttgaataagacgaacagttaaacatgtttaaaaaagtcaacggcgtcgaacatttagggtgtgtttggttggagggatatccctagatgggatatgacgacccagtttttgagtgtgtttggttggtgggcgagggaggatagggcggcccggagagggaataatccacgaagatgttggatgagt

SEQ ID NO: 5163 - DNA, 48926 bp, Oryza sativa
cgtcttataacctaaaacagatatttgaatatttcatcactacaaataccaattttcattatggtctgggagtttttttttataagaagttcctatttggtacgaacacaatttagtttctacacagtcccagaattatatatatatatatatactccatgatggagtttacataattacagtacgtactagtagtataaccaacgtaatggcaatctatatctggaatttcttttagctacaactcctcctactactaaatagtactccctccatcccaaaatatttgacgcattttactttttttaaaaatgtttgaccgtttgtcttattaaaaaaaattaagtaattattaattcttttaatatcatttgatttattgttaaatatacttttatgtatacatatagtttttcacatttcacaaaagtttttgaataagacgaacagttaaacatgtttaaaaaagtcaacggcgtcgaacatttagggtgtgtttggttggagggatatccctagatgggatatgacgacccagtttttgagtgtgtttggttggtgggcgagggaggatagggcggcccggagagggaataatccacgaagatgttggatgagtgtatccggacaaattggccagatgaggatatccaccttagctaatcttgatcattagttcttgattagcaataattaaattatattgttgttaattagtaattaacttgtcaaaattagtgctaattagatataattactctattttattgttaatttgtataaactatagctatattaatgataattaacatattttattaataattaatatgttgttgttttcattcaatccattctcattcacccaaccaaacaagaaactggatggccatatccatctaaccaaacaaaaaaactgaaccaccatatcccttaaaatatagatgacaatatcctatctagccttgaccaggaaccaaacacacacccgcgggaaggagggaggagtagtatctcttggtgtaataggattacagtatttgcgtaaatttcgtttcagcacctggtgatctggaggggtcacgagtgatatagacggagctcatgattagtcacttcatgtctcggcttagctgctagttcagcgtactagttcgtcgtcccaccactccaccccgcacaagcactgcaccactccacaccacgcaaaaggcgaacacagccgggggctagctatatcctgtcacttgccatcacaccccatctcatctgcagtttctgagtccacaggtgggagagctggctggctgtgtgatgcatcctgtcccccctctcccctctcctctcccggctgctagctcccgatcgtgcctccgttccagcaatcatgctctcgccaaaaggaaccagctcccgggagcggaaaagatgtaaggcgagagcgatcagctcagctagctcaccgacaagcagcagcggcgacatgtttttcgcattacacaagagttcattttgtttctgtgccatgccatgcatggacgcatggtaggcctacactgatcgtggaatcatcctttcgtcaagttcgacatcttttgtcccttgaagaatctaacgttatcaggtgttggtagacctggccgtatcatactactacatgcatgcatgcatgatgcagaaatttggaactgtaactactattaagaaggacatcacttgatattttatgctgttcttcttgctgaatcaactgacctaatttatcatcgtatataatcctctcctccatagggtttatgagaggtggagaagacgttaaacagtagtagtggtggtacgaaagctctcgctgtctcgcaacatggcagcagcacggcatgcgcctccttttcctcaccagccatcattagcaggtgtgtgcgtgctgagcgagagcgatactgataggatcgcgcccgtgtccggacccggggcacggaggaggcaatcgattgctgcggtgaaaacaatgtctcctgatgaagacaacacaatgggaagccaagacgacggccagcatggatgcactttcggtccggtctaatccaatccaaacatccaatccatcctcgcttcccaaaagccaaagccacctctccctctctctctctctcgctctgcgttgtgttcagcagctggagtagcttttcttcctttcgtttcctgtctttcgtgtcgcctcacatgactcgtctgaaggctctgagtgcgagccaagctatgagtggctatacgagtacaggggctaagatgctgaaggaaagaaaaaacacccggcctacagttactaataagttggcagctgatccgatgctagtaggtgaagcctgcctccgggccgggagaaaccgggtcggtcgtggtcgtggtgcgcatgcagtgtgcacgcgtcgccgcggaactgacccggagcatgaggggcctggtgccgctggtagctaatctaatagtcaattcatacaatagttgcttactatataattaggacatggtcctatctgtcatatacacattacgtcttaaagtccgtgctgcagctggctatagatctgtagcccgctgctcttctctctcttcctttatctctttaaaatatgtttataactgacttatagcccgctattgtacatgctctaaagagtattctacactcacaaaagaaaattcagtacgcctctgcctctgtcctattttaaacacaaccatgagttctcgtattcaattttaattgttcatattatttaaaacttttatatgattagtatttttttataatataataaaatatgaataatgctttatacgtgacttatgctttctaatttttttattaaaattttttaaataagacagacgattaaagttgaacgcgaaaatttatggttgcgcttaaaatgggatggagggagtactatactcctaaggaagaaaaactaaagcgtacggaatactagtttatcacacggaaaaaagaatagcgtttgtagattagtgcaaatgaaatgataaaacccatttactacaagtgccctaaaatataaagagttttaaaattagacatgggtactgagaattggtgaaattcaatggaggaaagttatgaatgtgatgacttcgtcaatcttaagatatgccgacccaattttccagagttactcatattgattggatgtttgtgtgtgcataagggtgagtgtgcactcattgtgagcgcatgcgtttgtacagtattccaaaaaccgggaaaaagttatgattagtttagaagaggaggtatgtaggaaatttgaatgggaaatattatgattaggtggataagttattaaattttaagactagaagttatcgtactgtttatatgctggtgacatttatcttctcttatgtcttatatagtgaaagcaacaactttttttacataacgacatgccacaccattacaaacatattgaccattggataaagatttggataaatgatgttcattggataaaagggtagcattaaagaatatcacaagtaagctttttttgcctactcctataatacttttagacacgtgatataaagggaggagggagctagggggaggggccaaagaccatgatgaaaaaaatatattaggaggcttctagcatgattgaaaaaattaattatatgattgtatatgttttaaacatacttatgttttttcatgtccggatgtggtagtagcacaaataaaatctgcttccgcgtgatgggtttgactgctgttgcttcgtcaatacgcacagtatcttttgtggtgtcagtggtgtcgtcaagcgttgcagccagctagcctcgcttagagcacccgcaatagtaaagtaaggtgctctctataaaacatatacatatcagtaatagactagattaatagtaaaccacctcaatagtatgtctacatgagtatctatagctctctaatgcattgtctcgtttttctctatagactatctccaggttattagatagctttgctccctctcttcatttaatctcttttaagtaggaaaatatgctgacatggatatcttatagagagcctatagataaccattgcgggtgcccttaaagacgatcgagctaagcagtttcgaagccaaaaattatcaaagcctaaaactaagtggactcaactaagtgcatactatataagacagctataaacacatatcaagaaaataaataaggagagagaatagcactaggctacagatttataaccagctgcatcacaggctacaagacgcaatgtgtgtatgatatgtgggaccaggtattactagtgcaatatatatctataggtaattattgtttgaattggttatgaaattgactataaatgatttgaagttagtagttggctatactattaaacttgctctaatgaagtatttttttaaaaaaaattatatcatgacttaaaagaatttaaatacgattttggagataaagcttatggctcaaagccaagctattctagatttgtcttcaccaatgtggcgaattgaagtgaaagatgctggctgtggccagacgctgcagcctccatcagctaagcctttttacgtccctatatgacccggcccgcaatttttcgcggcgccggcccagcaccacccgcggacgggctaggcgtcggctgggccttgcaggcctcctgctttctgcttgccttgctcatatgatcatatactactagtatacctagtagtatggtatttcctctcttttaaaatataataatctagtattagaataagacagatcttagtaacacgaatatacgatatattttatttggtattatgttgctgtattttagtacgaaataaataatactacctccatgcataaatgtatgacgttagttagtttaattttgagctaaccaacgttaaaaataaatatggagggagtaccggagtactggtagtatataacagtgtagtgcactgtgcagaagaaattcggatacagattgatgacccaccggccggcttgtgaaacaaatcagagtggtagctgcgtagggacgtggcccctggtgatgtccaagtgtccgtcgtcattactgtatcgaaacagcttttcgttcggttgtagatttgcggtaggtaggcagcttagctcggcccacagtgttagggctagtactaatgattgtatgaactgaagtagcaagaaaacagtgtgcgagtgtgactgtaactgtatgtgtatctcttgcagcaatagcctacatactggattcgttcgtaacagtggtctgatcgattcgttctgcatactggactgatggagtgatggttacatgggccagatgttacatggatcaatcttgactttggctccccaagactattattccccacatcgggttacccgttaccatctgcagtacaagagattctcaaaggacacacattcaggcaatggtagtagcaagatgccaaaaactctgcactcgagcgagaataaacgaaatctaatgatcacgcctaacaaaagaacaaagataatgaatgaccgatcgacgacgcagctgatccgtttgagctcaacacacatgaaaacaaagccgctacgtccacaaaatgcacagtgcaaagttccacggatcgatcgatcaacgagctagctgctggcgactttccagcggcttgtggctcacagtcacaggcactagccaatggacgcggctgctgaatttgaggtgatagaacagcatcccaaaactgaagaactctggaaagctgcgttcttgttcggtacgttcctacgggacctcaggcgaagacgcgaagatcattagtctgagtcttcgacttatgtaaaccttcccttcttacaatggaggtaacttaaaaaaactaccgcaagtttttcgagtaaaaaacttttagatataactatagtatatagtatagctagagtataattacattgtaactacaccgtaactgcactacaactacattataagtacactgtaactatggctagcaccgggatcttatgcatgatatgtgtgaaaaaaatttctaacatttttttccttcattcacagatctcgaggtaatccaatggtcacaaatctagaagttttagaggggggacttgctaaagttttctagcaattctgttttatgatacacataaatcacaggcgatgaacaataatataaaaaattcttgtaagcacctggatcaaaaacgctgatagacagtagtaatgtatactcctttaataagagtagtaatggtaacgagtggtaaatctttctttacaaggagtggtgttggtgacgagcgataaatctatcacaattttcaccactaacaacctaacatggaaatggcatgcggggttagagggttaacatgtcaatcatcccatcagtcaaagagaaaaaggcaaaaaggtaatccctctgttccaataaacttagggcccttttgaataaaaaaattatgaaggaatttcataggattaaaatcttacaggaaattttcccatgtagctctttgattcaaaggattgaagttttccaaatcctacaaaattcctatagaatggcttgttgcatataggttttagagaaaacttagcaagaggtccaacctctttgtaaaaatcctttgagtctatctctctcatctgattcctatgtttttcctatggtccaatcaaacgatcattcctgtgtttttcctgtgttttgtaatcctctgttttacacttacattcctgtcagaatcctatgtttttcctattcctccgttttttcattcctacgattcaaaggagcccttaggctgcgttctttgtagctattggaacttagctactcatcaatctccgttagcacttttcaaactgttaaacaatacattttacgtaaaaacttttttttatataagttgtttaaaaatataataaatttattcatcaattttttatatatttgtacttaattaattatgtactaatcacatttctcattttatgtgcggctaattagccgtttcaaacctttgaaaaacacaaccttaacctataatggaatgtgacccatactaatacaataaatttggataaaagcttacttaacctagctagtatgagatgtgatctatcctggtacgataaaattaaattatatgggggctagtatgtagtcggaggacccatatgtatataattgtattacatattagtgatagttattatctatctattattatatactaaaagtccattaaacttcctacaaacgatctcaagccgccacatgggatttctaaaagcgctcctagatcaccatgtgacgttttaatatattaaaaatatctagccctcgattttcacttaaaaggtgggtccattattttaggccattagatttgattagactaaaaaaaaaattagtccttcccctcatctcacctgcgcgtacgtaaggctccctcatcccgattgcatggtatatatcataccaaaccaaaaagaatatcctaagtacgtacgaatatatagtactattcacctgaaaaaaaagccaaaaaatatcatcctctttacgtgcttacttcattatttaccgaataaatttgtttttaatgtaaattggcgggtctattattttagaccattatattagattaaaatttgtttcagcttaagattattgtaatctagattataaattataataaaccgacataaaataaattgttagttgtttgtttttgggattattggttgttaatttgtttgctattagtcacccaatataatgtaaaaaagcacctttgaagtggattgttggaattaatagataggccttagccacgtgtacatacacctgcttcatcccgtttgtacatacacctgcttctttcactcccccatttaacccttttttttttgccttacaaccattactttttttatgctattcacattatttgagtgtatatttgatcattcatcttcatataaaaattatgtaattataataagaaatactagaaattctgaccttcgattttcacttaaattgatgaaccagttatagtattagatcacatctattaaaaaataactcctcccaaaaaaatcccacgtacatataaatacattgtactgacaaaaaaaaagccaaaaagaatatcctgtgcatatgttaccctccttaaaaaaactgcatggattttaaaaaaaatgaatgacccagattaggaggcacctaacatctaaacttcctacaaacgttgtcaagccactacgtgggactcctaagaacatgtacaatgtaaatgctctaaaaacggtcctaagttgttacatggggttataataaattagaaaaaatctactgattttactttaaatcgatgaacccattaattttaaccattagatttctctaaaattaaaaaatccggtaacctcaccctccactatacgtccgcaactacgtactccctccctatagccaccctccaactcttcccttctctcttatttttagctaacttcttctattatttagctaacatggatctatcttaagattttgaaattacgttcatctggaaaatgaatcacacgtagaaaaagtcctctatctcttcatggatgtgcacgtctatttgtacctaccctgtttgttctttccttttttttcccatcttggttacatgagatagaaaatcagtattcacattaactatattttaagttgtaaaaaggcactttaataaattagaaaaaaatctagaaaatgtgaggaaaaacaaaaatatctaaccatcaatttttatttaaattgatggattcgttatctcggactattagattaaatcctattaataatctctctcctaatctccctcagcgcaccgacgagagaaatgtacgtacgtacgatttgtaaaaaagccgaaaatacatatacaattgtaacgtacatttaaaaagataaattggaaaaaaaataaaaatataaattacttatatcagtaaaaacgtacttttgcttccttcttcttccttctattctccatatatagacgaaatcgtaattattattagtgataataaattttaagaaattataactttataaacatagattatatatatcatcatatactatattattttaccctttatattaacaatacaatatttttttacttaaaccgagtacctattatatcgaaccattattctatatcaaaattttaaaattacattgtttaatataaatgttacgcaattatattatgtaccagtaaattaccaatttataatctatattaactaattttttacattaattaatgaacccactattttatattatttttaataaaaaatattttgatgtcggttttcacttaaactgatggacctattaactagacctattaaggacctattaacaagactgtcatatctatcttttgtaaaaaaagaaaaaacttctaaagacttctcacgtgtgtatatttgccttctgcacgtatgacgaagcattgtacctgaggtaactaaggtgatttgtactacccaactaagcaattctgcaagtgatttgtgtcctaacaaaaattatttacaactttagaaaagaatataaaaattttgaacttctactaagggaaaaaaattccatctttaatttggttgtcactaaatcatgcatttttatgagacgattcgatcataataactttgagttccttgctattgcaatgtttacttgtagtgatattgtactgtatatgttcaaatagtacacatgatatttactcactcggtccaaaagtcaattcaaaagtcatatgaccttgatttatcttctaagtcaatgaatggtttttttagatatgtccgatctatagtttactcttttaagatataatttctaaacgaactatattatactataatagtatggatgcccgcacatcgcgtgggccaccttcctagtttttctgaatgatcgatatgctagtatacgaaatgatcgatatgctctcttgccatgacctcgatatgctctcttgccatgaccttttcctagatacgtgtaccttttcgtttcagttccaacatcgcatcgtcgcatgcatcaccgcttacgcacatgatacgagttattcatgggaactcgttatcgggctggacatgaagaggtcgacgacatgcatgcatatcctccttgggcccatgcaaatcatgagcggacagccacggcttccttcctaattgtacacctcatgttaacctggtggtcatgcttggtttctattagctagctataagggtaagttttacagtggaggtggagtcacatctaatttagaacatgttattttcttattaattaagagataacacatacaacatatcacatctaatacacaaaccccaatattagtccactctcacatcatcttgcacttttcttagagattgtgtagaggttgccctttacataaggggtggcttattctctctcttctaacttctctcctccatctcatcttctaatcttatgtgtcaaatttagaggcaatatgtaggggtttatagtacttgccctagagcggctagcgtgtgacacacttttgccaacggaagataaattaacaaattaattaaccatcactatattagaaaacagacgggccatacatctcaatctgtgtactattaatctggaaacccatctgtaatcatctccttgtcgtcgccgatcgcgcctaccagtagcaaatcttgtgaaaaggtcgtccatctaatagctccggtctcacttaattaactgcacgttgcaatagccagcagtggccagtgacagcatccgtgaaaaaattagcatacaaaactatgaagccgcgaccgaccaaatttcagaagcatcacatccacatgtgtccaaactaaatttcggctattctaaaagaggtagcgaacaagcagaaaagtagatgatttgtgagacaaaagggttttatacaggttcaggcattctcggtgagaagtaatactctactcttattcggagaaatattccgctgattgtgttattgatctgacgatctcaagtgaggatatgccctcaaggggcacccgaccctccttatataggtgagggagtcaagattacaagatagagattttatctcttatggtttaaaactctgtagatactcccttcgtttcaggttataagacgttttgactttggttaaagtcaaactgctttaagtttgaccaagtttataaaaaaaaatagtaacattttcaacccaagacaaatttattatgaaaatatattcaattattgatttgatgaaactaattttatattataattaatattactatatttgtctatagacttagtcaaacttgaaacagtttgaccttcaagtttgactttgaccaaaatcaaaacgtcttataacctgaaaagggaatactttacaattgtaaccgactagaactacataatatttccttgatacataagtaaacgtaatatccgagtcattatctatacatattctactcatatgagttatccctgtaaccagtcagatagcataaccttgtgggtatatggtacccataatatccacaacatgtgctatccttttgggccctatatattgtacaatttgcaaagctggtacggatttaaagtttgtgccaaataatgcatgccaaaatggttagtatgtactccctccgtttctatatgtttgataccgttgactttttagcacatatttcaccgttcgtcttattaaaaaaaattgtgaaatatgtaaaactatatgtatacatgaaagtatatttaacaatgaatcaaatgatagaaaaaaattaataattacttattttttttaataagacgaatggtcaaatatattttaaaaaatcaacagtgtcaaatatttagaaacggatggagtatttgggatagagggagttgaactatataccgtaggtccttcaaatatacgtggacaccatttgtggtaagggtagcctagttgtgcttgcgcagcaaaacaaaagtagattgatattattatacaatcactgccaggaaacacttcatccgtacttcatcagtacttctctctctgtccaaaaaaaaatatagtattggatgtgacattctaatacaacaaaattagataagctctcctccaaattcgctgtgctaggatatgtcacatccaatcctaatattattttttttgggacgaagggagtagttaactaaaaaatggtactaattggtgtcctcccgccccatgaactcacgtatctcatgtgaggtaaaaaaaacccccacaccgatgaaattaaaagggctggtttgtaatacaaacaagcactaacttgaaggatggctatgagctagtgccttttttatacaaaccagcatagatgcctcctcacgttaatgttggttctgtaaataaaccaacacaaaaaccgagccgaatcgagaaagaacaaacggagcaaaaaatttgtaaggcgaaaaaaaaatcaattgatatctcccaatctctttgcctccttcaatcccctgtatgccgcactctttatctacaccggctaccctcctcatcatccgacccactctctcatctcacccaccaatctcttcctccactggtgaacccctgcccccctccctcccaaaatcgttgatacgcggatatccgtgtgccacctctcccgcatggcgcaaccatgtgggatgcgtagagagggggacgatggatcgcccggggggggggggcacatggtgcatggtttcggttttctttcctttttctttttttatgtttttaaaatatgtacctatgcaaactttgtatacattgtatttttttaatatatgtgtatataaagtttatatatacatatacaactttgtatagatgtatattttttatactttaatttttaatatatataaaaattatatgtgtgtgtgtgatatttgtatacatacgtatatgtacctaaggagactaaaaaaaacccctcccccttctccccgtcttatagtgaggtaggatcaataactcggcctctcaacttagagaacgggctgtcgtcgcctcccgcttgctgcccgttgtcgattgtatttgttttttatgaagatgctttgtgatgaagaacaatttgtcaaattctatttacctcgaagccttggctcgaattgagccgagccatctctttcaaaaaaaaaaaatcatgcaacctcatttgtgctggttcgtcgaacggaactgatggatcacctcatcaatgcccaaagtttagagttggttgggctttccccaaacggcattaaagacctcttttagcagtgtagattggggagagctagctatactactattctacagatccaggtttcggtttatccttgtaaactatatcatgtttttatagtcatctggattgaatctcttatgtatggttttggtgttgattttctaacgatacatacattaccatcgaggaataattttttagcatatatgaattgaatccaaatatttgagagcgcaaacaccaaaagaaaaaagacatgcacactcgagcaataatgtgtaacacatcaagaaacatgcattatctttaaatttgacgtcgttgtctctcgtggcccatttttgtagtaagagggggataactagtactttaatagaatatggcgtcaacgaagcagataccaaccaaaacaagttcaaaatgttgtgcaatcaaggattgcagcgccaaccatggtgatacatatccttgcaacacgaacacgtgaactttgcaaaaatgaagttggatacgatttgactgttttgaaaagggcattaattaagcatgaggtagatcaagattgaagtggaaagaacttgggtatcgcggtcactttgtggttagaaatcgacataatatactttgactaaatgaactgaaatccacctctttaatcacgtatgttgcaacgcctttatgttgttggaagtgaaaaaggatggtgggtaatatatgagaacaatattagtgaggagctcgactatccttatgtggtagaaaggaatgacaccgacctaacaaacacaaccgaatgatatggataagaggatgtgacgaaggcaccatgctttaggctgataaaattaatggggcatagcagtgaaggtggtggggggtggaggaggctaagtaggggttgcataagaggccatatgtgctggtgatgctgagggaggtgttgcacggatggatcggtagggcaaagttgggttgcttgcacaaaaactatcataatttggaccatccgtccattgacacttctaccggttataatcttttggaaaaagtacgaattacccccccctcccgaactatcgaggtcagccgaattacacccccgaactcaaaaaccagacattctataccctcaactattgaaaccggacaaataacccccctgactcaatccagagtgattttgagtccacgtggcagcccagtcagcattttttagaaaaaatattagtgggccccacctgtcagttctccacccctctctatctctctctactctatcccaatctctccccctctcttgtaaaatcaaaggtgtttttgattattattctgtgatgaacaattggcattggagattattggttttgatatttggaatttattcacgaagtggttttggagatgactggatttacaggtgaatcacaggtactgttatttcatgtgaccgatcagaccgggcaggtgttgccggtcagaccggcggtgatcgagtggtcggaccagccagcccgcggtctgaccggccgacactgtgtcggtttcggtttcgggttgtttgtttggatatccgtgtttatttcatgattatggcttctagatagatactatatgtatgtaatactgttgtttgctactaatgagtcaagttggagatagcttggtctcggaatatggtttctttgtttatttcatgcgtaggcgactcgatgtctcgggagagtatttgcagtgatggaccgggagtcggcttggggataagacgacatctgtagtggtcagagatcatgcgggatacttaggctagagttgatgcacgtggttgatggagattccatatggcatacgatggaggtatgtgtgcgtatgggatgcggagtcgaatttggaaggagtccaaatttggtacgattggttatgtaaagtttctttcttgtactagagggtttcctaaggtgtttaggacccttagtatgagtttggttcgtggctttaggctgcctacctcatgtataaatagagggggagcgtgaggcttcccagtatcgcttttgaaagcaattgagttgagttttgagttagggtttcgagtttagtcgaaattttgtaaggagtgctgttggtgcactttgtaaacaaagagagaagtaataaagtcgtcatccactttaagagttcttcgatttgtgtttcaccgggttttggcagtctaaccggcggtgcaccggcggtcagaccggtggcatcgcggcggtccgacggcgggcacacggcggtctgaccggcggcgacaggagtcgacggcaggcgttctcggcggttcgaccgatcaatctacatcggtcagaccgacgttcattaggcggtcagaccgacagatcaatctcggtcagaccgagatccgttgatttcgagggtaacttttatttccgctaaaagttttcggttcttgggtataccaaccattcacccccccctctggttggcttagttattgtgattcgatcctacatctctctctttcttctcaccagcacgcggtggccgcacgagggcgggagcaggcggcgctgccggcggcggagggcggcgggcggttgagacggaggcggagcgggcggccgacagaaggaggcggagctcgcttcccaatttctctttcccaatctctttcttcgaggatgacggcggaggcagtggcgaggcgaggcgagcatgctagcgaagaaggcgagcgcggtgacggaggaggcaagagcggcggcgcaagggcgggcgggggacggcggcgcgagggggcggtcggagggcggcgacgcgagacgaggaggcggaggaggtcctgcatgaacgccttgatgccgacgtggccgagcttgatctcgagggagggatcgaccatgggtgacctcacggcgccgctcgtcgacctcggcgggttctctccttcccccgacaccgctgcgttcgtcggggacgtgtacgggaggctgtgggcgaagacaatgaggcgaccttgaagcacgatgccagacgaaacgcacgacggcagcgtagcctggacgaggagaaggaggaggacggcgatgccagcggcgccatctacttccagctccgcgctcgccaccgcttggcccgcctgcgcccggcccgccgttgctgcgtcgccacaccacctcgtcccccgtcgtcggccgccctcctcggcgccgcccgccagtccgccacctgccgcgtgctcctagcgacgccacagcccaccaccgtcctcgccgcccgcaacgccagagagatgagatgagagagagagagagagatgccgtagccgaggagctcgagagggcagcggactcgtcgcgtagcccgctgccacgctgttgacgaaaaattcaaacacaccggctgggagatctgcttagctcttgtgcaggtccaaatattgacgagatgcgagcatgccagtcagtttgatcctgcaactgacaagatatgcaaatagtagatcaaaacaaccgatcggctgacaagctgatggagtagttccagccgatgtcgataccagccgatagcgatagggtttaagcaatcagttatatgtccaatgtagataatgatataaaggcaatcggctgacgacgatgtaataaaataacaatataatccagtataaaccaatcggcaaataatgatatgataaataagcatcgatccgaaggtcaaatcacacatcggctggaggtccgatgtcatgaaatccataagattagattaaacagtgaaatctttgttgtcatcggctaaatcctacttatatgtatatgcaatccttatgagccgatgcaacatccagataactcatcggctgaaaccccgatgaaacccttattggcaatcaagaagcaggctagagattatggttctaagcacgacttagtagatcaaacttaactgatgcaacactaagtatgaaaagaaacataatatctagacaatcaagccgttgactgagtttttagggtggtagatgtctaagctaatctaatctagcaacgcgatttagcagataccggcagaaaccctaaaacgagaagcagccgatagaactaaatatgctaaaactagattaacagagacatatgataaataggtaggcaaatatatcatccaaaccagagcaatccaagaggtcgaatgtactgatgcagccttgaacgacgccgacgtagacaatacaattgcctggaccggctgaacattggacttatccctttgccggagatcgaagacgatgcagccccgcgtcgggtgccaagttccgtcgaaacgtaaaaacaaaagtataagtaaaaagggtggcgatgcgccgaattgtattgatcgtagcgattgattacatagaccccgggtgtacatatttatacccatgggttgatacaagtccttgtcggataagaaagaaactaacctaaagataaaaggaaactaacaaactattcctaattaatagataaattgccatgccgcatcctctttaaactcggtcacttagggataagcttcctttattagattgatttccttaaccaaatatagcaggaacccgactattggcgacttgataactcctatcggctgattccgagatgttgcggccgataatgattctaagccgatgacgtatttgccgattaccaaattttactgttaacacacgccctccccgcgatgccgccgcacgacgactccatattcctcctcggcgcggcccaccagccgccgcgccctcccgtcgtctccaatgccctcaccaagctcgaaatggtgatggcgccgagacgacgcaagaagcagcgtcactgcccgccgccccagcccggcggcctcccctcaagccgccgccgtactgcccaacgccctactgcccgccgccgtgacgctagtcacccatcgctgccgtttctggctttccgtgagagagagagagagggagcaagagagatatggaagggaaaggaggtgggagaacatatagaggagctgaccggtggagcccactttttttaattaacttttcactgagtagacaccgccacgtgtatgccacgtaagatcgaaaccgctctggattgcgctaggggggttattcgtctggtttgaaaagttctaggtataaaatgtctagttttgtactccctccatactcgtaaaggaagtcgtttaggacagcgacacggtctccaaaacacaactttaacttcttatttctataaaaatatttattgaaaagtgatatatgtatatttttatgaaagtatttttcaagacaaatctatacatataatttttacattttaaaactcaacaacttgagagttattcattatttatattcccaatgtttgacttaaatattgtcctaaacgacttcctttatgagtatggagtagtagttcgggggtgtaactcggccgacctcgatagtttggggggggtattttgtactttttcctaatcatcttttcgtccatattatacgttactctgggtttatcgtaaataactttttctatgtttgattaaatttataaaaaaatagtaatgtttgataatactaatatggtattgtaaatgtttctacgtttttatataaacttatttatactttaaaaagtttatttattacaaacccaaaataacttgtaacgtggaacctgtaggtacgaacaaggtagtagaggagcagagatcgatcggctaaactcccacgtgaaccagacgctgcaccaaaaacaattgcaaattgcatcttcccttccatgccggatttccccgatcccgctgaagtcgatcgtcctctttttgctggctttctgttgactgttattttatttatctctcgcctaaataagtacaggccggcccagccgatagatcggaccggccgatcgagcgattggctggctcacacgcgcgcgcgccgtgcgagcaggtgacagccttgcccgccgacgtctcgatcgatcgattgattttggctccactcgcgtacgcataaaaaccccctctctctccacacacaccatcaccgcgcgcgcagcactcgcaggagaggatcgagttaaccaagtacgaagcgagtagttagcgggcgagtacgtggtgtttgtcatggaggacgaggcgacgtcggtggcggcgccgctgctgcggccgcgcggcggcgttgacgcggaggcggtgaagcagcagctgtggccggccggcgcgagggtggcgggggagtggtgggtggagtcgaagaagctgtggcgcgtcgtcgggccggccatcttccagcggatcgcgctgtacgggatcaacgtcgtctcgcaggcgttcatcggccacatgggcgacctcgagcttgccgccttctccatcgcctccaccgtcgtcgccggcttcaacttcggtttcctggtatgtgctgcatgctgctttatttacgctactaccaatctcacataactttgtgcttaaactttgtctcgtatgcacttgatttggatcgagacaaaagtagttcattgcaatattcatcccggctagaattaaaatgaccagctattcggacagcttctctctgttctatcatttgattgacacaaatagaaaccgcaacgacttcatgcccaatccagctagtcatgcatgcccgctacataaatttcaagttttcatatggaaatcctgatgaaagtgtccgacagctaagcaattaacaccttgcaagaaatggctcatcagttatttgtggcaaattagctcacttcacactgttacaccgtaaattaagtagaattaatgtcagcattactgccaaaacagcagtgtctagtactagtgttttaaggactagctagacttcgtcgtctccaatttgtatgcgcgtgatcgaattatgcacgcggttgttggattgaattgaaatttattattaacctgctataattagacctccaggcacatactgtatttatttaggtaacatctggcacgggttcacagcttatcatcgaaagctctgagcccttaattcggtccatttttttttggctggaagcaataatttggtccattcaataggctctgcatcatccacacttccacagtaactttcaggtagagtagactttatgcatgaattttttaaaaaaaatatgtaaaacagtaggaggccggtcggcttcatgcatgtatctcatgcatgcacgcttgagtggatcttagagagctagcaatttatttacacggacagtagctatctgaagccgacttaggctgtatttaattcagcgtaaagtttgaattttagttaaaattggagatgatgtgactgaaaagttatgtgtttatgataggttgatgtgatgaaaaaggactgaagtttggatccaaactttggatctaaacacagccttatgaaatgccccgagagttcttttatgcgctgaggttcaggaacaatccaagaacagatggaaatagttgggtagttaatcgaggataagtgatccaatcaccctaatcatctttccttttgtaatttttgcaattaattatttgcccggcgtaaaagttctgtaatgactaatgaattaagccggaagtatcgtgtcgtagctgagcacatggattgggcgaatcaatgctctctgatcgctgtcgccttctgctgctgcagttattgttctttatgtttgtccctgtctgtgtcccgacactgacgccgccacgcacggcggccgcgaccaatctatgaccaactgcgtaggtacgaaacgacatgatctgcaattagttgagccccctctgaatgcgtcatggctcacgccatggtgatatataagctagagtaagtgctagacactgtggtttgagatagcagtaaactgttagtaagtggtgtaagtattagaacgtgtggattttaatcggatcgttgatcattacgctcctcgccaaaacggatcgaaccacctgattctaaaaacaagaccatctagggccgtgtttagtttcaatatttttcttcaaactttcaactttttcataaactttgctacacacaaactttcattttttccgtcacatcgtttcaattttaactaaactttcaattttaacgtgaattaaacacatcctagattttacagtctcgtcataagaacttacgaacacctggccgagagggaccccatcataacagctgtgtctaggattgctctaaggtcagtagaccacctagagcgtctttaattaccatatagagacgaagtaaattaaacgacaactagaatttagaacgataaaagacaagggataagagaaaaaggtaattaaacttgatagattgaatcggccatgacatgataaaataataatttggatacctgaatccgctgtgacaatttcatatttatagagtgagaaggtattacctctcgtacaagtcgaacgtaacgaatctgagaaaaatgcaaactctccgaaaccaggtcactcggcttagcaaaccatagtatccggctttctcgggatgaaaccattttggtagctcttaacagtacggtgaattatatatggtcatggtaataatcaagcaatggcgtggtggatttttggtgtttgtggttaattagctgggcatggcgagcgcgctggagacgctgtgcgggcaggcgttcggcgccaagaagtaccacatgctgggcgtgtacctgcagcggtcgtggctggtgctcctcatgttcgccgtcgcgctgacgccgacgtacgtgctcatggaggacctgctgctgctgatcgggcagccggccgacctcgccagcctcgccggcaagatgagcgtctggctgctgccgcagcacttcgccatggcgatgctgctcccgctcacgcggttcctgcagtcccagctcaagaactgggtcaccgcggtcaccgccggcgtcgcgctcgcgctccacctcgtgatcacctacctgctcgtcaacaccctccacctgggcctcctcggcgccgtcgccgccgccaacgtggcgtggtggatcgtcgtgctggggcagttggtctacgtcgtcggcggctggtgcccgctgtcgtggaagggattctccatggaagcgttcgccgacttctgggagttcatcaagctctcctcggcctccggggtgatgctttggtgagcacacattctcacacaactcgagcacaacaaaatatacatgaactcatcatctcggctaaattgtaatttgctcatgtatatacagcttggagaactggtactacagggtgttggtgttgcttacagggtacctgaataacgctgaaatcgctgtggatgcactctccatatggtaactagcactagcagatgattgaacatttttctccttcaaatccaaactagtcttcctcacaaattgcattgcattgtactggttcttgacttcgtagcttgacgatcaacggatgggagatgatgattccttttggcttcttggctgcaactgggtacgtgcattcctacactggtttgatcagtccatggcctgaacttgatcagcgcaccatgagtcaatgacatgagcttgaaatggcgcagcgtgcgggtggcaaacgagctcggcgccggcagcggcaagggcgcgcggttcgccatcgtggtgtccgtcaccacctccgtggcgatcggcctcgtcttctggtgcctcatcattgcctacaacgacaagatcgctctcctcttctcgtcgagcaaggtggtgctcgacgccgtcagcgacctgtccgtgctgctcgccttcaccgtcctcctcaacagcgtgcagcccgtcctctcaggcaagtccaaagcctcgttgccacaagtttcgcattgcattcatggatggaagtttggcgagccatgggtgattgattctaagctagctccctgatgcattggcattgcaggtgtggccattggctcagggtggcaagcactcgtagcctacgtcaacgtcggtagctactacttggtcggagttcccatcggtgccatattgggctggccattgcatttcggagttggggtaatgatccgaacacaccccagtacatttttattagtatgttttgggggagaagcagtaattttgttcgaatgcatggcaatgtttggattgattctgactgttcatacccaaattgcagggaatttggtccgggttgattggtggcacagctgttcagacactgatattagcctatctcactatcagctgtgattgggatgaagaggtgaactcctttatttccttcaaatttatcttgtcacaaaaatggaccagcacatttgtttgaacatatctggtgtgtttgcatgcaggcaaagaaagcaagtacaaggatggaagtatgggccagctcaaaatgaagcaaccaagtaccaacagtgtgttggtgaggtttcttggacacacaaagggggcacttcagtgggcagcagaagaaccgcaacttctgctcagtacaaagaggcaaaccatcagaatagatcaagaagacgagaacattttggaaggcatagctggtgtttcacatatagacatattcacgttaccttaggctgcagacagccagtttctgaagacgctcgtttgccaagagaacattggagaagagtgcagaggcttgcgtagggtgatagtatgtgtgagttgggattatatttattagccttgtaacctgaaatttgcactcggttgcaagttgcgacatgtaagcactgagtatactatttaatggatattgcaactgcaagcctgtgtgttgttcgcggattgtaagacgtccggacactacaaaatgggccagacggtagcccattaccatcgtgtatgatatatatgcaccgaaacgaatccactcctacggtcctacctcacaaaccagagcctggccaacaccagcgatcagaacaatattctttcatcagctctttcagagtttcagttcgttatattattatatagcgaacgctggtcaattgacaatttgttgtttagccacacattggctccttgctgttgctgttctcggacggacctgcattctcttttactttcaaccacaacagagtactctgcctacgaactcatgaacattctacagatcagcctgtactgttacgactgtacacaggacttccgcctgccgccattgatagcggtaacaccgtatcaatgcaagtagttaatggagagaatatcagcccatgttaaccactagtaagtatatattccagggtaaaacaggtaaaacctgtgatacaaagcagtcacataactgaaaaagcgcacgatagtttgtgctactacaacagtaaaccaggacagaacacatccaacacgatgacgacgaggtcatgggggtttcgacgatagcaatactggcagtacgaattcgaggtgccgcacaacggcgcaccacattcacttcagcagggttttaacgatggatttgacattgagcttcttgaggtcagtgtaagactgaccacagccaacgaacatgactggagctccagatatataaaccattgaaagtgcagctccaacctatatatatattgagtagtcataaaaataaaaatactgtaaaagaaggcaattgcagtaaatcaaaattctgtgacagttcagaccttgtcgtcgatggtgtcaaacttggtgagcaggatgccatctatcaatctggtagtagggacagcggaaaggtctgctaatttctgttcaacaaacaaaaccgttcagtgcattccagtgaaagcacatgttgaccaagtttgtagggaaatgtagtatctcttataataccaaattagtttcattaaatgtaacattaaatatattttgacaaaaaaatttataaacttggtcaaaattcaaaaattaaactaagaaaaagttcaaagcgttttataatatgaaacggagggagtagcattcaccagtccttgaaagactatcagtacctggttaaatttagtgagttgatcaacagcatcattaccaaccaatgcttccccaacaaataaaactagatctgggctattgagattgatgagcttggagagtgctctcatgagtggctcattatcctggcagagaagatatgttagatatgtgttgaccagaaaagatgcattcgaaggacataaatagaacgacataagactctggttaagccactcaaccaacctgcatacgtccagcagtgtcgacaagaacaacatctgacttattacgagtagcttcctgaatagcctcctttgcgacaaccgctggatctttttcatatcccttctcaaatataggtatctgcacaaattctagaatgtaaatatccaggaaggtatggcacatgtatataactcaacaaaatttagcagtgagcattcataagtgaatgccgagtagttccactgggactattgtcgttttttatcgcataacaccaggaggcaccccacaagaccattatatcaatacagttcaacgcatttttgcgaagaaaaaattattcatacaccatcccagactaaagaaaaagtgaaaccaaactaaaaccaactgatggagactagatattccccccctaaaactacaatggtcagagtaatgggatggatattcaagtgtttagacagctacctgaagcctgcgagcatgagtacgcagttgctcaacagcaccagatctaaaggtgtcacatgctgccaggcttacactgaggttatgctgaagaagccaataagcaacctgtaatattacaatacatgggatgagcataattccatgcaagtatggcactattcttttcatcaatggtgtataaaagataactctacctttgcaagattggtagatttgccaactccattcactccaacaaaaacaataacatatggcttcccacgctctttggcagcatgtacatcccttaatatgtcaatagatcgccttggggttaagatgcgaagaagagcctcctccatagctgtctgcaatagttacccaaaaaaaaaaggagtattaggatttaggaagctaaagagaatatgtgccctaagaaaaaatttgcagaaatttggactagggtgtgctacaaacctgaacagtagaggatatccttgtgaaggatcccagctttttgccctcaaggctagctgccactgattcacaaagtttctctgcaatttcttcagcctgcattaagatgaaaagttttatttaccttggataaataaataacaaagaaggcaaaaaaccactccagtaagcttatcaactatcatgcaagtgttctagacaaaattcataccacattcttagtcatcagcctatctttaagcgctttgagtgcaggttggatgtcagacttctcaagcacattgttacctgcaatgctgagcacaggaaaaatagaaacaatgccatttaagttcacaggttaacagattataagagggagctgaaaatctggcaaccacaaatacttgaatgcaggatcaagggaaatggaaaacagcaatttcatctgtgtgtgtgtgttgatctaggagagggtaaacaatgagagacagaacaggctgcaggctgcaaaagtcatctaacaccaatacatagcacaaatctgccattctactctacgcataacttatttaagaagatgactgaagtagcacaccaaattagggagcattctagaaagcagaaaagcatatcagggttgctctctgcggttgaaacaatgagctggctaagaataaaaaacatgctgaagcttaaaccacccaagtgtatatagcgcatttgaaattgttaagcaaacaaaactgactacacattatgccatgtcaaaagatgcgaaacatgcgtattacctcttgaacatcgaggagaaccatcctttcttcttttgggaagctccagaattttcctctccatcttcctcttcttcatcactatcactgctcacgacatcatccttatccatcatgctttccccctgcttgacaaccacctggtctatcacctcatcccctctctcatcagctgggtctgtgaaatccagcttcttcttgtcatcaggtgtgtcatcccaaaccctatttttcttcaaattcttctttgtgttagccttagaggtgttcttggccacattactagcaacctcattcttcttgttacccttgtttctcatcttctgtaacttatttacatcaaaggccccatcgttggggtctccgttctcctttcctttaacaacaacactgcgggcatgagaattgtccttgaggctattctcttgcatcttggaattaccatttggcaaagtgtgctccttcccggagtcaccatcagagtcgtccttccccgagtcacctttcttcctaccaccaccagagccctgagtgtcgccacgattggtcttagtggtaaccttggtgggccgggaaccagtgacctgtttattcttcttcatctcctcactgcgagcctcagcctcgaggtggagctggcgaaaaacctcattgaaggcgtcatcataggaggtgcgcttgggatcataaatctgtgagaactccttacggacggcggcgaggaggtcgtcgacgtaaaggaggtggagcatgcgctggtaaacggcgacgaacacgaggccgaggtcattgttaaaggtccacttaagcgcataggtgtcctgggagaagctggcgtcggcagagcgctcctcgaggaggcaggagcggatgagggcgtcgatgggcgagcccttgagggcggcgccgccgagcgcccggcatgacgaccagaggatgaggccgccgcgcgtgaagatgagcagctcctccaacatctcgacggacgaacctgtgatagatcaaacaacaaaatcgttgtgtttagattcgatccagctaaacagatcgagacgataaattgtgatgcagagacagcgcgcgagtcggatggatccgaggcagggattggcaacgatttgccgtttcgggagagaagtcgagttcgatttgaacataaagtttggctagaacacggggacgatccaagcgagcgcaagtctgctgggtgggacactggaacacggcggttgcggatcgaggccgaccgggcggtggcggcgcggatcgtggccctcgtcgatcccggcggcaaaccctaggccggcgttggcgtggatcggggccggtggcagttgccggcggatgatggcgcagaagagttcgctcggtgtcccgatcgacgccaattcgacttcaagctcgcgacctgaacccaaaaatccaccaaaatcccccagcccagaaccccaaaatcccccaaaatccaccggcaccagaactaacaaagagggggaagcagcgaggcagagaattgaaccagattcgacagaggattcgagagcgtagtcgatcccagatccgagacgagaggggaagcaaaggattcttaccttgttcttcttcttcgtctgcttgtggtgtgggtgggggaaaaaactgaaaaaaaaaaataaattctctgttactccaatccggtgtcctgctatttattcctcgcgtggtggaagagaggaggaaagggaaacgagatcgggctaggcgaagacgcgtgcggcgtgcgggtggtggccgacctcgtttgaccgaccgcgtccgcgtcagaccgcaccaccaccagaattttttttatttatatattttttattaaaatatttacaaaaaatatattttttttgaaaatttacaaatctaatcgtcttgagatttttaaaaatcgtccttctagagggcggcaagggatctaaatgcaattttccagcacaacttgttagctctataattttacaatttaaaattatattatataaagttagatgaaataaaactttatatcgaaattatagatctcaaggagatctacaactttgtatttaacaactttttcatttaagatgttttagatatccaaatattcgttacaaaatataaaacacatttaaaaaaatctcatatctatatttcaaacgacattggatggagataaattttatataaaagttgtagatcttgatgagatctataactttgtagtttatcactttttcatttaaaatcatttagagtatcgaataagcattattagtttttaagcaattaaaaccggtggaaagggtttgaacataaataaaaattttgcatttagatcccttgccgctctctggaagggcagacagcaggcgattagatttataaattttcgaaacaaaaaattattttttaaatattttaataaaaaaatgtataaataaaaaaattcccaccaccacaacaagttggaggcccaaacaaacgccacgtccgcgtcggagcccggcccacatgcccaccaccccccaacgtccgaagtgagcggcccagctccgtgccagccgggcatgccgcgtgctactgaatgggccattgcccacgcactgctcgtacatgctgacacctggcccactccggatggagtaggaggtgaatgaagcaccgctgacctcgttacactgataacgatcaattgatgataatttgttggctaaccatatatttgatgatgatgatgatcacacgtgttttctaaagtacaatcagttgttgatgatagttagttaaatatactgatggccaaagagttgactggctaactgtagattttgtcgaaatgtaaccagtgttgatgctgacagccaaagaattggccaaagagaggagggaattgcaagcaaaccacgcctttgggggcaatttgcttcatgggttattcaagatgcataagataggttgaaccatacatggggtgtgtttagttcacgccaaaattgaaagtttggttaaattagaaaagttagaagtttatatgtgtaggaaagttttgatgtaatagaaaagtgggaagtttaaagaaaaagtttggaattaaactcggacttggcatttattttccatatgatgatgatgaacattccacatatcacagttcgagctttacaacgaatcagcgcctgcaaactacacaggccctgcaggatcagcttctgctgaactgttcacgtactggcatgttagcaaccttcttcactagaatcttgcttgggccaaggattgggctactcactgtgttgggtcgtagtgcagccggcccaattcctaacatggcactgcctccttggcatgtcaacatgtcacccggcctgatgcatcacgcgaacgatgtcaagcgccgtcttctcgttgatgctgttgctctgctgcatctccatgtagtccctgtacctgatcccccggaactccaggccccggccgtccgccgccatctccggcagcggctcgacgacggtgtccatgcacggcccgatcaggctcacgaacgacatcctcgactgctcgccgccgaccaccgcgcggtggagcacgcccttgtaccttccgttggtcacaatctgcacgcatgttcacaccaacacaagtgcatactgagctgaatctcgcacactattctaaattctcgataagatatcccctctgtttacatgctatccaaatggttataatttttttaaaaaaaattaataacatagattaatatcaatacaccactccgtaaacatacaaggttaaatttaacatgttataatgaacaaacaaatttgaaagcgaatataagtttaatttttttgactcgtagaagttgaattttagtttgtatgtttgtggagtaatatattatatcatatattaattcatctttttatatatattttttataactatttagatgatatgtaaataacataaagatcattatctaaaaaaataacataaagatatcccttcaagagtttaaaatccatttcacagtttcataaacttctcaagaacacgcatagtgattgttgatccaatacctccaactgatcgccggcgatgacgaagaaggagcccgggaggggcttcgcgaggagccattcgccatcgtgcttgacctggaggccatcgacgccgttctggaagagcagggtgaggaggccatggtcggagtgagccgataatcccatcgcctgctcgtccggtctagagcacgcagggtaatggttccccaccaagatctggaagcaggactcgaggttgagcgcttcagagaggcggccgccggcgaggcccaggctctcggagatcgccttggtgagctccagcaacagggctctcgtgcaggtcgcgtactccgttgcaatctccctgacattgttgacacatcacaaatctttctttagaggaaggaaaccacaagaaaatcttcacattacaccggtcgatgatgtcaatggcgaagaatttttacgattggtaataatgatcatggatgtacctcagctttgcgggcttttcggggcagtggaattcaggatgagagaacatcttcaggtagtccctcctgcatggtacggcgtcgacgacagagtagaaacctgtaccgatccgtataggatccatcggcttggcacgcatgtactctttcttctcctccaaaggtaatctgaacagctccttgcaggcgtccatgattgcttctcggagagcctcgggcaccccatggttagtcaccttaattcattcatgaaagattcagatgagacgatctagcaatcaatcatgtcactgacgaattggagttgttactgataaatgcgatcattatcacacaatatactttaattaacaaacaatcaaacagctcgtagaaattttcgtatttgaaatagttcgtttccgaagtaaacggagaaaactttcttttttctttcacattctagacgagacataacaaaattaaggatatgttcgttttgagagataccccaacttaccatgaagaagccccaatcctcgcatgccctgcctaggtcgcggatcgcccgcgaccgctcgtcggccgcgccgttgatgaggacgccgagatcgacgacggggattccttgggacggtgtggccgagccgtcggctgcggcggcggcggattgctcctcatgggatgggagccgagacggcgcaaccatggctgtgcactgtggagggagaaaaacaaactggcaaatgagaaagtgagctttcggagggagatatgtaagccggatcgttcggtgcaggaagctgccgtcgtttgctgttgctggtgagaaaaactggcaaatgagaaagtttgccggtttttttttccttttttttcttcctccgtgcacgacaaagacatgaccacatggtacaggactacagcgtacaggtggtgtgatttgcagttgttttcctgagatatttttggcggcgtgggggtggggcgcgtgatatcgagatcggtcggttttccttccgcgatttcgttgtggatacttggatgggccggaatacatgcctgaccacatctgtggatggggaggaataagttcactttgactcccttaaaagtgatccgaatctaatccataccactgaactataaaccagatatcttgacccctatactgttaaaaccggtgcaacttgactccctcggcagttttgaagagtggttttgctggcgtggcgtccatgtggtaatgttgaccttgtctgccgttgaaatggcgtttgggtggcattaaaaattaaaaacatacatatgggacccatttgttattcagaagaaaattttgtgggtccactgacatacgggacccactgatatctgggacccgtacgtcatcccttcttcatcctccctctctctcttccttctctctctctcccccatgcggccacgccggcgtcatgagttcctgtcgccggcgcctccacctcgccactgccggcacctccacctcgccactgctggcgtcgtcctccccgacctctccatcggggttcatctcctcgccggctccgcatccatcgcctcgagtcagcgtgggcggtgacgttggacgagctcctccgggacgaggccgctgccaccgccggggggtggaggtggacgccccgtgtgcgtcctcctctacgacgcgttcctcctcttggcgcgcgccgtggcgcgccgcagcggcggtggcgttcacgttcttcacgcagtcgtgcgccgtcaacgtggtgtacggccacgcgtggtgcggccgtgtacacatccccgtggaggccggcgccatcgcgctgatcggcttgccggcgctggagctggagggcttgccgtggttcattaaggtcggccccggcccgtacccggcgtacttcgacttggtgatgaagcagttcgacaggctggagctcgccgacgacgtgctcgtcaattcattctacgagctcgaacccgagctgagctagtaaccccatcaaagctacagtagcatctatctgctggtgataatgaaattgcagacttgcctgcttgcttgccggcgtcactgtcggcttgcagctggcccgctgctctctgccgcctcccgtgcacgccagcgcagtcgagccattcgtcgccgcccgccagctgctcgctctcgtcacccagcgcagcttcggccctcaccgcccgccgccggccgaaggggaagaaccgatgagaaagggagagaaagagaaagaaggaagagagggaggaggaatagggatttatgtgggccccacatgtcagtgggcccacaatttctttttgtgaatgacaaatgggcccgcatatatatttttaattctaatgccacttaagcgccacgtcaacgccacataggacgaagacctagtcaatactgccacgtagacgccatgttaggaaaccaccatccaaaactgccgagggagtcaaattgtaccgattttaatagttgaggggtcgagatatccggtattacggtttagggtcatggattagattctggtcacttttaaggaactcaaagtgaacttattccggatggggattatgtactaatttcatggcccacaaacaggaatgggcctttaatctgtactaaagggctgatgatgttttacataataatagaaattaaggtaagattttccttttttttccctaaaggttgaaacttagaagaaatctatacgtgaaaaaaactttctattttttttcttaaaaaagccatacctaaattttaagaatatcaacttacaacttgaaactctaaactgaaattttgaaaatttcaactcaaaatttaaactttgaaattaaattttaaaaactttcaactctaactttgaaaactctcactcgaaatttgaattcttttaagttaaagtttgaaaactttcaactttttatctcaaatttgaaaaacttttaactcaaatttgaaactttcaactcaggtttgaaaactttcaagtcaaaatttgaaaactttcaactctagatttgaaactttcttcagattggaaaactttcatatcgagattcgaaaacacgtgtgttaacgattttttaatcgggaaaaaacgcaggaaaaaaggaaaatacgcgcgaggggaggggcgccaaaatagggaaaaagattgcaaaaaaaaaaagaaatgaaaatgtgtgcgtggggggcgccagatggcgcgcacaccagctctattgttggcacgtgagcgccaaatagcaaccccaacgttttggtcttttcaatcctataggctcagaaaaggtgtgtgtgcgcttagagaaagatggttgctggcaatatactgggagtaacaactttattttatatacatgtcgttgatattatcggaatagaagctattcatcaatttctttgattgctatcaataagaagttggtgacaatatatcttatggagtggttttaataatgttttcattgagtaggccaaccaagcaactcattaactgagtaaggttgttcttatttctaaaagttcatgtatttggttcatgaattcccaagtgatttacccattgtggccctccctcctcctcctcccccctcccctactgttcttctcctccctctccttttgaccgcacaaaccagaaattggttcatcactcctcattctcctcctcactggctcctactcatccacctactctctgctccctctgctgcttcatgcctcccgtcgagtcgagaagcaggccaccaacaccagatcgagaggcctaggcccactttattgttggattggccccgagcgcatgctgatgacgagggtgatggactgtgtcttttccgtggcctcctcctttttgtactcgtggcgtggcaacaatcgctaaatcttactcacacgaaggatgtcggggaagactcccaccagagcgagctcctcctccctattgttggtgatgatagagggggattccaacgaatgtgctagatatggagccacgattgaccgtcgatgtggtggtgcaatggtcatgttgctcaccaacccatcgtgctgctcggaggtgttgtgcacaggtacgtcgtgtgatgcgtcatctgatacctttgggtataaacctataagaatggtacctgagggtatcagatttgacatctcggataccaactgatatccactgatactgtatgaaggcacgagcagataatacgagtcgtagctacttggctagctgatgaggcgtctgtcactattgaagtagcacctcctctcctcttctccctttcattcctctccttgactgcaagctaattttattccctatcgttgctacgagtgtttgtccttctgctactgcgaccaccgttccgacatgtaccgtcacctcctgacgtcctagctgccgccgcctcctgttaacgtctcgtcgacctcttctgctaattaattcgtgcttctgctcaaggtgcagggtgcgggcgtgcaacgtggagcgaacggaggcgcggactcgcgagaaggaagcagtggtgagtaatcctctgcttttcggctgattaagcaggatcggccaatcaggcgttggcggtgagaaatccattattttaaatagcaggttaaaatgtttagcggttagcttcttaaatagctatagcggtagttatagcgggctaaatggagctatagcgactaaactgtacgtgagagcaaatagctataattcttctcaaaccgctgtagccggagatttaaaaccgtggaaaaaacacgtcccgattctttggttcgtggcattgacgtacaaataaacgtccgattaagcggctaacttagacctgacttttaccgcactgattcccatttcccactgcggccttgcacaatcacacataacccttttttttccctctcccacagcttcacgactcatcgatcacacatggccttgctagttcctaactttattttttcttcgaacttctaacttttccatcacattaaacttttctacgcacacaaccttttaacttttacgtcacatcgttccaatttttttaaactctcaattttaacgtggaactaaagacagccatattcacccactaaggggactccaatgcagctgtgatcattacatcttacgagccccggcgcccatggtcagaaagcggcacttcgcagcctgctactagccagaccatgtgcaactgcaaacaatgacatgccgaaaccatggatttccttgtagtactccgaaaactacttgttggctgtggccgtctgtttgtgtttgttatactttgagaattcaggtatacaaagtcttccctttttcctgtccttttgtattcgtttttaagcaatctactctgaccaatacctaaaacaaaattacaaagtttgttggtgccacgcaattataaaagttattctttacaattttttacagtagccactagccaatttggaagttaaaaggatgttcgagtagattctgtacagatcaatgcacagcaggtgcaatttactcatagggtgcccatattgtaagagcatatatatatatatatatatatatatatatatatatatatatatatatatatatatatccacaaagagaaaccgctccatgtacatcaacgttgcacgtacgcaacaatttctatgtagcacatctagctctcttctgaaaaagcagtgagctagctagcctagctagctactcgtcgtaatcatcgtaatcgtcgtcatcatcatccatatcgaccacaagctcaagctctgggccgacgtacggtgcccctgcaacgctgaaatcctccggcaagtccgtctcttccagaaaagcaaaacctgaatcaagcaaaatgacacgtacactaccagattaatcatcagatagtactaaagttgtgaacgagaaaataaattctcacataatagatcgaatcaagcattcttcgcgtgtgtttgtgggggtgacgagacgtgtacctggcagagatgggatggggatgtcgttgaagtaggtggacggccggccgagctcctccgagtacggcggcgtgagcacgtcgaggatggcgcacggcgtgacggcggtgaacgcgtgcatgttgccgccgctccgcgggaacagcaccgacgtcttgcacggcgcgtgccggacctcgtcggctgccaccaccctcgccaaaccacctgcgcccgcgcgcaacaagttactcccactgttagctcttggtggtcaggtcggcacgaaccaatcgatttgcttctgaggctaatgcgtaacacgggtgctaccaacgaatcagattcgggcactgaacgcacgcttactctttctggagcacggcggcggcggggtgacccaatcgtacgacttgactcgaaccgagccgtacaggagcttgctcaaaaccaccatctccgggtggtcgtgcagcggcagcgtggcgcccgccggaaaacagaacacgcccatctgccaaagccaaaccattgaccaattaacctcgtcgcgtacgcgtacacagcacaagactgctattgtgctactgctctttgcattagttgatcgatgcgtacgtacgtaccgagaaatcggcgcactggtgtatgtgcatgtaggtgatccgcgtgaacgcccgcgccggcaggagccggccgtccttcgagctcacctcgtcgtccgacgacgaacacgaagacgacgacgacgacggcggtgactcgccgtcatcgatcccgacgtccgccgcctccatgccatctacacaagagatccaccatcacaccacataagccatcacatattatggattcgctcttcactccatgcgccgggaagaactcacgaacgtacgtaccaaggaggtgttgaagccacctgatctccccgatggtcggcgccgcggacgccggcgaagagaagatcatgtcgcacgcgtcgtacagccgctgcatcttgctcagcaccatgatgtgaggcgggaacgccacggccatctatctatctcaagttctcaactctatataagctgggccagcacgcgacacgccccctcgcacgcaagcaaaagctgcaccaccaccaccaccacgatccagtcgtcgtgcagtacagagaagagggtgaaaccccgtgcgcgctagctagctcgctccactactgtattttttctcctccccttatcaaccgatcgatcgaggcgttggacttcgcgggtggatatatataacaaatcgcgcgttgcgttgcgtttttgcgtggtgcggcgcgcccggaggctggagattattcaccgtgccgcgggcggaggcggggaaaccgtgggcttagccaggcgatcacccaggtgcgcgcgtggtcgcgtactactactcctactccgatccactggccggggggagcctgctgttttccggtggtgttgatgcggcgcgcacgcagcacgctacatgtgtggcggtgacgccgtctcgctctcgtctcgttcacgttgcttaattcggtctactgtttctgacgaaaaaaaaaacaaaacaacttgctgttgtgatctgtgtggtggtgtgtgggttgtttggtcgcaggaatctcagacagagtctaatttgggaatgggcatggcttgccgtctcttaccggttaatagaatactccaatccactgcagagttgaccacagtttaagctcactgatcgatcgatccatctagctcttggtactatccaagatacagtgctgtgcttttgcttgttccacgccgtgacgccctaaaagttcaaccatgcgaatggatatgagacgggtggcgtgagtgacactagtacacaactatacattgatttgttctaaaaaatcaactatacattgattaatttcttctgttagtccccgcaccattggcacgccccctaaactttgcgggtttttttccgttccagtggtaagctgccacgaaacaagcatcaaatcaaagcaaacgacgatgggatagccgcatggatagggaaggaacaaaagcgatgtggatggatgacggcactcacgaacggaaaaggaccttcggctccttttcttggaaacttgggacggtgcccgactaaaataaatttagcccggtgcaaaagcacaagccctttgtgtttctagctttgtcatcttgcttggattcgagagacgttcacactgtcttgactgtccggttcaggggtcgttctaggatcacgtctctccctagtttcattaccggtgttttgttgctttttttttttgctgcaacgtttgtgaggcgtgtaaaagtaatctataaacaatataatatttcattcaatcatctattatcattgtataaactagtccacatgaaaaaaaacaaaagttactcatatgtatatagacgactatgtgggataaataatattatctactctctccatcccaaaataagcgcagctatgagtttccgtgaccaactttaatcgttcgttttatttaatttttttgaaaaaataaaaaacataagtcacacataaagtactattcatgtattataatctaataactataaaaatactaatcataatttttttcaaataaaacatacgattaaagttggacacggaaactcatagttgcgcttattttgggatggaggaagtatctctactcctctctcttatacattgcacagattgttactccctccgggctgataatacttatcgttttggataagggtgaggtcaaactttagaatatttgattatgaaccatttttaaaataattgtctttcaaatttggtgactacatgtatagattagtcttaaaaagtactttattaagatcatatatttgttaacatttttatacatattataatagaaaataatggtcaaagttgttttctggagaccgtgcccttgtccaaaatgataagtattatcaacccggagggagtataggaaaaatctatttatatgagccacatctatatggatcactttaatatatacattggtgatgccctcacatagagcattacaatcattaataataaaatgcttaacgagacaatttccaaatagccccaatctctaatgccatagttaggcctagacacttaaggcggacatagcaagggttgaaagaatgagttgtgatcgagcttgtgactatccttataaacctgacaataaaacattaaatgctaatgttcactataagctcgtggtttggtcacaacagaaaataaaataaaataatattgctgcccacaggagggagttagttcatcgatcccttgaataaaaaactcccaagaagcaatattttctaaactaagtgggacctaacaggacccaccttaatttctctcacaggttttaaccattattatggagtttgctatagctttttttttaataatggatttttcattattagataataagactctatatctataaaagatatacacgggcaaaacatatataggtaattagattccaaccctcactaggagaaatacacaggaacacacacacataaaagaaaaactagctgtaaccctcattgacgacttattatttctattgcaacatgagagggcggaagtggagaatcgaaacagtttgtgctacctgtcgccacaccatctctgcctcgaatcacaatgccatctgctactaactaatgtgtctactgtcctacgccatcatccaaatccccttacgccgccgcattaattccgaacgcccctagtgcacccgatgtagctctaccatgccaccgccgtctttcacagactgtcgaactcgccatcactcctagagtgtcgtgaagccgtcaagcatgacatgcacctgtctttactgccatgagctcaccagaggtactctactgtcgttcacaccaatccgcagctagaccttggcgtcgacacttgcttggtagttgccgcctctaggacgccaccaccgagagcctctgctggcatggtcctcatatgcgtcaggcaagccaacgacaattgcatcatcagctagcccaatcattgacaaccactgaccccccgtcctcgcctggccgtggtcagatctaggcgctgaagctcacctagccgccaccgcccctaggacactgccaccgagagccaccaataccactacccaccatgtccaccgacactgccagtcctctctgccggtgacagatgcgggtggatgttcggtcagatcgaaaaatctggtctcaatcttcgttcttttagaaatttcggtcatctaaaactggagaccgattggtcttgaaaaataatgaagaccaagaaatttggtctcaggtaattcagtattggtctcgttcatgatcgaaatttcaaaaggtccaagataatcaagccaagtctctaataagttctagataaaaaaattatacacaaaaaatatcacaaatcaactcacttcactatcatgggtcagatatcaaagcatgttggagcctaaaattgggaaaattttggtttaattgggttgttggaccttaatgtacctaatggaccaaaaatcgatttgttcggtctatttagttaactgaatgtactaaccgaattgatcgaacaaaattcgatctttcaacacctgaggtcgaactagtgatcgaatttctcggtctcgctcttttcggttcactctttttctgcccaccccctagtgacagaggaagggacaggggactaacctagtctctgcctaacgtcgccgccgcccaccaagttcattggtgacatagaaagggacggaagactagccccccgtcttcagccaatgtcgccgcatctcaccacatctgctagtccgtgctgccataacatccacgaccaccaccggtgccatcactgaagtcgtgccatcttgctatagctagtgcttcctgcattggacctcaccgttattgttcattgttgtatatacatttaggatgcccttaaggattgttttggttgggaaacaagatggtcaattgcccgctttattctaaatagcttagttgtttcgacaaacaaaatatgtttgtccataatcacaattgatggggggtacccgtagactgtattctgagggtattaagatacattggtacgaggatctacacgatacgacattaagcatacaaaagataaggattatactggttcaggcccctcgtaagttaatagccttaatctagtttatatgggattatgaagaaaaccatagaatacaaaagagaacaattgaactccaagatttagcgacgagatccttgtcgagagggtctcgacgatatctatcggcaaataggcttcaagtcctccaaattgcttctgtggtgccgggtgtcctatacccctcagggggtatgtatttataccaaagatcatcttggtctccaagtagaactcggagatatcggatcccacacgatacaatacaatccttcccttctccgagtaggatattgacacggtcctactagtgaaggatatttcccataggaattcgccaattcccttattttacatgtatcctttccgtatatcgtaagatatgccgtattcgtatatctcatgactaataggatagagggtatgacttatccgtaaccctgacaatcaccttagcacttaaaagtaaaagctaataaagagatgaaaatggagtcattcaacaaatttgaggaatgcctccacaattgatcactcatattaggcttagtccatgcttaccagattgactactcttctcgtatatcgtgagcatgttttttaaattgctaagtgtacatattttacaaatactttctatataaaagttctcttaatcgatagaaggacgatgtggtgacataacacatattgagcgatatgagtaacgaatgaaaaaaaacacacaaacaccaaaattactcccaaccatagatttagtagttactaatacaccataacaaatcgatggttatatcattttatgttagtagaatactattattagagagctctatagaggaattattatgtgttaggttttaagctttcaaatgcctttgtacatgtccttgagcgcatatgatatggggtacccctaatgggcgatcgatcgccgtggggatggggtagcgatcagattcgctccccacctcccccctccctccctccacctggtttccttttttggcaccgcattactttcctatttgagtaaatttatacatctaaagtttatacacctaaagtttacacatctaaagtttagagaccaaaagtttataagtcaaaagtttatatatctgattcaaatttgaatttgaattcaaatatttttttatatatagtatttctatacatctaaagtttatacacctaaagtttatagacctaaagtttataagtcaaagtttatatacccgtttcaaatttgaatttgaattcaaatatccgattcaaatttgaatttgaattaaaatatttttcatatatagtatttctatagatctaaagtttatacacctaaagtttatatacccaattcaaatttgaatttgaattatatctgattcaaatttgaattttaatttaaatattttctatatatagtatttctatacatctaaagtttatacacctaaagtttatagacccaaagtttataagtcaaaagtttacatacctgattcaaatttgaatttgaattcaaattttttatatatagtatttctatacataagtttttctaacttttgtttttcaaaaaattttgtgtggtctactgcagtagaaagagaagaaggagaggaggaagggggagaagagggaggagtacatctagtagtataggggagagggtgggcaggtgatcgctgggcgggtgggggagcgatcacccgcccattagccttttcgtatgatatgagtgtctttgtaaaagagaattagatagtaaaaacaaggaaatgataatattacgctgaaatcacacttcatgcatgttctaggctcccatcggttacccattttgcctaataagccaaaatggcttattagaaaataaaaattaatttataagtaaaacttttatagatttgttcgtagcgacttaaaagccaacattaacaaaaattacgttaaaagcatctcaaaactaacttcaaaatcaagttcaaaaatttaaattttagcttattttttggctgtttaggccaaacgacatggtttctagttgcccatcgtaaatgtgtggaaagagagcgagcgacgaggtagccagccagccaaacggccttgcttgcgttttcctcttcctgcaagggaaagagatatccacggccttgctacttgtggtataaatgagagagatggcgataagcccacaattagcaacttatcgctgaagaaacagcgaaactacgttggctttaaggaaaaccgagatagtagtagtttgcatcgagtgaatcaagcagaggaacatgccacagtccgtttcaccctgcttcatgcgggcagcttgcagttgcagggcttgcagcatctcaaactcccaatctcccaatctccttgacctgacacaattttttttaaaaaaaaaaacacgaaagagagaaagcgaagaatctcttcgaccagataccacatgcgttgttcacaaaagaaaccgtggccccagccaaaaaaaaaaagtaaatttcacttcgggccacctttatttacctatgttttactttagaccacctttaagcaatattttcactttagactgggtaaacttatctttgtttcactttggaccacccaactctcttctcaagcatatgaacgatctcgattacgccgtttcctactcgtcaatgaactaccacagctatatgtaagactattttttcgacatattacaagttggatgtagatggataaaagagtgagggtggtctaatgtgatacaaaggtaaaaatacccggtccaaagtgaaaacattagttctaaggtggtctaaagcgaaatatcggtactagaaggtggcccaaactaaaattaactcaaaaaaaaaactctcccgaaaaacagcagcagcggtaggacaaagcgcgccgcgaccgggtccggctcggccacgcccattcccctgtgtggcctggccgcctggccgcctgggcgtggaagccgtgcgcccgcttgcccgccctccgcacgggcccctccatgtgcgcgcggttctccaagctcgctcacacgcacgcagctcgtccggtccgaatgctgcatccgctcgaaaccggcgccaggaggcgtaggcagccaacgcttgtcgcgatctctagttataaaaagagaaaattccctggttcccttaaaagttcgcacaatctattccatacccctgagggctgagatttactcattttcttctatacccctaaatttcattttggtttctttctatgcctctttcgttagttaaccactagttgatcattaaattcctatcataaagtctattttgccttttaaaataaaaaaaatataaatttatgaaaaatatattgatggagtgtataaatttattgtacgcgactattatatttatgagtttattttgtgatatataatttaataaaaaataatattttagttttgcctccacggcaaaaaattttttatctatgataaaaatttatttttagatatgacataaaactaaaatttattttagttattaaaaaaatatttatttagcacataaataaatttatcttatagaaaacgttgtactactataaaaaatatgctatatatgtatatacagtttttaatcgtgaaaaatattattttttgatatatataacaataaattttgccatagataaaaaatattttttgatttgccttcgcggaggagaaacaaaaatattattttttattagattatatctctcaaaataaactcatataaatataatagtcgcatacaataaatttatatacttcatcaatatatttcataaattaatattttcttggttctaaagggcaaatgaactttatgataggaatttaacggtcaattagcggtcaactaacggaaggggtatagagggatccaacctgaaatctaggacatggaggatcaacgagggcgtcaagttaagatggaggcccaaaccaagtcgacttcgagtatgttttagagtcctggaccagtctgcacttaaacgagcgcccaggtcgcatacgtactcggattggggcgttctttatatggatggaaagctaagaagataacatttccaattgttctggtcccacattcaaattctttccgagtcaacgggaatcgaccgaacaagttaatgtccagaatcagtcccggtgttgcgtcaccgtatttaggcttttgtgccgtgtatcgtgttggaacccattagagttgcatcaagggttgtttgcacgaacttaaactctatatatcagtacacgccgtcacctttggggttttgcttagattattctgtcaagaacagtttcgccgccagatcggtttgtaagaccccaatttgtgagcttaatcatttatatgcaattttggttgtattcttccttgttcttgtttgtgttcttcgattcgcaaatagggattagccttctcggcgaggtcatccgcatttcaacacgtgtgataatcaaaggagacatggtgctgcgattgcggggttcaagagcatgttcgtttagaagcccgatcgatttgtgtcgcgactctacctaaatcgactttttctcataacctttcggaaaatcgggaaccctagttcacatcacctggtccatccatactccatcacgtccacccttgccgtggtatattgattaggttaagctacactttagatttagcctggagcacatgctagcctgtgggaagtacatgtatatcttaaggctatgttcggttccttggaattaaacccccaaggggaacctatccagggaggaattaagtggatccttcccatgtcacttaatctctgtgggatgaattcccttgattttcctaatccctgtcttcaaaacgtttgttcggttttgacttggtgcgcctgcttaaatcccgcgtcaaggcagcaatagacaacggcaacaatagaaggattggtgctttcctgcttcaacgttgcacgctgtccattgagtttagaatagcaaaattgttttcaggtaggtagtttagaatagcaaaaaaatattgcaaaccgatatttttgtataagtgaaaagtgcaacatgaatgaaattacacttcagtaaaaaaatattgcagtaacctcatcaattacgcgaaaaccacattgattaatcattaaaacaaaaatattgcagtatcatcaaggcctgtatccggtttaaggcaaggaggcatcacccaacaaagcttgaggtcacttgacaatacagagacaactaaatacagtcatagtagtgaaatttgacaataaaaaaagaaaaagatgaaactatgtcatgattcacttgagctataaaaataaatgtgagctgccacaccaggactccttgaccaaatggttacatcagcaatatacaatggttcagagatcaacatttgttgctcctgcaaaaagccatcatcttgtacatgtctgctcattcactctgtatctgaaccaccatcctctcagacttcctcccaaagcctgtagagaagaaagaagtttccttcagttttcagttgtaaaatgcaataatctaggcaatgcttttgtgcagtgagcaattgtctcaaatttcctggaaccagccaactattgatccttggcaacatttttaccaagttttcagtttgacaagtgattgtttgtaagctgattgtgtgct

SEQ ID NO: 5164 - DNA, 15139 bp, Oryza sativa
atgttcataggattaataaatatgctatcaattccaatatagaattcaagcaaacaatccaacttcaattcctgtatatattcattacaatcaggttctgagttcttcatttagatctttgtaattggttcttggcagacatggaaggaaaaaaaatatcatttttgtaagggatatgatggcatagtcaaaggatttcaatgatggggatctgattaggctcagacaataagaaaaatcacagtttcaatcattaaccattggtagattctctgtaacttagacaccttttgtagttcttttttcttattttggaaataaatttatttaaataaaataaaatgatgattttccctgctatttcctggtaaaaaaaacttaggttcctttggcattgctccagccactaggttcttcagagcatctggaacctcatgagatgctctggaaaagctagtggcatttgatatagctccaaaaattaaggaatccggagagacgaatgtagagctggcgttgaattctaattaattttgaaagggacgtgtgatggcatagtcaaaggatttcctttttgccagcatggatgctgaggtcaacgggattccaatgttaagaagtcacactgattgcgacaatagtaccttttaggacatggcccatggtattggatgcaagttgatgcaactggtcataatccaaaaaacaacttttttgtgaactaggtacataattttaatatcttggagggccaatttggttactcataataacaatacattggtctattacataaaacaatttatgtgttggtctttattataaaaacattgtcgtattcgtaggtggatacccctattacaataggaataaccatttgtggagggacataagtgtaaattaaatatgcatgtctcgagccaacaatgttccgagctacaaacggcaataaaaagtaatatttacagttgcgatatactatatcatgcatctcacaccatttcaattactctagccttaaatggatccattgtacatttcccgaatagttctatattaaccttcaaaaattacaagtacttctctctatgatgcacaacatgaaaacaatttccctaaaaaacagcatccaaatcataaattaagcaataaacttataattgaaactaaagaatcaaaatcaagcatgtgggcaaagggcttatagggcccattgctgcacacatattttgagaagacgtttgaagtgacaaggagtgatggagggcaccactgttttctatggaaagtacttgacatttaactttttctataatcttcgagattcaaatttctttatgattttatattagagttggtctataaaatcgaataaatttacgagattatgatagaacatctcaagacaaatcaactcatgccgttttcaaaatgtttctatgttttccgactatgtatctttagaaatcaacatattaaaagttcaaaagtttattagatcttgtccaaaatgcaagtatttatgattggatagtagaatattgcatcgttttcttgttggcttgtagcaaaatttgaattttgaaattaattttagagttgatttggaagttttttttctcatagtttattttggagcattggattttgaatcattgagaacacagatataaaagttttactcagattattttggttgtttcattcacgggttattagtctaatgacgagaggaataagaccaagttccattttgcgttctgtggatcttaacttgtagcaataaaaagtttatgcaattgtgaaacatgtaaattaataaccttgtactaatagcggaaaaagcgcctagactggtgtagattgaataaaagactacacaagcaatcggttgaatcaatcagttcagcacataattggacgaaaaccaaagttgttcgactgggtaaagatattttctattaggaataaagcctagtatgaagcagtattattgattttgaagtaaaataaatttacttaacccaatcctaaaaataaaataattctttttttgggatggtggtcgaaccagaaccagaaagtatcactgatggtcatccaaaggttcaaccacctgtcagagtttaataactatgcatgcctcctatctaacggtaaccgatagtagataagaaaaggttagacgagtcaataataataattaaaagcgccaaaaaatatgttcaatatataacatcaacctccttccaaactgggggacagcaacgcaaagatttactatttgctatcctcccgaaatacacatgcccaaatatcacttttccaaattttcatttgttagcgtagcggataagggaaacaagactgaattaacctgtcgcccctcctttcccgccatctcctcccctcatgcatgcatccaccactatttatccccctcctccccctcctctacaccttgtctccgcctcgcgggagaccacacattaattcctcgcgccccatccatccattcccctgccatgggctgctcgacctccaagctcgagccgaaggaccagctggacgcctcggcgccgtcccaccaccgccgccgcggctttgccagcgacctctttggccgcgccaccaggaagaaccaccacaatggtggcaagagcgggtgcgaaagtggcgacgccgccgtccccatggccggccggcagcatgaggaggagcagccgcggcaagggaagaagggcggccgtggcaagcgcgaggtgcaagcggggtcgccaagcttccggtactactgtgagaatgccgccgccgccgccttcggcgaacatcgaggtcaagcaccaacaacgcaaatatgatctgtggatgaactcctggaacttttatcaatggtacgtttggttctttggttaatatcgtccaatttaaggttgatttgggatcaatctagaatattgttcatgctgcaaaaaataataactctatcctgcgattaattttttgatcgctgataagattgttgctgattatttacagcagtgcgggcctacaaaagaacaaattatacccctaaggaatgagagatgaatcagatgggttattaatcaggagctgcaagcaaattaggcgttaaatccacgacctttttcgcctgttcgttgcttttcctcggctgttatatctccagggatcaaagacgaagaaaaaaaataacttctgatgatatataagtcaagcagattcccaatcatggagagcataacgcactagtccctggagaattcatcgtagcagttgtaccaaatgcagtttgtacatgtaataccaacacgatgaatacaaattaattccagatcgatctcaaacgaaccccaccagcgcaaaaaaaaaaaaaggatatctatatatagttttaaaagaacaatgtgtactgtcatagcacatagcaaagatcgtagatagatgatttcaacggaaagaaaggcagtagataagttcatttcatgcacatatagagcataaaagcaggaaaaaccagtctatgcgtgccatttcagaaaggaaaattgtctggaaacagagaagcaggcaaaaccaatcgatttaaagtagggtactcttttgactttgtttaaagttaaactaatttaaatttaactaagtttgtacataaatataataatacttacaacatcaaattagttacattaaatttattattaaataatatattttcacatatttttgtcttgggttgaaaacattactttttttttctaaatttgaaatagtttaactttaatcgaactcaaaaataaattataatatgaaacacagagattacattatagcacattgtgcctttttttctcgaacgtgctttttttccccgaacgtgcaggagtgttccgaatcactactgctatacattaaagacaggattaggccatgtttttttctccaacaaaaattggataaacttctggataaaagtggcacgttttttaaactgctaaacggtgcgtttcgtgcgaaaacgttctatatgaaagttgttctacaatatacgattaatccatttttcaagtttgtactcaatatataataattaaaactcaattaatcacacgttattaccacctcgttttgcgtcaaacacttaatctttatcctcatcttcatcttcaaacaccacctaagccaactaatttccctaccctaatacgaatgagcatcctggccggtgacgatgcagtttgaccgaagatacgagcatttcgcttcgctctttccaaatctcccctgcgatgaggatcaccgtaccaccgagtcaagcagttttgtttgtgaaccttcttctcatgtgaaaacaaaaccatgagtaggatgcagccacttctctgttttcatgaagttgagcatattggcaaggaatggaatgtgatcttcattcagctccttgttgcaggatagcagagctagcctaatttcgtttgtaaggcagaagattttgacaagagttgcttcagataacaagttatacatagcattgctcacatgttccaaactattccgataagacaatatttcgtcaagctgtggaactacatcagcaaacttaacaaggcacctccactccgagtcatggagaagtgtttctcgaggagcttctgaatccagcattggtcattacccattgcacttcttcagtccattgaccaaattcttgcttgaatcaacatatccaaattccagtacacctcagtaatagcatagcagcactagaagaagtgactgaacttgtttcaatctgataattttgtttgaatcaaacaagaacgccttgttccctctcacagcatcttctgacattgacctgaaacattcaccaatgtatggcatcgcttcagcaaactcaaacttagacaaaatttcttgtactatgcaacaatttcgtccaaataaaactcttgggcaatcattagcaacatctagaaaggaaagttgagcctgaaacaaactgcaccattctgcacttgacagaaaagattccgatggtgaccagctggtgtcgtaaatcaattgccacgcatgatgcagcaccaaaaacttttgtggcaatccaacaccctatgaacttatattattgtcaactcattctaagagaagtgcatatgcattcacagcagttaaaggagatgatgcagcagtaaaaccagcaaccggaggaagcataaaaggcacatcggtaccttgcatattggtcttgatgcataacgaaaactgatattgatcttgtgtctgatctctaggtagattttcaactgagacgcaatcgtctccaagctcaacataactttgagctctccatgtatttttacccaacaatgcggccttgcttagtcatcttagcaggaaggaaaactggctttcacagcagtaagagcatatataccctgtaaagtaaaaagatcttcatggcaacatacttacgaagactctccaaaacatcatttttcttccagaacagttccaacactgtctgcatatacagggtggaaagaccattctagaggcagctgagaagtaagtagtcttagtttccgttgagaggttttccttgtagaacatttccgtacactcgggcatgtacttctctgaatgtaaggaagaaggcgatttcaggacttttgtgcttgagattgagttcctttttcacagcatctatcttatcagtttccagaggtaatatattacttgtggctgacttcagaattcagacagccatatcttggctacatccattcaagaacattatccaatactcgacagccatatccgtatatatggcgatttctggattccagaaacacacttctgaaactaatgcctgcaaactaattgaactggaataaagtgagcaactaggtcaatcaagtctaaacataaaagttttctctaaaaagaaagtctcaacataaaagcagcacttgaaaacttaaatctttataataacagaaatgtagaacttatggaaaaatatcatgatcaagagaaaacaacaagatagtaaaatcacgagttaagctgataatcatatgatgcacctttctcctcaaaataaccactatcgctattactccttttagagtattcccaaacttacaaacggattcgacattctcttgagtaaatcctttctcattgttgaacactaggagtgtcccaaaagctccgctatgggtaaagtccttcgatgtgattacaaactccaaagttggtgaggctccagaaggatattcattgatagtaagcaatcagagcattagaaataagaaatgtacaagagtaaaatgcaccacaaaagtaataagtcaacaagaaatgtaattactgaatttgtctaaatgagaataaaaaaagaatggaaggtactaaataaaaccatctattacttctccaataaaatgttctaaaaggaagcaattaaactcaaagtttctaaccttagcagaacataattgttttacaagttatcttacattgttcaaatcacaaaattgttcttaatgggtgctatattcacctttatttgttaaattcaaacaaaagaattatggcaaatgtgattgacaagagaatcaggacacaagaaccactgaaatttatcacacacacaaacagagagttactgttcagtagatatggaggatgcagttttaccagttctatggtcacaaacatttcggttagaaaacattggcattcagcacaagtaaagattcaattcaggtatgcatacatgagttcacatgctagatacacttgaggattagtattgtcacttcagaagtaataccagtagaactggacttgaagttattaatctgaagattatatttatctttaaacccaacaagatcaaccaattcgagctctagttcataagaaaggatggccttgacaaagaacttgaaattaaggaatggctacttaccgatacatgatgccactcaccagtctgaacaaaacatgatacgatcagcaagagacctgtaccgaagaactgtcttcatcaattgctcatctttcacacagttgataagttgacttcgagaaagaacattttctcacatacctaatcagcttctctagtgagcatattatatcaagagaaaaaagaaatccatatgagacagtttaattcaccaagaaagtgtgttcccatctcgataaagtttacaccgttaattagacaatacgtactaaaaaaaactgatgggttatggtcaagaaggaaagaaagcctcacatttggaagcagcagtataacagcttggtactaatagcaacatatcatatcagaacttcagaagacgcctaagaagtcgcatttatgtcctccagatgcaaagcatcatgatcttacttgggatctacaacctacaaatggaattcacacgagtcaggatcaattgcacttacaacacaagaacaatccaaatgccaacgaaatgatgagatattgcaatgtctttgccagtttcctgtcttctgcactctacacatttttctctatctcaaccatggagtgcttacttgcaaaaaaaaaaaggaaaataaaatagagttcttgggtcaaaatcatgtcccccgtatgttgtctgtgaaatccctattattgtaactaggaagatagcccacgcattcgcgcgggcatgtgtcgtagactatgttttaacatctacaatatatgatttctccataaattgttttcattagcaatggttttataattttctaacctagctattagttgtctttataacatatcatatttaattaatccctacaagcaattatttataatattcttcatcatctaaaaagtaggtagacatattttttgttagaaaacatgtatagcaaattaagtgtaaattcaaaagtaagatgtttttttaattggatgtaggttgtcattgtttattgacggataaattgggtgggatatgaggctccactaaatgtatgggtttatatagcctaatattatcatttagtttgacagagaatccatatgtgaatgttccatctagagtgtgcgtgagactccatgcaacctagagtgaataatattggatgaagaaatatagttgtgcaatatattattttggaagatgatgtattatgaatacacgcttgtcttttaatatgatatagatatagtggctggaaataatgggttcatcagtttaaaaaggcctaggaggatttatggggtaacatgtggagactttatatcaaaaagaaaccattatctaaaattgattagatgaaatataaaataaaattataagtgtagcttaaaattatggtctttttaatatttgtttctctctttagtttattagctgaaaatagggaggagactggagagaaacgaatagcatagaacttgaataagatatgagaaaaggttcacagtgcaatagtgttatgtgcatgtgattggagagggaggtggagggtacattattttttttcaatctatgtaaacaatctaagtgagaacctatgatttgttgttttctcatgctaagaatctttaagacatgacatgtggtagcttaagtttttttataaagagaaaggtgatctaatagttaaaaataatagggcatcaaattaagtggaaaccgatggatagatatatactttattttttctttgaatttcagttttttcaaagttttaaaatatcatacgtggtggcttaaaagtgctatagagcacatttaatcgatctttactatgtaaaacgattcaagaatatataatatgcgttgtcatgtttttcaatatttcgttgttatttggtaaggagatgttgtttttattgaggtagatttaatgcgttcatatgtttgaattatttatgtctttaaatccaattgttaaaattatagctccactgatttaaataaaaattgatgaaattataagtccaccaatttaattaaaaactgatggttagatttgttttcttcataatattttttataattagaatttttatttataaaataggaaggtatgagaaagaattattgaagatggagaaagtgtatgtatggatacttacgtgcgtggggtggtgggaagggtgggctagtggggagagaagagttgtgccggtgggagacaagcgatggatgtggattgtggtttcttttaagaaaaaaaaaagataaatctaatagttgaaaatagatggtttaccgatttattataattccacgtggtggtttaatagtgtttataggcgtaccacgtggcagtatagaagtgtttgtatacttttagcatataattttttttatttttaaatggtaattaggatgacatggcacgccctagaaattattcttttccgtagaagtttatcacggttgaatcattaagttttttaaagacaccatggatctaaatttggatgtgttcgcaaatttgatgattatttagggtgcttgttgtttagccagtaaaagataaatctcgtagagctttgcaagatgaaaacgcgtgcacaccctcgtttgtagcagacctaatgctaattgcattgataatccctagcaagaataggttagcctatttggataaccaaattaaagcaagaagcacgcacattgaaaacctattcaatgttttgatttctctgcatcgttgtggtttattatataacttagtaacttaagtttttatatggggttgctagctataaaataggaaattcacgtacgtaccatagagggaggagtacatatatgtagagagaggagatttcttttattgaaaatagatccttgagatatatctaatggttagaaataatagattcaccggcttataagttataacggatggtcagatttttttttaattttttcctcataatttttaagattttttataatttattagagtgccacatgatggcttaggagagtatgtaagatgtcacatgacgacttgagtacgttcgtatgaagtttatggacttgtgcgtagaatacaactcgaaatagcatatattttttacaactaatggctgaaattattaatttagtttttatctcatgagagtgaaaaaaaaaaagaaaaaagaaaagaagggaaggggggacacgtacgtacgaagtatgtatgtacatgcacgtacatgtacgggatggatcgacatataacgtggcgctttctaaatataaatttatttggtattttttttaatctaacggttaaaaaaatggttccaccagattaaataaaaatcaatggttagatatttttttttttgaatttttctaatttattagagcgccacttgacggcctaagagcatttatagagatgacatgtgacggcttaaaagcgtttgtaggtagtttaatggacttaataattgtagaaaatcttattttgtcgttgatttttttttcattggtgttagaggtacatatcacatatgtatttcctgcttttatttttttccgtaagtacgtgtgtactttttttttcttgttgggaacagtataggtaaactttgtttgtgtttaacgtacggacgtgcggatatatatcatgatgtgtacgtatacaggagttcttttaataacaaatctaatctaacagtctaaaatatcggggccatcaatttaagtgaaaatcgacgataagatcatatagtgccatgtggcaacctaggagcgtttgtaggtgtgccacgtggcggcttaagagcgtttttaggaagtttaatggacttttagtatataatagaagatagatagatagatagataatagatagatgctctgttggactggtttatcaatctccataatatgaccatacgaattgctatctttcagtttcttatgattgctattcctagaacttggtccagcttgatcatcctgatcctcaaactcctaaacacttgactttcttagaaatagaagacttactaaccttcccttagtcctcaactccccatatttttccaaggttgttgcaactgcaatctgctccggctatattgcatttttcactttcttcgcaccgtgagaggcttgtgtcttgaatccctcccacctgactaaattgcaggaccagtaaggtgtggatctgaagattgagctttgttcatggacacgagggggaactggctgatagcaactgcagataataagatgctagcaaagctagaacagttggcctagtgactggtgattttggtaccatcttcttgaaaatatgagctatagccttcgatgcctcttcaaatcttgtgatcaatctagtcttgttcagcacatctttgtataaactgacccctctaccataaaatcaaaaatctactaccgggatcctgccaaagacccttagaagacatacccattcaggatccattaagaaagatccatttggtgcagagtctcatcttggccttcagccctctaactaaccacatgacttaataggcaagatgcacttgaggattaaatatgtagagagaataggagggaacaccacactccccaatgagggggggtgaccatatattatagcctttccaatatacaagatcctcaattagaggagtatacaaggaagctaacgatacaaaagaatcctatacatatatggctatacattcctaataccctctcacgaacgcaaagactggacctgaaatcagtgaacaactgcataggcagtcccttggtaatgatattggcgaactgatgggacgacggtacatggagcacatggacctgtccgagagccaccttctcccgaacaaagtgaatgttgatctcgttgtgcttcgtacaacggtgatgcaccggattggccgtcatatagatagagctgacgttgtcgcagtaaacaacgatcgcagagacgatgggggcatgaagctcctggaaaagttgtcgcagccagcagcattcggtgatggcgtgagcaacagcgcggtacttggcctccgcactagaataggagacagtcgtctgacgcttggaagaccaagaaatcagattgtcgccgaggaagacgtagtagccggaggtggagcgccaggagtcgggacagccagcccaatcggcatcagagtaagccgttagagacttgacaaaaccggtgccgatgtggagtccggcggggagagagcctttgacgtagcgtagaatgcgcttgaccaaggcgaggtggggctaccgtggatcatgcatgaacaggcagacttgctgaacagcgtaggctagctccgggtgagtgagagtgaggtactgtagagcgcctgtgaggctcctatactcggtcggatccttgacgggagcgccgtcagaggcagagagcttggcccgagcatcaaccggggtggcggtaggatggaattcaaacatgcatgcttgctgaagaagatcgacggtgtactatcgctgggacaggaagaggccatcggatgagtgattgacggagatgccgaggaagaagtgcaagtcgacgaggttggtcatggcaaactcggagtgcagccaagtggtgatgaggcgcagtagatccatagaggaagccatgaggatgatgtcatcgacgtagtgcaggaggtaggcgatatggtcttgatccttgtagacaaagagagacgtgtcggacatcaaggcgacgaatctgagcagacggatgtaggtggcgaaccgctggtaccatgcacaaggatcctgcttcaagccgtagagcgaacgctggagtagacagacgacgtcgggcgtggccaggttgacgaagctggatggctgctggcagtacatcgtctcgtccaacgtgccatgaaggaaggcgttcttgacatcgagctggtggataggccataaacatgaggtcgcgatgctgaggacgacttggatcgtggacggcttgacgacggggctgaaggtctcgtcgtagtcgatgccatgttgttgggagttgccgcggaccacccaacgagccttgtgctgagcgagggagctgtcagagtgaaatttctacttgaagatccacttgcccgtgacaacgttagcacccggggggcagggcaccaggcaccaagtgccattgtcagtcaaggccttgtactcgtccgccatggcagcatgccagttggagtcagcgagcgtgctgcagtagttggtcggaactggggagatggcggagtgcgaagccgtcaggatgaggcggtcgatgggcctgagggagccggtctaggagtacgtgaccatggggcttggcgggaggggcggcaactggaggaggtgctggcgcgacgtcggggcgcggtgatggcgtggcctgtcgtcgctggtagacgtgcgggaagggctcgaccagctttgccatagtcggtagaagaggtccagcggccggccgtgtcgagaacgtggggcccccagcggctgaccgagccgacccagcagcaagctgggctgcacgtgacggagaggcaccaggagatgtagccgcctagattgccacctggtagggaataagcagctgctcgacctcatccgagggagcggccaccaaagacgaccgcaccgggtcatctgtggcgcggggcagggagagccgcggttgctcgacacctgtgatggatagagcgaccatggtgcgagtagtcacttcctgtagcagaaaatcaaacgaagagacatcgaccggatgacgagcaaacagaaaacgagtctcatcaaagacgacatggtgagaaatgatgatgcggcgagtggagaggtcaaagcagcggtagcctttgtgcgaggtgggatagcctaagaagacgcaagcgacggagcaaggggcgagcttgtgagtggcggtagcactaaggttgggatagcaaagacatccaaacacacataatagggagtagtcggggattttgttgtggagtagctggaatgggatggagttctgcactgatgaggaagggtgtcagttgaggagatatgtggtagtggctaaaccttcggcccaataagtaggaggcatggagacctgaaggagaagagtgcggatagaattgttgatgatgcgaagcacacgctcggctttgccattttgcggggacgtgtatgggcaggagaggcagagcaggcagccgcggctagcaagaaaggatgtggtgctacggttgacgaactcagtgccattgtcggcctgtatgaatttcagatggcgaccaaactgtgcgtgtgcatatgcaacaaagtccacaatgtgttgatgaacatcagacttatgacgaagaggatatgtccaacaaaaatgactgaagtcatctagaataaccaagtaaaatttgtagccagagatactcaaaacaggagaaatccatacatcgcagtgaactaattcaaaaggagaacaagtactggaacttgatcgagtaaaagggagacgtgtatgtttgcctaattgacatgcatgacaaagggaactatctggctttgacgagggtatggaagagatgcgctgtagggcgaggacggctgcagatccggggtgaccgaggcggccatgccaaatggtggtggaggtggcctggaagcagtgagcgacgatgggtggtgcggctgccgggagggtgtagagatcgccacgactattgcaacaaagaatcacgcgtcgggtctggaggtcctttacagaaaaaccaaactcatcaaattcaatagaataatggttgtcacgagtgaattagcgatccgcaagaagattgcgaaccaaggaaggagcaacaaggacatgtttgagatcaaattttgtggtgcctataggtagaaaggaagaaccacgacatgtacccggaatagtgtgaccattgccgacagtaatataggtgtgagagttgggcaagcgagtaacgagtataccatggatgacatgtggaggtcgcgccggtgtcgaggacccaagaattagggctgtgaaccgtcatttggttgagggcagccaccagtcaagcctgatcccaggccggttgtccagcagtggtggctggcgacaagtacgggccggcgaa

SEQ ID NO: 5165 - DNA, 1608 bp, Oryza sativa
gtacttgtcttatgtttggatgaaattccaaggaatcggtccttaagtgcgagagcgggaaaaaccgtacacccggtacgttccccggtccgcggttttggaaattcctttagttcgcaagcgccgacccaggtgtcgggttttccaagtcttttgtaaaactccagttttacccaagttgttactcagattttaagtttgaaggtgaccgtcgatactcgcacagagtgcacgaatatcgaggcgcaactggatggttacaaggggacatggtatagcaattaacaatggaaggatcaaatgcaacaagttaggtaggtccgccaatctgccttgcagacgggacaacagattaagtgcgatcctatcgatgcataatattttgcaagcaacataattaaatttcaaatataggctcaagatgttcaaaggtggcttgccttgctcgagatctagagcttgatcctcgaaatcctcgcactgcgggtcttcgggctccgaaactacacgcgaaacggggcaactcaacaaacggtgaaaataaagccctattaatgacctctaagcatgccattagatagatctcgagatttgaggaattttggaagttgaacggagtcaaacggatttacggttgggaagatattgaatttctaagattattggatttttggtctaaaggaaaaggatttaattaaatcctttttggaaaagaaaagaaaagaaaagaaaagagggatggaaattagacttttcctcgggcggctagggcgcggcccgagagagatggggcggtccggccgagctaaatgggccggccggcccaagattgcccaagcgcgcgcgcgcgggaggggaggagagagtgggccggtggaccgggctcaccgtgcgcggtcccgggtgggacccgcttgtcagcggctcggctcaccgtgaggagggagcacgcggcgcacgcgcgcgggcgggggagggacgcggtgcacgcgcgcggtctgcgtaggaacggatgcggcgggcccacgcgcagcctcacggctcgcggtggaaagcgcgcacgggaggggctgaccggggtcggcccgtcccgacctcggctgagctggcgctgacgtggcgcctacgtggctgccacgcgggccggcgggaggtagacgacgacgccggccggaacggacggcggacaacagcggcgagcggcggagcgaaccacggcgataccggcgaaagcgagcacaccggctggttgcacgagacgaggggagacgagccaacggctcggattcgccggaggaagcttgacggcggcgaatcgcggcggcggcaaccggcggtgggaaaaggggaaaacggcgacgaggtcacgaggggccgattcccggcggtgagagcatctacgcggccacgggaatccgatgctagcgtcggattgggcggagctacgccgagcgaggctggcgacgagcgggtgctacggagctcgaacggcaacggcggcgagcacacggcaagtgatggcaacggtcggggcggcgccggctagctacggggaggctactcgtgctaccgacgaaaactaaggggaggagatggagcgaggaggaa

SEQ ID NO: 5166 - DNA, 2718 bp, Oryza sativa
ggccccgccactcccgcgctagcctccaagggacggaggcaaagcctccctcctccctctgccgcgatgcctccgctccctctccttttcccaaagaagaaaggggcgagcccccctttctctccccctttttcctcctttttccctctcgccggcgtcaccgccctgtcgccgatttggacgcaagcgccgagcgccagctcacgccttgaccgccctaagtcggttcccaaaccgacattgccgcccatttaaaccccagcctccccctttcccttcctctcccattcgcctccgcgccattgccgccgcccccgtgctctgttcgccgtcgccgttcatcgttgcgcgtgccggaggagccggcacgagcaaggacgcggaaggggactccgggcgcgccctctccttcctcttccccggcccgaggccgaagagattactcccgcgccgtcggcctctcgtcactgcgccccgcccgcacggtagtgcctccctccgttcttcctcctcgctccatctcctccccttagttttcgtcggtagcacgagtagcctccccgtagctagccggcgccgccccgaccgttgccatcgctcgccgtgtgctcgccgtcgtcgccgctcgagcttcgtagcacccactcgtcgccagcctcgctcggcgtagctccgcccaatccgacgctagcatcggattcccgtggccgcgtagatgctctcaccgccgggaatcggcccctcgtgacctcgtcgccgttttccccttttcccaccgccggttgctgccgccgcgattcgccgccgtcaagcttcctccggcgaatccgagccgttggctcgtctcccctcgtctcgtgcaaccacctggtgtgctcgctttcgccggtattgtcacgcccagaaattctcaaaccagaatttctaagctgaatgtgcattaaatccctgtccaggaccagccagcgtacacaaacgacaattgttgacatacagatccacgtcttacaaaaatagaaaagataaaaatgcagcggaaaagataaaagcgagctaaaccgggaagcttgacttcagcagcgagcgactccactccacaggcaatccttgacggcagcgacgaaaccaactttgacaaaacagctccaactaggaagatcttcagctctggtgtgggggaaaagagagcaagactgagtactacccactgtactcagcaagtcataccggaagaggaggtatgatgcaggatataaccaaaggaggctagaggttcttttgcataaagctagcatttaaaagcagtagttgaaagcagtaaaacagttgtagtaattaatcaatattaaccaaacactgtccaacgctacaccacgttgcaacaggcccaaccaaccacctgaactacaccagttcattaagctaaactaggggtgagactaatcacggtgaatctggttgatcgcccataaccgcgggcacggctattcgaatagttttactctggccagaggtgtacaactgtacccacaagacacgattccacacatgtcgccatgccccgaagtatcaccatgatactgcaaagggggaaatcgtgacaagaccctccacataaccctcccctaaccatccacaccacgctaaggtttcacccccacccctcaaaaggcagtgggcggtcccctcttgcgccgcggtgaatccggcagctggacaaccggacaccccggccgacccaactccatcacgcccaccctcgccaccggtgcctaggaaagggtcgagctatacttcagatcaagcagttacccactcccgcttgtggtaagcacggtaagtctcccagggtttcccgtgaaccggtccttaactgccatgggtgcgaccagcaaaaccatgcacccacagcccaccattcaatgtattttaattaactaacaccattgcggtggcaccaatccaaagctatgctcatagacaaagtctatgtaataaagtgatccccatttgtgtgctagttgaactaagcatggctaagcatttcctaaaccaacatctagtcattttgatacccaggttatcaatggcatatggtaaacaataaatggctgagtaataggacccatcccacatgatattgtaaaagaatgcaacatttaatagaaatgcgggatatttgtaaattgggtacaatatgatcaaacgtattgcatgacttgccttgctctcgcactgatgagatcacagcaacgtcttcgagaaactgcggatcgacgaaacggccgaaacctacgcgacaaacaaagcacacaagcaaaacatgctataagactatagaaacaggaaacaaaaccatttttaatggattctttgcatttttcttgatttactgagacttgaatggacttaaacggagctcggatgaattacttatgaattttagaagataaactgtgtttttactaataaagaaaagtccttaatcaatttattgcgcaataaagcccagggctgacgtcatccaacggggggggggcgggcaccgacaggcgtgccccacgggtcagcggttcaagagaggggagagagaggcgccggcaaacgggcccactaggcagcggctcaaagggggtcggtacaccgtggaccgggaccacgcgggtggttcaccgacggtccacgggaccgactgtccagatcgggcggtagaccgat

SEQ ID NO: 5167 - DNA, 704 bp, Oryza sativa
ttcgcaaattggactgacttcaaacttttcaaccggattaatagtcaacgactttgatagcctttccttacaaggtttttaatccatcgccccattatatttttcttaagtttaattacacttaaaaacttaatgaaaaattagaaacgacttataattaaaacacagaaggggtaccctatatagactaagtcaaaatataagcttccatctataaatggccaaatggaccgccctgcacggcccagcctgagcatgaccaaggtacggcccgtgatcagtcaggccagcaccggcacggcccgaccaacacgccatgtcatgccgtgccccgcccacgggttgcatctaagcatggcccacaataagactcgggtcatgtcgtgtcggcccgaaggcaagatcagcctaccatactcgtccttttaataagtctattttggctccctcatctctttagtccggccaccgacgggctacggcctgcaagagccaggaatgttgggccgcggttgtgccgattgttggaccatgccgtgctgggctggcatgtcgtgtcaagtaagagacccagaaacggcccgacggtcgggtcgggtcgggccagcacaggcctaacaacagtcgagccgtgtcgtgtctgggctgggccaaatcttcataccatgggtcgggccgtcggactgcgggcctattggccaact

SEQ ID NO: 5168 - DNA, 1968 bp, Oryza sativa
ctgagtaataggacccatcccacatgatattgtaaaagaatgcaacatttaatagaaatgcgggatatttgtaaattgggtacaatatgatcaaacgtattgcatgacttgccttgctctcgcactgatgagatcacagcaacgtcttcgagaaactgcggatcgacgaaacggccgaaacctacgcgacaaacaaagcacacaagcaaaacatgctataagactatagaaacaggaaacaaaaccatttttaatggattctttgcatttttcttgatttactgagacttgaatggacttaaacggagctcggatgaattacttatgaattttagaagataaactgtgtttttactaataaagaaaagtccttaatcaatttattgcgcaataaagcccagggctgacgtcatccaacgggggggcggcgggcaccgacaggcgggccccacgggtcagcggttcaagagaggggagagagaggcgccggcaaacgggcccactgggcagcggctcaaagggggtcggtccaccgtggaccgggaccacgcgggtggtccaccgccggtccacgggaccgacggtccagatcggccgggagaccgatcggacggcacggcggcgactaggcacgactcggctcggcttcaaaaccggccggccggccatggcgaggcgacgacggcgcacgaccgccggcggtgcggggagacggcggcggacggcgcggaaggcggcggcggacggccggagcggcggcacggccaaaggcggcggcgcacgcgtggaggggagaaaagggagggggagggaggcatcggccgggctcagctcggcctcaaggccgaccggggcgaggcggcggcgaggcacgaccaccgacggcggggaccggtgtcgcgggaagcggcggcgacggccgaaaggtggcggcgcatggccgaagcgcggcgatgcacgtgcggagggcggcggcatgcacgggagagagagtaaagaaagaaggagagagaggtagtcctcaccggcgatgtgggggaatcggggtccggcggcggcggacggaaagcgagcggcggccgaggtagctctcgcggcggcgaatctagcggcggtgattgcgcggcgaggcgatggctctagcgacggcagcgtgcggccggaggcggcggcaagcggtggcgctagcggcgagcggcacgggctcgttaggagacacgggaggggacggcaaatgggggaaacgagagaggggactcgggggagggtttttatgggtgagggaggggcggaaacggccgggaatggcccctatttggccggcgatgtggggagtggagggagagagagaggggtgggattcgaaatcgaatcccgccctctcgagcgcgcgcgcggccgggagatgcgggggaagaggcggcgacgtggggaggacgcgggagcggcgcggcgtgggcgcgggaagagcggaggaggcggcggcgtggcggattcggcggcggttgccgtcggaggcgggtggctggaggaaggggacgacctgacaggtgggccccacctgtcagcgtcccggagagagggggaaggagaacgggccggcccacaaggggaaggccgagcgggagagggatgggccgacggcccaacaaaggaaaaggacggaaaagaaaaaaagaaaaaggattttcctgggattaaaattgcactttggtgatttttaattggtaaaaattatttccaaggctctgaaaattccactaaaaatcctgttaatatattgtgacatgtggaacccaagaaaaaatcccacaatgccaattccaattattaattgcatttattaattatggaattagctctaggttaattaagataatttcttcggacaatttatttagccaatttttaaagctaggagagggggaaacttcaaggcgtgacaaactatccccgtggttcgatccg

SEQ ID NO: 5169 - DNA, 1539 bp, Oryza sativa
  unsure (1)..(1539): unsure at all n locations
ccttcttgtccttcttcttcctcgtgtgttgttctttaacgacaagtcgggcacgaagaactctccatcataacttggccaatgcgatggatctaggtaaggttcaaacctaggggagtacgagtcctgcacagccttattggaagcttcataacacattcggggggccacctccacatccaaacctcgcaacttacaaacggttatcatgtgagagcatggcaagtgatggagctgagggaactgacaactacatgtgttatctctcgcaaccacgacgtagtgacgtccaccccattgaaccccagccgccgtgactccgccttgctcgctgacctcatacttcatcgaagggaaatcaaaacatgctgctctntgccccaaggttcgtctttgctgctcctccaacatgtccttaacttttgtgggccacttctttccacacaggatatctacagttgcctctttgtgtctatcgacaaaccaactattgcacttcgaaaatgtgtatgccacaatagctgtaaccggcagtttccgaatgcctctcaatacattattgaaactctcggccatattactagtcatgatgctatgacgacgcccgttggtatcaaatgctcttgcccatttgaccttaagtggcatatggtcttctagccacttctttggccttctctccgaccacacccatgaggcgttttatctcatctaggaacaatgctttctcatttatttgacatatgcgctcaagatctttcatctgatcagtcgtagctccagctgtgtagaagttagcacagaagtgcctcatgcaccacctgtggtgaatggttaggtgatgaggcatgatgtggatgatggagttcaaaatgccagggtgtctatcagaaattatacacacttctctattaggaccgatcaacttgtttctcaacaagttgatgaaccactcccagttggatgtattctccttctctaccagagcaaacgccaagggaacaagatgtaacccggcgtcgacccctattgccatgagcaatgtaccttggtatttaccggttaagaaagtgccatcaattgctagcaccggcctcaagtgcttgaatgcttctatggactggccaaatatccaatatgcacgtccaaatactcgcctctgtactccatccaccatcctggacttctcaggatgagcctcaacacggaaatgcatggtagggttctttgctttgatggcacgcatcagtgtaggcaagcgaacatacgcctcgtcccaatctccccaaatgaccttcatagcaacttgcttagcacgccatgctttgccatacgtaggccgatagtgccatatttgctcaactgcctcgacaatcgctgctggagataaagttggttcagctcgcacaaatgcctgtaacctgtttccaataaaccttgaagtaagttgcaaatgtttgccggttacttccgcactacagcatgtgtggtcttcgcccaccctagtcacccgccacctatctcctccactcttccttg

SEQ ID NO: 5170 - DNA, 2303 bp, Oryza sativa
gcatggatgaatctcaccctctctcaagtaatgaatttaagaattcatgtcattctttctcgcatcctcatgttgtaaaaaattaaaatgatataggtttgaacctaggtgactctagtactagttgctgatttggttttgctctaaagggagggtggttgtctcaaatttgaaaacttaggtgctttggcttctcttttggtaaaaaatcatggtggggtcttgtagtaactcagacttacttcatgaggaggatcgggaggatagttttttgcttaacctttcatgtggcgaccttgatggatgaggttatggatgaagaggacattcacctaagttgagatttcgataaagtcctaataaataattatcccaaaaaaaataggaaatgacctaaaaaaaatgagggagggtacggttttaaagtaggaagcaacaaaaggtttcaatgaaaggaattttttggaatagcagaggtcttaaagacttggctaaaatgagattcctttcggaaatttctaaaaagcaaaagctagactttatcgctcttctagaaacggggaaaaacaagtctgttgattcatggcttaaaaacatatgtggaggaagagattttttgtttcactgaacgaggccgaagggtagaattgggggatttttgcttcgagttaatttggagctttttgatgtctctagtatcgacaaaggggatttctatgtaaaatttcatttgcaaaataaagacgacgcgttccaatggattttgtttgctatttatggggcggctcaagatgaatacaaggaagcctttctctctgaattggttaattcttgtagaagggaagcgttacctatgataataggtggagacttcaatattttaaggaatccacaagagaaaaataaagagaactttgataataaatggcccttcttatttaacgatgtcatagatagcttaaatttgagagagattaagctttcagggcataagttcacctgggcaaactctttaccaaacccaatctatgagaagttcgatagcgtgttagttagtgcggagtgggaggagaaaaatccattggtgtctgttcatgcccttacccgagatccctcggatcacacccccctgctgctagacacagggaaagggtctcttaagaacaaccaacccctgtttaaattcgaacttgggtggttgctgagagagaactttcatcaattggtggtcaatagttggtccaaacaagttagagggaggacattgagagatggcaaaataaaattcagagactgcgtgttgatgaaaaacacgaggcctgggagatctgcttaactctagtgcaggtccaaaactcgcctttgggtatgcaagtgtgccagttgatataatcctacaatcaacaagaaacgaagataaagaaaccgcggttaaacctataaatgatagccgatcggcaaggtgccgatgacatatcatttatctgtgagccgatgtcatgtacgtatcgatcggcagttataaatagataataaaggactaaatctactcgatcggctgtagatattaacaatatataatttctatgtcgatatatacttaagtcaagtgattgggatagatcggtcgccatgccgagacagtataaatcaattagatcgaagtatatactaacaatgaaactatataagttcatagcatagcagatcagatagatctagcatgtatcggctaatactccgatactactctatactaagatattaaagcaagtaaaatatatcaaacaaaagccaaatatacttgaatgcaaaaagatcttgatataaagggcatatttaacatatcactaaagcatatggaacaaatatagttaaatcaggtaagatcggctgaaactccgatactaccctaatcggcaaccaagaagcaggctagagattgagattctaatcacgactcataagatcaaactcaactaatgtagctataagtatgaaaagaaggacaatatctagacaatcaagccgttggaagtttcatagagtggtggataccttatataatctaagtcaacatcgatatctaacctaatcggctgccctctaccaatagatgttagccgattgtagattagatagcaatattgccagagattatgcaagatatatgataactcgacgaattacgtaaacaagataagagtatcataaagatggaagcactaatcccgagaacgcaagccgtcataacaagttttacctcttgtgaagatcgaaaccgatgcagctcaacccgaaag

SEQ ID NO: 5171 - DNA, 1425 bp, Oryza sativa
ccgaactagtcccgactgaaactagcccgtgacgctccaaattaacctgttatcgataccagtcccaggaaatagtgctggtatcacaggaagacagaatatccagcaacagaggtctctttattatagagtaggagtacagtcatgttgggctgtggacagatcccgagctcacaactgcattacaaaaggaaagcggaagccaggactagaccaaacaacacaggcgcgacttgggaactaggccgagaccctaaaactcatcgtagccggcttgctcctggaagaactcctcatcagcaggatccgcttcatcttcttcagcaactgggggggattatttatatagagcatgggtgagtacgggagtactcagcaagccatgggaaataagtgtttaatgcaggcttcaaggaaaggctgttgtttttgcaattgattttagttgaactcttttctaaaaacaactgagtgcttctcaaacgacatggatgagacagtgcgtctcgtccggtcggagtatgtgcaatgtatcagtctttaaaatttaaaacaaggttggcacccggccaacagcttttcaaacggccacccgggcctacaactttcaaacggccacccgggcctagctgatcccatcagctgcagatttttcaaacatcgaaccctttccataacagcaatttcacaagcaatagtcaaacaaactacgctaggaataacctcacatccacccatgaccgtgggcacggctgttcgaacagtttgttaacctctgcagagggggttcactttacccacacgacattactaacccgaatcacccagcccgtgtagaacggccacgtctggtgacctaagggctttcatgacaaggcatttcgagagcagacacagggttgccatatgccgacgagaggggtcccagaccaacaacaggttaggtcccagaccatactgtgccaggaagcccgggggttctccccgacaccaccccgttgaatctacatgtctctcggcatcaaggctcccccgcttagcaatttactcagccaggggtgtcccattccacctatgtggtcgcacttgtcttatgttcggatgaaattccaaggaaacggtccttaagtgcaagagcgggaaatcgtacacccggtacgttccccggtcggcgattttggaaattcatttagttcgcaagcaccgacccaggtgttgggttttccaagacttttgtaaaacccaagttttaccgaagatgttccttagattttaagtttgaaggcgaccgtcgatactcgtgcagagtgcatgaataccgaggctcaactaggtggttacaggggaatatggtataacaattaacaatggatggatcagatgcaacaagttaggtaggcccaccggtctgccttgcagacgggg

SEQ ID NO: 5172 - DNA, 4100 bp, Oryza sativa
tttgcatacgtacacatggcagcagattcttcctcttatctgtattttttttctccatgaaaacatgtccagaatgcaagcattgccaactcagtactcactctaaatatgatagtatctcattgtctatacataacacatactcctaatgttataactgagtaatattaataattgtgcagcacatctcaaccacgaataatgaaataattctctcactgcatgccgatgatttcgctcgagatcaactacatctatatttcactagagatatgatatacggatggtaaatatataataatatcccatgtccaacaatcacttaagccaagatttggttaagtgacttgttgacatacatgtcacttatgtgatcaacaaaatagtctggttatcagcagcatcaatcacatacaaagtaatgcaatagagcgaacaagagttatgacagtggaaataaataagcatatacatcatttagagagatggtgtatcacatcataagaagcaaaatttattgaagaagggaaagagggaggaggggagggggggggatggggattaacaacatttatctttaccagaaagatagctacatacctccctttcacttctagttttcatctagggcgaatatgtttcatctcaaaacacatatgcacacttaataacttttctgaaactaattaagcagtatatatgtagactccaacttcaacaaaacatcagctgaacagcattgagtaccaacttaaacagactgcatagtctcaagcatgaacttaaaaagtaaaaacacataaatagctctcaagccttacttgcaatggccaagggggcacccacataccaacactttattcttgtctcacctgagtcgcttcctttgattagatactgcaatggccaccaccatccttgacattgtccgttacattgacagactctctgctaccctcctcgaaagaaggggaaattgtctagctattaggcaagcatgcattgccaatggcaggaacaatgaggaccacttcccttccattaccaatggatgaggcatgatggaatgcagcaaacactgcctcttcttgtagatcggacagatcacccaataattattagtttcaaccatcatttttctgcaaaacagtctgttagttgatgctgcttaaggtgcaaccatggtatatataacatatacaacacagggagagatagatgaagtgcaatagtagtcaagaaatagttccaggccagtttaatgcttatgacctagtgactgagttagatggatttggtatggtctgtatgtccaattatcttcctgatatgggcaagggagtatcgtcccctagtcggtttgaccaataaattatagagataacctttcatgaaaaaggtagtgaccaggatcaaactatgattcaaacatcccttcccgagactaaggggagtttcactaataaaatcgcatgccgacaacatacccctgtttgcatctcgacaaatatcttatacatcacataaatgttagatcaccaagcatcccggttataaggggataaccacacatggtgcttaacaatgagtttcacggatataaatgcacaccaacaacatacccctttccatattgacattctcgaatatattataggtcccataactattagatctccaaacatcttgggaataaggggataatcacatgtggtgttcaataaagagtttccatgataaaaacgcaagccgaccacccaccctttctgcatttcgacaaatgcaaatctcttatagatgtcacaacagttagatcacttcgcgacaatactaatgagatccttcattgtaattagatctcagtaaaacacatggaatcactatcagaataagccaaatcacctcaagattctaccacctctagatccaacgtctaagattctatccgaattgcatgccatcaatcaatcatgcaagccatactagtggaacatgacaatggaagcatatactaatactcttcttataattataagataataattcatcatatttcttatcctcaagttgaacctacaaacctatgattgcttaaataatatgaacatattcaatatgcaaatcaaatcaatattatccaataaaacaacaatatggtgttaggatgcagtgtctcatgttggcaatggtcactctagtgcagccaaaaggttgttctgtgccatcactggtggcaaaccgcatcacaaagcaaggcaagaggtaggaaccagctagttggaactcttgcattgcccattccatgctctcggcaaatgaagacttcctgtagtggaacaccagggtgtgcttcatacccactatcactttatcagagccatcaccgaattcttgtataccagtgcctctgtgcttgctaacctccaaaacccaacgccggcggcatggttcctacagttgtcgccatggtgctttttctccttacgggtgaagaagtgcttcccgttcttcttctcctgccgtgctccatcaccaaacccaacataaggaaaatatgacacacacagaattagacaagaaattaaccgtcaaaacacctaatatatcataggtgaggctatagattgatgaaattaaaccaaagattgcaaagatttggcttaataatttcaatgggacaacaaaggcaacacaagtcaaaatatattcacttgggacaatgtccaagggattatggtgaaggatgtcgatgtcagtgatgaagtcatagggcagagacatctgaatggcgcattggtaaaggtagttgatgacaagctcaccgtagtgggttggaacacacacctagtgggatggtgaatactcgtactgctcacttagttgatgcatacctgaggaccggccattgtcctagctcgcaagctacaaacagatttcactcgctcgctcactctagtgagcggaagccctgtggtgatggagatggaggatgagaggagctgcatttataaaaccaagctatagagggggtgtcgccaactcactagttaattgcatctgtatgggccgctatgagtaccgtgaaggagatatattcaatttcattccctttctctgcatgctaaacaccctccgagctgcagatggcgagctagaattcagggatttgcatctcttggatggatgtagtaatacagaaaatccaaaagaggaataactagaaagatgtggtttgtgatgaagggatggggattccagtgtctgttttgttccgattttttcttcttttccattccttgggagaacatacaattggtgagagttccaatctctctcgcttctggtttggtgtgctgttggggagatgataacaaagtggagttctgcacaatactgctgactaggaaaactgtgggtgcctattaaggctggaattaaaggcgctggctggtaaaccttgtttgcaagcatattaatttttgtccttatttggatggttagtagagctttttggggcttgttaattttctggtttaaagatatggagcttatgttggaaaatgttagtttacataccataggagccgggccacacaaagtctaagttgatgttacgcatgtttttgtttgcatcgttttaatctttgaatacattttatttccaaatgactagttatacatgtatgttgagctccaattccatcacaaggtgatagcaagtaacaaatttaatttttgcgaacatgggatccatgagaacttcccctttgatatgtggttaactattttatactcaatagatattaattaaatatcgcttctactatttagtgctctcctcccttgtacagttatgctactcgtgcagctataaatagagatgtataaaaagttagaaaactgctcaagtatgtcactctcttctgttcctcttgaacccatattgaccactgactccctcttattccttgttccttgtgttggccatgttgatgagctactaggccatactactgttgtctcctcgacggcacacctatgtctctccatgagtctcacttctacagatttgggcatcaatgacgtgccatctgtcaaca

SEQ ID NO: 5173 - DNA, 2006 bp, Oryza sativa
atcctttataggtttaaccgcggtttctttgtcttcgtttgttgttgattgcaggatcaaatcaagtggcacgcttgcatacccgaaggcgagttttggacctgcactggagtttttcatcaacacgcttttggcacgcttggtgggacccattagaagtcagaatcacaacagcagtttttctccatggccgagaaaccaccagcatcgccgtcctcggctggtcctggctatgttaaagaaaagatctagaagctgggcttatccgaggttgatgaagccaacattgtgcccgtcactctagacaagttgacacctgagcagcaaaaagaccttgatacaatgatgcagtaagcacggaatcagttcttgagctcattcacggagacccgcaaggtgacattggttcagaagtacaaagtgaaggtagttgctgattcaggagcttgatggaaaagaaagagttgtattctacttaagtcgttgactcatggatgcaaaaactagatattctcctgtggagaagttgtgcttgtgcttgtatttttcatgtacaaggttaaggcattatctattgtccaacgaatgtattgtcatatgcaaagccgatgttgttaagtacatgttatcggctccaattttgaaaggaaggattggaaagtggatattttccttaactgagtttgatcttcggtatgagtcaccgaaggctgtcaaagggcaggctatagccgattttattgttgaacatcgtgatgattcaatcggctcggttgagattgtgtcatggactttattctttgatgggtcagtgtacactcatggttgtggcatcggcttggttattatttcccctcggggggcaagttttgagtttgcttatactatcaaaccttatgcaaccaataatcaagctgagtatgaggtagttctcaaagggttgcagttgctcatggaagtagaagccgatgctattgaaattgtgggggattctttgctagtaatcagtcaattggcaggagaatatgagtacaagaatgatacattgatggtttataatgagaagtgccaagaactaatgaagaatctttggctagttactttgaagcatgtatctcgagaacaaaacattgaagctaatgatttggcccaaggggcatcggggtataagctgatgatcaaagatgttaaggttgaagtcgctgcaataacaaccgatgattggagatatgatgtgcatcaatatttacagaatccatctcaaccggcttctcggaaattacgatataaagcgttgaagtatactttattggatgatgaactctattatcggacgattgatgcggtgttgcttaagtgtttcagtgccaattaggctaaggttgcaatcggcgaagttcatgaaggaatttgtggtactcgtcaatcagctcataaaatgaagtggttgctgcggcgtgtaggatatttttggccgacaatgctagaggattgtttcaagtattacaaagggtgtcaaggttgtcagaaatttggagcaattcagagggcaccggcgtcggctatgaatcctatcattaaaccatggccatttagaggttggggaattgatatgatcggcatgattaatccaccctcaagtaaaggacataagtttatattggtggcaaccgattattttaccaagtgggtagaggcgactcctttgaagaaagtcgattctggggatgctatacagtttgttcaagagcatataatttatcgatttggtattcctcaaaccattacaaccgatcaaggttcaattttcgtgtccgatgagtttgttcagtttgccgatagcatgggtattaaattgttgaactcttcaccatattatgcacaagctaatgggcaggccgaagcatctaacaagagcttgatcaaattgattaagagaaagatttttgattatcctcggcaatggcatactagattagccgaagcattgtggtcttatcggatgg

SEQ ID NO: 5174 - DNA, 1850 bp, Oryza sativa
agagagtagagagagagagaaggcgtgatgaagaagatgagatgggggaattacgtgtgtatcacatttttgttttatttatttatgagtgaactgcactttgtactagctgacttacgtttgttgcactttgaaccaccgactcatttctctagccatgcctatcctttactccagaaaatgtatggcctgctcataggtggacgatttcgctagcgtgctggagccaacatccttgagatcgttgatgcactaaagaagtggttacgtcggccgagggcatggctcatcacggtggagggacttgggggagagcggaagaggcgaggtggtgtgaggaagagggttttctccatgagaggggatgtgagggaggggagcaacttcgtttccagcctagagttggcttcgggcagcggaaccgtggaagattccggccgctgttcggccacaagccgccattcggccacaagctgagagaggctggcggtagagcaaggagagatggcctcaccagtagaactgggcgctacttcggcgctcctgttccccgcggtagcaaccagcaagtgggtgggaacatgttcaagcgtcgctgggatgagccggcactgatgaaggagggtggcagcagcagggggatcggtgagatgacgcagacgaaggaggaggcaaaaggtggaggagaaagcaagaaaccgggtcagatcaaggtaggagatgtggttttcccggtaaattcagaagtgaagaaaggaaagaattgtgtctctgagtttgatgatgacgacgatgatttgttggagtttgatgaggagccgcgagtgattagggacaagaaaggggatgatcaaaagggtggtgcacgggtgaaagtttgctctaggtgcactcaaaagggacatggtgttgctgattgtaaggtggatgtatattgtgatatctgcgactgtagcgtgcatgtctaccacaaatgtccagtcctaaagcttccaaagccggtggtgcagggcggttggctatgcggttgaaggcctaggttttcagcacatcccacatcaaccgcttcaaaggaacaagaagactacgaagaaggctcttgtgcatgtggttggtggtgctctttcggtggaaaggttggtcactcttctccacaagttgtgtccaactaaatggaagtgggagccagtgccacacgggaaggacacttttgttgttcttttcccttcaaagggcgaattgcaatgggccatcaactttgggggtgcagatgtgaaggaaggaggggtagccacgggagtgagggcggagtttgaagagtggtttgaggaagaagagggttttcttctacctaaggtatgcgttaagttttttgggctgaggaagaaactaagggaatatttaactttatgggcagtaggctctcttttaggggcaacacaattggttgatataaaaactactagaaagaatgtttttggagattgtttgtggctgtccttatcccaaaattgatacttaaggtgcttgatgtggtaattgaggatcgttgttttgagttaaaatttgaggtggagaaaaaaggagtcgatgagaatggggaagaagtagagtttaatttggaggattgggatggagatgaggaggatggtaatgtagagtgagagaaaagtggagaagacaatgagggaagggagaagggaccaaaaatgtcaaaggttgatgatatggtatttgatgacaattatgataggagtgaagggagtaaagaggcacaggaggttctgatttagagaaagaaatggatttttctataatggctgaaaatatcttggatgtggctgtctaag

SEQ ID NO: 5175 - DNA, 6035 bp, Oryza sativa
gggtatagaatagttattttataccccgggtgtagagctctaactcctaaatataactccaggagttgagtctggagtggagttgtggatctgcataaacctagctccacaactccagtacattttgtgagagagctccacccaactccactcccagttttggtggagctgaaactgtttggctgagctccagctccagaagggatggagctggagctagagctgtgccaaacaggccctatgttgaaaaaaaagtccataaaaattaagtgaaattctagactgatccgactatatatatatatagtcgactatatatatatatatagtaggtctaacgtctccgtactatttggtatttggttttggagtggccatagttaggacgttgggattggctcattttggtcatgagaccaccacggacgggagcacgcagtcgacagacatatgctgaatcggaaatgcctggacgaataattggagttgcatgtaatgttgtggcgtagttgtacaaatctcgagaccgtgttttcgttagtcattttgattgaattgatctctagtttgatgagcaatgacaacagaaatttaaatgatgcatggttcttgtgggggacatggacatacgtatgtatcattataatccaaatcgagaacgggatgaactatgacaccctgatttttgttttagtgatttataaattatttatagaatttatactaaagtttaactaatttattagtgaagtaattgtgggaaataaaatttcccaaataaaatatgtgggaaaaaaaacatgcgggatggggcatgcgggagggggtatagaatagtcttaccctatataatagaatagggcaagagctcacgaaagggtttactgtagtttcaccacgatattactggcaaatgtgcaggacacctaaaaaacataactttgcctaaggacactctaaaaatgtggtaatttattgtagggcactggacacactaaaatataatatccatctaaggatgagagagaaaccatataaaataacatttttacccatatcttcttctcctttttccggtcttcttccgacgctcctctcacttgtgccccctgctgtgattgtaaaggaaaccatgggacgtgtgcatcaacaccgcatcgcgtgtgagcgcgagcgcgtaggcgtgggtgatatgcacgtcccatgggttcttgtaccgtcgcagtagggggatgcgtgagaggagcattgagagaaaccagagagaagagagaagaagataagggtaaaactgtcattttatgttatctctctcatcaatggggtggatattatattttaatgtgtttaatgttctgcagtaaattaccacactttcagagtgtctccggaaaattcacctctttccgatgtcccataatttttcggagcatcctttaacaaaatttgccatttagattggatatttgaggaacgtagattgaacttggtttccatcagggaactgctcgttcggctcggtggcccataagcccattggcccaaatacctccccctctccccgtgagagggatccctcttctttccccttcccgtcttcgtctccgtcgacggcgacgtgcgtaagacgccgcgccaccgcactccggttcgtgccgcggccgcgcccacgcttcccatcggagccccggccccctccgctcctccggctcctttcccccgatcgaccgccgacccacaagaggagtccgtgccgtgggtgttctggcgcggtgtatctcggtgccggaggaggccttgaagctccggcgtgagagagagagagagagagagagagagagagagagagagagagagagagagagagagggagggaagggaaacccggacgcggcccggcctcgccgccagtcgtggcgggagcggtatcctatcctatccccccttcccctcctctccgtaaaaagcttttaaaaccccaggcggcggtcatcatgcctcgccgcaagaagcatccccggtttcgtggcacccttggaacctacaagtttcgacaggctcttcttggcgaccccgcgaggcacaatcggttcagcgtactcgaagcagaagccaccgacgacgattcgtcgacggagccaagctccaggatgcaagacattgaggacagctgcggcaaccgatcaactcaggacaattcacggagagagctggtgacggtttgtcattacttctctctcttctctgcatcctcatcttgtacttataagattataatttgtctgaatttttcccagctaaccacacgcaaccctctagttctaattgtgaccacgtaattgctggatttctctttcaaatcaagaagctcacgtgtgtgtgcagccgcgtttcactggacttgatgtccaataatgggcggctgatcattacgacaaatcacttgctcatacctacttgattaggcctaattgactgtttgatgtcgaaaaagaaaaagctattaccatttgcaattggttagatcaaccattacaagacaggccaccctgccatcatgccatcagtctttagcattctgtcttttctctgccctaatctagcaaaaagtatattggttgacttagatgttgttttcgtttcggaaattggaactgcagtggtaagtttaaatccaaatacatttgcttgatcgccaagatcataatctatgtaactttatttgttttacatagaagccacatcagcaaagaagggttaaagtaacagggtattgtgattgtaatactagtgatacatatgctaatggatcatttgctttgtgcctgctaatttgattggagacataattccggacaatatgtgcttacatttggaattggattgttttgtgtctgtgtgtgtgtgttgggggggggggggggggcatgtgcttagatgagaaaaaacggtggtaaaaattatggatggggtcatattgtgtgattttagtgaattgctggcttgtgataatgtttttttttcttttccttaatgacaaagttctctacttcttttggtggtatatcatcaaatttagtataatgaaataatgaatattaaataacataaatgctttcaattgccacagatggaggatgtagggaatatgaaccctttgttgaggacattgctcgagatggtcagcgaggaacaaatttctgagattccgcgtcatggcctagaaaaccttcttttggtagctatctataccacagtgaaatttaacatattgatgatgcttatgctttctttattaccacatgtatgctctttcttgagatggaaacgtatgtccaatctttagaacatgtgatgctatttactccttttttagtctttaatctggcaaatatattttaactttcacattgacaatattatccatatatgacttccatctgtataattcttgtttagggtattggtgaaggaatgggtcttcatctcgttgaagagaataactttctctatggagctttcacttttgtcgtgacttgtccatggtacttgacattgatattattttttttcctttcaataaatggttttaagtttgctgaactttatgttgttgtgtcacaggattaaaaaagatacaaaattgctttcacgtatacttctccgtttgtcagaaatctggagccaacctgaatgggagacaaatctattggatttttttaacaatgctcagttcaggacgtctgtgtacaatgttgttgctttttttgagaatgagctcaccatgtgcacagcagaaaattatgatggaatcaatcatgagagaaaattaaactattcaactttgactactcttattccactgttatttcccctactcttggaggtaaaaaaaataacctaaatatcttttcacaaattgagatcctaaagatatactagaagaaataatcatttacaaaattgtttctttcagcttcttcagtatgtgcattcactctggacggatgaagttgcttctaacatatcagaagaacttgaaggagctaaatgtattatatgttctgagaagctatgtggtattgttgaagaaactactgaaattcaggacatgaatgaggaagagttgctggtagatgagataagggagtggctagaaaaaatccgccaaactgggtatgtttttctttcttggacaacatgcgggagaactgcatgccatttcattataagtaggagcaaagaaaacaaagcagcagacagggacaatgctatgcaaaacacacacacccaccacacacaacacccctacacttcttttctattacaagacaagaaaagctgcaatcacgaccatagtcatcatcattctcaggattcctatcatccgatgcaaacgaccattggagcaggttatgagtcctttagctgcagccatacaccactaagctcctttcctgaaccaccgagtttactgagggagcaacatcattgaaaacagtcacatctgtgcttccacaattcccatgcaacaagcgtgattggagaattcttgcccttcttgagatccctaggtaccttcttaactgtggcagaccaccaaccaggaaaacggtgtagccgcggagcccaaaaatccaagccgaggccattgagaatggtgtgccaaccctgccccgggcaaacacacaagagattaggatgagcttaattttctcgtcagtctgaccacataggaggcacgaggccgggttaggaagtccttgcttggcacctattaggaatagccaatcaaagaaaaaaattgccccgtagtggcaaccatgtcttccaaatacaacgccatggtgcaaaccttatagattccataaaaaaatgcctcgtaagcagacttgtatatgtgcttgttccaataagtttccaggtgtgctaatcttgctcttcttcttgtaactcaatatcacccatcaagtcccatagatgcaatactgaagtggacgacaaaccttctgccaagtgaccaaacaataatcctcacttgttttctcctatctcttccataagaagaccctcctcttatcaatatatttgatggcccatttaaggaggtcctgtgagcactacacgaaccatgatgtggcggccaacttgatgagagaagcttcccatcctagaagatgatcaaccatcttatcaatcaaggggaggagctcggccttggtaggcttttggatagagatattcagggatgagatgggaagctaaatcctcctcctaacattggataggtcataggtgtaattgagctcttagagatatttgtttgactccaaaagcatctccaaagacctctagaacaaccctaattaaagaaactatcttgcgctttgttttgggatatgtggatgaatgcatgttatacattatagaaatgatagatgtatatgtttaaagaatgtgaaaatgatatggagataatgatttgacattgcttgcatattgagttctaaaaatacaacaaaattgtaaatggcgtcatgtttgcatgattttaaaatactctagataataattgttagtgggtgatgatgtggcacacttgcatgttaagctttaggagttagtgagcataagtatatagatagtatagatatcataagactgttgcacccttcctgctttagttagcaccattcctccacttaaaactctagtccgatccatagtaccttagcaatgtattcacgaaatataatgtgaagcttcatctcatattctaacacacaataatttaaggatatcaagatgtggtggtaaggcgtaatatccctttccaatgcattttgtaagttatagcttcatttgaacattgtgttataatgttggttcgaggaaaactttgaaagttcaaagtaaagaaatactttgattgtctacgttatgttttttttgtaattttgtgttcacataaatgtttattttactttgtaggtacaatgttataggtatgtgtgcgagtcttgagggagcatttt

SEQ ID NO: 5176 - DNA, 4204 bp, Oryza sativa
caaaattgtacagtactaacggaggctaactggacggcgatagtaaatcgtagaagttaagcaaaagtcaacggcatattatagaacatgacaaagttgatggtaaattatagacgtgtaacaaagtcagtgatatataatatattttctcatgttatttatgtataaactttaagcgcccgtcattttgcagggtttctataaatattgtaaaatattttacatgttaaatataactatatcatttgcatccacaatttgaaaagttgttactggccaacagttatcaatgaaaaggaggaatggagggggaaattggtaagttaagcatttattaactctcttagttagtagtatttacttatttgttgatacttatcatctggccaccagtcactgcatccagcaatccagattccagcggatagctacgctcttctgagtccattttactttcccctttttctgtcgtcacgggcggccgacacaggcggacagaaagaacaagctggcgtacttcttccttccttggctctgtttcttttctcgccatagtcatgcatgcaggcagatgttgagctgctcatttatcatgatgtgtcacctcgagcggctgtgcagcgaacctcagcgtaggtgtgttgtggccgacggaggtgcttgttgcttgtgttccagaggcgacttcttcggatttgtccagttcaagaggtcagtcccgtctcatggtgagcgatgggctaatccggaggaggtaggggaagaaagggaggggatggcgtcgtggtggctgtctgcccaccagatctggtacatgtggaggttatcagctaccatcgtccttcccttccctaccatttcccatagtgagaagttggaccctgaatcggagaggcggtcggctcaagcaaacgagcacatggaagagcgcacaagagggtttccatctgaaccatctgctttggccggcgccgcgcgcctctcgcctcctccttaggcggcgcatgtctagtcggagcaggccgcgtagagcaagcctccatcacccctcatcacccaaagcagatgccggcagcatagatcaggacaaggcggcggcacggtgagtaagagatagaaattcatttttcttgcgatttgtttctctgggatttttcttcgataatctggactcctctagatggaagatagcatcacacgttttgtaaaaaacccctctaggaacttgcaatttacctttaggtccgccagattgtttttcaccgttgatatttcatctaacggctgtgaaaggtgttctccggccgagaatacgtggcgcgttctccggccgagaattccgacggagtgcaatgagtggtgacacgtggcccaattagaggcccgagattagaccttgaaatcggtttataagattggtgaaaggggatcaccttgatgcaatcctttttttttttgtctgaatatagtgcccagtttcatcattcatctttatcgccacgcttcctcccgacactatttgctctatccatttacaccatcgattcgcaaatcctttcgtcctcaaggtttgctgaaggaacctccagcctatcttatcatatgccttttcgaaacaagcttcagaatcaccccatccaactttttcctatgcatctcgtgcaaagtttcaagaagaataatagcaccttccattatattccttcctttcaaaaaggcggtctgtgaaggttttatgacattttgtgctactagactgaccctgtttgtcataacctttgtaaagactttaaaactcacattaagtaaacatattggtatgtactgttgaattttccttgcctccttatttttaggaagaagagtaataattccaaaattcaaactctcgagagaaagattgcccccatggaagtccctaaagactgccgttaagtcatctttaattacatcccagaatacttgataaaactttcccggaaaaccgtcaggtcctggagctttattgtgttccatttgaaaaatggcaattttgacttcttcagaaaattctcttgttaacatttcattttctgtcaccgtcacctgtggtatatcgtctttttggtcctcgaacatagaaaaattatttctttcgggggccccaaaaaggttcttatagaacttagttatatacttcctaagctcctcatctcctttgattacaccctcttctaggtcaagctgaaaaatcttagtttttctatgctttccatttgcaatcatatgataatatttagtattattgtctccttccataattttctttgttttagctctttggtaccatttaaattcttcttctctcaacaactttgctaaggcctgctttactgaattttttagctcatgttcctgactagtcaaaattctcatctcggctaatttatccagctcatttgcctttgctattagtttagctttttccttttttatatgcaccactaacattcttcgcccatcctcaaagtaattgaagcagtgttaacgaccaaatttggtaatattggtatcggagaagaagattagatcgaagcggaatcaaaaatgaggatcgtcgcggaaacagagtaagaatcggctggagttcggatcagctacgatcgggatcggctaagttcgagtcagactgggttaggtgatacagccgattcggacaatacgatttggtgtacgacatcgggttgagttgatatgcttcaagatggttgccacacatggctagagtcctgagaaggcaattgtatctattaattaggatattttatgtaatttccttagagatatgtttgggcaaaagtctgccgtaaagacttatggtttcttagtgtttgttagagataagagtcgtgtccgatatggacatagtttgtaattctcgggtataaatagacctcgaaccccatgtaattaaataaacacacgttcaatacaatctcggtgcatcgccactctttttactttcgttttatttcgacgagttcttgctttcgggttgagctgcatcggtttcgatcttcacaagaggtaaaacttgttatgacggcttgcgttctcgggattagtgcttccatctttatgatactcttatcttgtttacgtaattcgtcgagttatcatatatcttgcataatctctggcaatattgctatctaatctacaatcggctaacatctattggtagagggcagccgattaggttagatatcgatgttgacttagattatataaggtatccaccactctatgaaacttccaacggcttgattgtctagatattgtccttcttttcatacttatagctacattagttgagtttgatcttatgagtcgtgattagaatctcaatctctagcctgcttcttggttgccgattagggtagtatcggagtttcagccgatcttacctgatttaactatatttgttccatatgctttagtgatatgttaaatatgccctttatatcaagatctttttgcattcaagtatatttggcttttgtttgatatattttacttgctttaatatcttagtatagagtagtatcggagtattagccgatacatgctagatctatctgatctgctatgctatgaacttatatagtttcattgttagtatatacttcgatctaattgatttatactgtctcggcatggcgaccgatctatcccaatcacttgacttaagtatatatcgacatagaaattatatattgttaatatctacagccgatcgagtagatttagtcctttattatctatttataactgccgatcgatacgtacatgacatcggctcaaagataaatgatatgtcatcggcacctagccgattggctatcctttataggtttaaccgcggtttctttgtcttcgtttgttgttgattgcaggatcaaatcaagtggcacgcttgcatacccgaaggcgagttttggacctgcactggagtttttcatcaacacgcttttggcacgcttggtgggacccattagaagtcagaatcacaacagcagtttttctccatggccgagaaaccaccagcatcgccgtcctcggctggtcctggctatgttaaagacaagatctaggagctgggcttatccgaggttgatgaagccaacattgtgcccgtcactctagacaagttgacacctgagca

SEQ ID NO: 5177 - DNA, 17174 bp, Oryza sativa
ttaacatcaatatgaatgtgggaaatgctagaatgacttacattgtgaaacggaggaagtaccacaaaatctactctcttgtcatcaattatttctttttatacacctccttctatatcaacatatatatcattgtctatattctccaagtgttataaatagtaatattaataatcatgccgcaggtcaaacaaaaaaggcataatcaccatgaatgatttatcttgagattaactagatgaattgtttcactagataaatatgacacggatggtatctctataataatatcctatgtcgagcaatcaattcaatcatagatatgtggcaagtgccttgttgcatttgtgatcaccagatcaatagtgtggatatcaacagcatcaatcacatatagagcgctgctgcagagtgaacaagctatggaaattggaacataaaaagcatatagaatatagaggcttagtatatgacatgataaaaagcacagtatattgaagagcggcaattacctctaccataaaggtagttacctccctttcactttatcttgcatcttgggcgaatgtgtcttgtcctagaagctagaacactggtgcacttgactttcccaaaactaattcaacactctatagattccaacataaacagaaaaacatagactccagcttcaacatcatagagtaccaactcaattaaacataatgcatagtctcaagcacaaacataaaattaaattgcataaatagcttgcaggtctttcttgcgatgaggaagcatcccacctgcaatttttattctaaactaagccgagtttcttccttctattagttcttcccataaccatcactgcccttgtcctttgtgatgacattggcagactcatcactcccctcctcgaaacatctatgccctgggaagtcaatgaagtgacttgacgatcgcctgcattgccaatggcaggaacggcgaggacagcttcccttgcattgccaatggacggagggatgatgacctgcggtgcacgctgcctcttcttgtaaatgcgacatatcatccaagaattatcaggttcgaccatggtttccaccagaggggcatgagtatgggcagcagacggactgccattgtttttctgcaaaacagttcgcatatagtctattaaggtgcaaccgtggtatagatggcatctacaataaagagagacggatgaagtgtactagtagtaaaaaatagttgcatgccagttttgtgctactcatgtactgactgaattagaagaatttggtaacttctctatgtccaattttctactccctccgtttcaggtcataagatgttttgactttggtcaaaattaacttgctttaagtttgactaagtttgaaaaaaaaacattttcaacccaagacaaatttattatgaaaatatattcaattattgatttaatgaaactaatttggtattataaatattactatattttttaaaaacttagtcaaacttgtaatagtttgactttgaccaaagtcaaaacatcttataacttgaaatggagggagtacctaatatgggcaaaggagtgtcacccccattcgattcaccaataactgtagtgatgccacttttttaaggaaaagtagcgaccaggagtacaagatcaaatcatgatctaaacatcccttaccgagactaaggggacaagcatgcatagtgttcagcaaagaatttcattaataaaaacacaaactgacaacatagccctttttgcatcccgacaaatttgaacattcaatagaatccgtacttgttagatctccaaacgtctcaggactaaggggataaaaacacatggtgttcaataatgagtttcactaataaaaatgcaagccgacaacatacccttttttgcatctcgacaaattagaatctcttatggattctgtaagtgaaaccattagaccttgctgggtgacacatcctactagattgaattatatagaatcactatgcgaaaaattgaaatcaaccctagattccaccatctcatagatcactatataacaaaatttgaatcaccactagatcccacgcaccttgcatggcatcaatcaatcaacccaaacctattggcacccctcaatggcgacatgcacaaatactctatataattataagatagtaattcctcatgtttccctattccccaacttgaacctcacagtcctacggttttatacaaataatttaccaatcatattaaaaatacagaaacaaatctatatcatatccttttttttttgagggggaatctatatcatatccaatacaatgacatagtgatgtttggatgcagcgtctcaccttggtggtggttgtttcggtgcaaccacagggaggcatggagacatcaccggtggccggcctcatcacaaggcaaggcacaaggctggcaccggcaagtcggcatcacccatccggtgcgctctgtggatgaagacttcctaaagtggaacaccagggtgcgtttcatccccactagtttttcatcggcaccaccgctgggtttgttgtatattgggacctctgtgcctgccaatctccagaacccatcaccagcggcatggttgctttcatagtccctagggtggctgttctccttgcgggtgaagaagtgcttcccattcttcttctcccctgctgctccagcatcaccaacataacaatagaaaagttgacactcaaacataatcatacaagaaattaactgtcaaaatccctacaaacgatctagctgaggagatactactgattgatgaaactaatcaaagatgctgccaaagatttgggagtgacacagtgcgagtcaaaatatatttaccgggaacgatttcccaagggttgtggcactggatgtccacatcggtgatgaagtcgcaaggcagcggctcctgcatggcacggcggtacaggtagttgacaacaagctcaccctcggtggggcggaacacacacccaacggagaggtgcatcgtggtaccgttcagcaagttgatgcaaactccaggaccagccatcgtcctagcttgcaacctacaaacagatttcgctcgcacgctcgcttgctctcgctagactcactaaaacgaatgtaagattgaatggtcccgtggggatggagatggaggctgggaggagctgtatttatagaaccaagagggttgtttgccaactcaccatattgccacctgtatgggcaactgagagtgccgtgagggggactccacttcactgttttttgtctctctatcgccaggctgcagatgggtcagatagcatccagggtgttgcaaggcatgcatccatgcagtaacacacaaaatccaagaggaagaaggtaaagatggctggggttgatggaggaatgaggatcccaacgtcagttatatcttctgatttgttttttgtgtttttcaactggtgaggtggactactctatctccttcttggagtgttattatggacaatataacagtgatgagaagaacacaatagtgctgatctaggagaactgtgtgtgcctataaggatgatattaaatgtgtgtgaaccttgttggcaagccttttaatttgtggccttattgggatagttgatacagtttttttaggcttgttaatttgcagcattaaagattgggggtggggggggtggctgctggaaaatgtgagtttaaaatccagtccttgcctcactgaattcctaaatttttttttggtgctacatgagcgcaccatctatacgtaacataggtgtagtggcagctaaagtctatgtttatgttatacatgttttctttcaatcatcttattttcaaatacatcttattttccaaaaacagttagaaattttatgaagagctccaatttcatcataaagatagcaagaggtaatgaatttaattgtagtgaacaaaatatcttcctattgaattaaaaataaaattaattatttgccacccaaacatatgtgattaactgttttgaactcaacatatgttaattaattatttcttctactatttattgtcagaggtgatcagggtataccctccctcgtgcgagctattttatcaactttttgatccccaccgagaatgaaaataactaaccacaatcttaaatgttaaagcctatctctactccttaaatgtaactaattaacccccttctcccatgtaaaagatatcaagcgattggttcaaaaaattgttactttgatcccattccaaccattccgaattacaggacccataaaatagtgaataacccatactaatccattgcgaaccacaggaacctgactagtacctataaatagaggaatataataaaaagttagaagcccaaactgccaaaatctgccactctcttccattcctccctccgagcaccgctcctccttctcactagagcaaaatcattacgtagaggcacttttgtggagacagtttttattttgccacttaaaccaagagttctatagtataaagatactttttagaggcacttttagcatattttgttaaattaatgttgtagaggcatcttttctgcactttaatatttgcctcatatgtaaaggaattttgttatggcgttttaacctctgtagaggcactttttcaaattttgatttaatgcaagaatcgtcttgcacaatatgtactgaaattgttcgggagacatggtcaaagcccgggttgaagtaatgctaaaggagatttcttgaagccaacgtccagcataagtggcccctctctggtaaggtttgaaagttttcaaaacgtaaatcaaatgatctgaatcaaaatgcctcatcttgataaattgacttatttctcaaatgacatgaggtggagatggtaagtgtgttgaagatattctcaaaattcctctacaggattctagaggcattttaaaactgcctctagtgttagaaaaatgtctctacgaagtattttttgttgtggtgctccttattagtgcttcctctacaccatgctatgccaatggtgatgattgatggtgccagagatgtagtatcgtcgatgccatgccgatttccatatgttaagtaggtccttgttttccatggtggttgatcatcttggatagcaactgagaccaaggtatacagggggcatgatccaccttgttccactcacgaatgttaactagttgtgatcagaggcatcctaacgtcctgattgggattacccctgagttcgtcagcgatataaaaacaacaggagcccgccttgtggtcaagtgaagacctctccacttcccctaattccttgataaagcctaatatcatcgttccttagctaatgctggatgaggcttgtagtgcagttctagggcactgaaagtggcactcagagtgaaaccatcacccacttgtcgatcgctagcattgcctaggggatcaagcaagaaatctcatactcatgactcatatatctacatcgacaccaaaagaagcagagaaggagaaggaggtcgcatccatagatttaaacaatgttagtcagtttaatcttctctttcacattatattaaggtgatgatgttaggctaagcacatctttataacatgtaaaaccaatgagttgatttagattttgcggtgaaaattttggtggtttgctgatgttattttggagattttgtagacggttgattttgtgaagtgaaggtttttggttgaccctggcggtcagaccagccgggtgccgccggccagactgcaggtgttgcagcggtcagaccagccgacctgatggtctgaccggcaggattcttatcgtgttcggtttcgggttgtcttgttgtatttagatgtttcctttggggatttggcttctagatggtttctatgcgtatggatactgttgttatactaatgtgagtcaagtagggacgaacttgtgcttggaatatggtttcttcgttgttgcatgtgcaggtgttgcttgaggcctcgggagagtattgccggtgatagatcggagtcgacttaggagaagttgatgtccatggatcaagagatcatgcgggacactaaaaggctagagagcaatgcacgtggcgatgaagaatccatatggtatacaagagggattgtaatcgtatggaaagaggagtcgaatttggaagggagtccgaatttcggaaagattgattgagataaggaaagggataagttggatacttgcaagagaaggtttcctacatgggttaggcatcttaagttatgttagattcgtgggctttgcacagtctaactcatgtataaatagagagggagggtgaggcctcccggtattggttttagagagactcgagttgagagaaagttaaggtttcgagtttagttcgagattttggtgaggggtgctgttggtgcactttgtaaacactagttgatgcaataaagtcgaaagtttcaatgtacatcttcgagtatgtcatctaccggtgtttctaggtcttgatggtctaaccacagatgtacgcgttctaaccgatagcggtgttctaaccgcaggtgattgggtggtctgaccggcgaggcttcggtggtctgattgatggcaggagggcggttcgactagcggcgacaggtctttgtcatctactccatttgaggtaaatcttttatcccgcaaaagattttgggtttttggttttctctaccattcacccccctccagtaggtttgtttggtcttgtgcaatcctacataacattgattataaactcacattcctcccctgtagccaccatagtatgagggaagtcagcaaaggtggctgatttgagtgcatgagatgtagaatgagagggcttgggaacagtggctgacatgagttcatctgtgtgcgggacagcgcacaaacatggtcctcctcccttcccattgagggccacactggtagtttcgtccatccacttttatcctttttctccatgtaaaagatcgacgccattcaagaagtagttcaaaactgtggcctacgcatacacaaaaaatatgctaggcctaggcatacaaaaaattaacttttgttatcaattattttttgtatccatctccatatatatcgtcatctcattctctacatgtaacccatactccgagtgtaatcagtaatattaataatacagcagcagctcagacacaaaagatgtaataatcctctcaccgcgaatgatttgcccaagattaactatatctattatatcactacatgtgattcagacggtaactctgtaataacatcccatgtccaacaatcaattcgagcccaaacatgtgctatgtgacttgtcgacacacgtataccacacgcatatgtgaatcgatcacatgcagcagagtgaacaagctatgcccatggaagaaaaaaacacaaaagcacaatatattgaagaagggcagttacaacagttacctctaccaggtaactacctcccattgatcttgaatctggggcgaatgcgtctcatcctagaagctagaacataggcacactttactttccccaaactaattaaatgatatattgtctacaacttaaacagaaaaacatagactccagtttgaacagcatagagtactccgacttaattaaatagaatacatagtatcaagcatgaacttcaaattaaaacacataaacaggtcataggtctttctcgcaccgaggaaacactccgcttgcaatttttactggacacagctgagtggcttcctttatttagttcatgccatggccataaccatccttgtcatccgtgatgacatcggcagacacatcactcccttcctcgaaagatggctgccccaggaagtcaatggcaggaagggcgagggcgacttcccttgtattgccaattgtaggaagggcgaggatgagttcccttgcatcgccaatggatggagggatgatgaactgtggtgttcgttgcctcttcttgtagatgcgacatatccgcaaagaactatcaggttcgaccatggttttctcaagtgggccatgagtttgtccagctgatggacttccattgttttcctgcaaaacggtcgacatataatatgttactagatgctgcttaaggaggaaccatggtatatatagcatgtacaacaaagagagatagatgaaatctattaatagcaaagacatagttgtattccagatttgtgctaatcatctagtgactgaattagaaggaattggtatcttctatgtccaattttcttccatatatgggcaaaggagtgtcatcaatctaccatccggtttcaccaataaactgtagagatgtcactttccatgaaaaggtacagaccaggatcaaaacatgatctgaacatcccttcccgacactaaggggataatgatcatgcatggagctcaacaaagagtttcacttataaaagcgcaagccggctgcatacctctttttgcatctcgataaagtcaagtatcttattgatcccataactgttatgtctctaaacaacccgggacaaaggggatagccacttgtggtgttaaaaaaagagtttcactaatgaaaacacacggcgacgacataacacttctcgcgtcttgacaaaattgaatatcttatagatcccatgacagttagatctctacacatcctgggactactaggataaccacgtaatgtttaataaagagtttcactgataaaagtgcaagccgacaacgtacccctttctgcacatcggcaaaattgaatctcttattggtcctttaattattagatcttgattcatggaaaaatcttatttattgtaattagatcttactgaaatatatagaatcgctatccaaaaagtcaaatcaccttttggttccagcacctgtaggtctgacatcataacaaaatttgaatcaccactagctaggtccatcctagaccttgttgcaccatcaacgtcaacatagaaaaatattgttcttataattataagtttgtaattcatcatgtccatattccccaagttgaatgacacagttctatgcttgcatgtaaatacttaaccaattagattataaaagtagatcgattctatgttatatccaatatataggcacggtgatgttcggatgtgtagtgtcttaccgtggcgatggtcgttcctgtgcggtggcagggaagcatggagccatcaccggtggctggcctcgtcacagggcaaggtataagggtagcaccagcaagtcggaactcctgcatcacccattcggtgcgctttgccggtacgtaagaaatgtccgcgtaggtgggacatacccataggctgacggctttcattccgccacgcaggtgtcttcaatcgagcgtccactcactagcgtttgctgatattatcggctacctctggagcctactggacctccagaaacccatcaccagcagcacggttgctgtggtggttgccaaggcgttcgttctcctcatggatgaagaagtacttcccatttgtcttctcctccgctgctccatcatcatcaacccagcagacaataaattaactatcaaaacaactgcaaactatctattgaggttatactacagattgatcaaattaactgaagaagctggcaaagttttggattaatatatctaatgggagtaagcctgtgtgggtcaaaaaaatatttaccagggacgatgtcccaggggttgtgctggagaatgtcgacgttggtgatgaagtcacagggcaccggttcctgaatggcgcgacggtgcaggtagtggactactagatcagcattggtggggaggcgcgtcgatgtaccattcaccaagttgatgcaaactccagggctggccattctcctcaatcgtagaatacaaatatattccgctcactctcaactctcaaatgaattaaagattgaatgatgctattgtgatgaaggtggagggagggaggagctcttatttatttacccaagaggggtgtttccaactcatgattattgccacctgtatgtgcaactgtgaatgttgtgacagagactcaactctacgatcacttcctctttctctatctccaggctgcagatggtgagatagcatccagggtgttgcaacacatgaatccatgcagtaacacacaaagtccaaaaagaggaagaaataaagatggccagggttgatgagggggtgagaatcccaatgtcagttatatattctgttgttttgtgcttttcaattccttttgagaagctctctctctctcgctttcttttttgtgtttatttgggagaagataacagcaatgagatgagcacaatagtgctgactaggaaaactatgggcgcctactaaggctgggattaaaagtgtgtgaaccttgttggcaactggcaagcttttttttattttggccttattaagtttctagaataaagatagggggtgcaggaaaatgtgagttcaaaagctagactatgcctttctgtattcccaattttattttgagctatatgagagcaccatctacgtaaagttggagccggccgctgcaaggctaaggctaagtttatgcatatattctttgaaccatcaaaattttcaaatagatctttccaaattaccagtaatgcatgtatgatgagttctaaatccatcacaaagatgacagaaagtaacaaaattaattgttgtgaataatgagtggaccatatctctgcgtggattaactataaaattaattatttgccacccaaagatatgcagttaactatttgatacttacttaattgttgcttctacaatttatttattgccatcggcgctcagggcagtgatccgtatactagtgacaccgttttagcacttgtccccccatgtgattgaaaataaccatccacaattttaaataatcaagcctataactgtaattatctttttagaaaacgcatgagagttgcacttcatttcactaagaaggaaaaatacatatacatatatatacctataaactgaggagtataaaaacttatagaagccctaactgactagatctgtcactctcctccatcctttttaacctttaatcgagcaccacctccttgctctccctccttcccggtgcttcctccacagcatgctgtggccatcgcgaagatcgatggggccagggttgctgtctccttgatgccatgcctatgttatgtaggatattgtttttcttgttggttgatcctcttgattaacaaccaagaccaagtcacaaggggcgcattgtccatccttttctgtcatgcttgttggttcaccatgatcgggagcagcataatgtcctgattgggatcacccccaagtctatgagtgcaataaaataaggagagctcagcctgtggacaggcgaagaactctccacttcctcaaactccttcataaaccataccaccactgatcctaagcaaatgctagagaggacccatagtgtggttctagggcagtgcgagtggcacctatggcatcatccgctcgtttatcgccagtttcacctatggtatcaagtaggtatactcacattcaggacatgcacatctacaacggcaccaaaagaagcagagaaggagacggcggcatccatgtcctcaaacaatgtatgttagtttattcatcttttccattgttccacattatattaaggagatgcgtggtggtgagcctagtagggcgttgactgtaaagtatgcctaggtggcagagggaagcggatgtgagtgcatgcactggatagtgtgaccttgggtttcaagcagtagccgccaggtaccaacaattgcagtgctccagaccatgtgtgtggtggcagggtgctaggcaacatggtttgtgcaccgtgaagcggctagtggaagccggtggtctagtgacgtcaagatccaactgcgcatgtaggcacccctaaggccctacctctccttcaaaagtgcatgtgtgcagcttcatcaaattgatcaaccagctttgccggcacctctcctcctagtggggctgtcataaatgtgtcgcatccttactcagcctggctggtgccgctatcaccgcctctccaaacctcacctagtgcccgacgaacatccatctttccctcgtctagggttggtcactgctgtgctgttcacctagatcagcggccaactccatcttcaaccaagccatcatcaacctttccaagcatttaacctctgctaccaccactagctgcaccaagccaccaaccattgggttcagagcagttttaccgtactccaacttacaattggtctagcacttggttattgtatacattttccaataaaaaaatatttgctcctttcaattgatatatcacaacagaataaggaaatattagcacctattatttacccttcccaaccttaatcatgcacgcaggaaattaaggactataactttggtagcctatctatattgatatgaagatctggatgcccattaatgcttaaatttaatgtgtgaaatcacacgtaaatatatttcaaacagcagcacatcgcaaacttttcactctatatttaaattaagagttgcacattagtttttcgcaatgtctatatatttttgtattctcatatcagatttgaaattttgcattttccatttgatcgtgattgaaatgccattaaaaatttgcattcagggtaaacatataattaccatggtgtatttgtaaattagtacagcataaatatttaatatcattttataaattactccacttaccttattaattgtgttcctaataatgaatattatccctgtccttattacttttggaatgtaagagactgtgtccacagttggaccttagtctaatgtacggtcagagaaaaacttggagcaccttaagaagtgacggtactagtacactaacttacctctaaatttagggacttaacgctgaagctatgccacaaaattcacacttgtcattaatttttattattattcgttcatctatattgatatatcattcaaattcggtataacacataggtgttccaacttaatatatattactcctaattcacataggccacaaaatatatagaaaatgctctcactgcgactaatttgcacagcatgaatcaatgcttgcttcactataaataaatacatgatatggatgacaactctgttacctcccatgtccaactatcacctcaagcccagatacgtggtaagtgaatttgtttccgaacacttggtaagtgaattctggacatgcatttcacaatgagcaattttacggtccttaaggaggtaccatgaggtaccactttttctattgtaaatttggtacctcttggtacatagatactatgaggtaccatgagataccaaattttacactaaatttttggtatctcatggtacctcctcaaggaccgtagaattgatttttcacaatctgatcattattaatgtgtgtgtttatgaacaacacatatcaagtaacatgtagtacagagcaatgcagctcactcgatgcaacatagtgaataaagtatggcaacggaaatggatatatagaatatagatagctggctagaatgacattatgaaataggacaatatatatatattgaagaaaggaagatgcaacaatttccagaaatgtagctacctctctagaacttcttgcatcttggacgactttgttcatcctagaacccaaacacgcttggctttcttgaaactaattaaacaggacagatacacttcaaacttttattaaaaacagcataatctccagatcgaatagcttagagtactccaacttaaagacaacacacatagttctccaacttgaacataaaagcacatatataggatgcatgcaggtcttccatggaatggagcgccatacttgcagtttttattcttgagactcagttcacttccttcacactcgatcaatttgcttcattcatgccatcaccatccttatcttcaccatcaccggcagactcatcactcccttcctccaaagaggaggggtcaatggtgcagctatggggcgaggatggatcattgcgagctggctgccccaggaagtcaatgaagtgaagttggccttcccttgcatcgccaatagcatgagggatgatagcttcccctacatcgccaatgacaggagggataacaacaggcggggcacgctgcctcttcttgtagatgcagcagatcacccatgagctatcgggttctaccatgattctcataagaggggcagaatcacgcttggcacgaagagttgcagagagaccatcacttttctgtaaaatagacaccattttgtctgttagtggatctacttaaggtgcaaccatggtatatacaacatatacaacaaagagaatagatgaattgaccattatagtaaactagtttataagcctcttactgtgacaaatcatatggggactgaattagaaagatgtgtgataacttcatgtccagtttgaatgttgcaactaatttgagaagtaaactgttgacatgtcacttatataaatcttgtggcaatgatcaaattaaaaccagatgtacaaatccaaatatcccagtatcaagtgtatcatgacacgtggtgttcaataaagaggttccctactgaaaatgcaagtagacagcaaacccctttttttctcaatatatttgaatcactagtagatcttgtaaccgctagatctcgcttcacggcaaaatcaattaatcatcattacatcctagtaatacataaggaaaaccatgtgaggctatgacaaattcaaatcagcaggcccaccacctctagattccttgtcacgacaaaatttgaatcacttctagatcccgcgcatcttgcatggcaacaataaatgaaccctatatcaagcgtcacgtacccttagtcctaagatcgaaaacaactacccttcccttatttaataaatcaacacaagagttatagtatatcatcacgtatactaagtcatcatattttccccattccctaaagctaaaactcataatccaacctatccaaataattgagcaatttaattcaacaggcatttagatggaatcatgataaatggaacagtaaaatttttggacgtagcatctcaccttagcgattgtcgcttcaaggcagccacagggtggctctgaaccattgctggttgcatgcctcatcatagggtgaggaaggagaccagcaccagcaagctgaaactcatgcatggcccattcagtgcgctctgcagatcgtgactttccgtagtggaacactagagtccgcctcatcccaactagcatgtcgttagcagcaccttctggtttgtaatagatgggcacctccgagcctgctgctctccagaagccattaccagcaacacggttgctacggcggctaccagggtacttgacctcctttcttgtgaagaagtgcttccctttctccctctccgccacttcatcatcagatcgttgccaacgaacaaacgaaaaaaatgataaacaaaacaagagaataaatatcgtcaggacacacatgcaattaatcagtcaaatcagagatatatgcagacggatgtggtaataattttcatagaagcaaagaagtgcatatcaaaattaacctgggacgatgtcccaggggttgtgatgatggatgtcaacatcggtgatgatcgcacagggcagtggcacatgaaaagcacgggggtagaggtatttgatgactagctcatcgtcagttggacggaaccggaaaccagggaggaggtggattgtggcaccattcaccatggggatgctaagtccggtgttagccatcaccctagctcacaaactacacaacacagagatcgctcgctcactcgctcaagattcaccctagacactctagagaacgaaagctcaaaggcactgcagtgatgttgatggaggcaaagagggacaatatttatagagcccaggggacacccctttatcagatggatgggcaactgtgagtgacgtgacggagattcaacctcactttctccctttgcaagtttctggccctcacacactccctctatctccaagatatggctggtgagatagcattgaggtttgtgttgatgggatgagaatcccaatgccatgttttgttcagttctgtgcttttccattcttggaagctcatacaaccggttaatttcactctacctcacttcctatttggtcttttatgggggctagagataactatgaccagatgtgaacaaccatgctgactaggaaaactgtggatgcttattgaggctgaaattaaaggtgtgtgaatgttgcttgcaagcatgtttatttgtgtccttatttggattgttagatagctttttggggtttgtttcctagtaaaaagatagggggcttgtgttggagaatatgagtttaattggggtgggaccacaaggtttgtgttgtgaagaatcctaacatggaggggtagacatgaaaaaaaaaggaattttccttctaatttttgcattgttgtccctaaattaaagtttatctatttaatgttttttgggtattaagataataatatttcgtaatattgatagaaaatttgcaacagtttgtcctagtctctttttttattcttaccattttcattagtaatattttattttgttattattcttaccttgcactaattgtcatatatagttattgttgaaaatttgtattgggtaaaaaaggctacagacatattatacatattgtgtaccaatctaatcttttcaccctatagtaagcattcatttggttaaggttaggtactatagagatcacaccataaaaaatggtccagtagtatagatctttttgacagaactgtaaaacttgggctgcatctttatatatacagatggaaaggtctactagaatccatacatattaatctaaaacataaacaagatataaattctctcattaatcagaaaaactagaaattcccacattacatctaaaggcaaattttgc

SEQ ID NO: 5178 - DNA, 7158 bp, Oryza sativa
ataattatccaactaaaatgcgactgaatggtgggctgtgggtgcatggttttgcgagtcgcacccatggcaattaaggaccggttcacgggaaaccctggaagacttacagtgcttaccacaagcgggaatgggtaactgcttgatctgaagtatagctcgaccctttcctaggcaccggtggcgagggtgggcgtgatggagttgggtcggccggggtgtccggttgtccagctgccggattcaccgcggcgcaagaggggaccgcccactgccttttgaggggtgggggtgaaaccttagcgtggtgtggatggttagggaagggttatgcgaagggtctcgtcacaatcactcgacatggtgacgtgtgcatcatgggcacatgatgacgcggtgacatgtcggtgggttgtgtcttgtgggtacagttgtgcacctctggccagagtaaaactattcgaatagccgtgcccgcggttatgggcgatcgaccagattcaccgtgattagtcccatcttaataaatcgacccaatgcactgtagtataggtgggttggttgggcctgttcaacgtggtgtagcgttgatcagtggagatctaatttactttaattacccaaccgttttactgtttgctaaataaaatgttttccaaccgcctttatgcaaatagccacaaacccctccttgtattcctttgcacgtctgcatcattggtgtggcttgctgagtacggtggttgtactcagtcttgctattattcccccttttcagaagtgtagtgcttctgagctgaagatgaagttagaagaccaaggctcagaccccagttgagttttgcctgtggagtggagctgaagccccgctaggatcgcctttttccgctgctgctgcttttgtttcgatgtgaggactaagtgcctcttctgtaagtattttacgctttatttacgtttggaactgtttattacttgtcgttttgtgtaccctggctggtcctggacagggatttaatacacaaaatagtctggaaatttgggctaaatttctgggcgtgacatcccccctcccccctccggccagatctggaggggaaggagggagggaggggagccgccgccggccgccccgcgccgtccgccccttccgccggcggggagagtgaggggagaggagaggtgaaggggaggggaggggaggggaggggagagaagaggaatttgccacaaaatgtgtcatgccacacctcactttgccacaaaatgtgtcatgcctcacaaagtgaggctagcaatttgttagccacaagtgtgctaagtttggcaagaatttgagtctatgatgcataggttcaatgactagcaaagtgaggcatcatacaattgtggcaaccaaccaaacaatatactaaaaaattgtgacatgcctaaggtttgacatggcaacctttgagagccaaccaaacagccccttagaaaaatttcagccgcatgtgccacatatatataccatgctaattttcgcaggcgcacctcatgtggtccgcctgtgaaatttgatgtccgcctgttttcgcaggcgaaccacttaagcggtcatttagctctaagcgtcatgtccgcctgcgaaaataagacccccacgtcggaaaaaaaatgcgttttctagtagtgaaaaaaaacaatgtcattgtaattacatataagttacgttacaattataatatatttacgctatgattgtatattatatttacatctgataatattttagaagaaaatttgacgataaatgcataattgctttacagttgatgaatctagaactgtttacgctcacaattttctcagtgtttggatccaaactatacgatgaaaaggtagtttcattggaacgtaatttcataatgcatcgagaataccttgtggatatgcaggttattactggtcacgtgggcgaacgaactcatcacaagaattggcactaatcaagctcatgttccctctgaaactactaaggaaaaacttgtgacaacaagtttatacctgacaattactgcttagtggatgaggtgagaagcaccaaagattttgatttctcctttaatataacttattttgtttggttaaaaaaattgtatattccccaaaatttctccccactattattcaagcttgaagccttgaatgttgttcactaaagaaaagacatgcctacagcatgtgcttgtatgtactgttgtataatctattgcgtgctttggttttgaaggtaactgctacattgagagaggctggtcttccatcatcaaatctgaagggcctctttagatcccatcctggggggcagagcagcagaaagctttggataatattaaggcatatatgagttcccctccggttttaattcctccacagaagggagtgtctttcaagttgtatttatcagccgatgagaagtcaattagctcagttttgattcaggagttagaaggcaaggagagggctattttctatttaagccgtaggctcttggatgcagaaacaaggtattctccagtggaaaaattatgcttgtgtttgtatttctcttgcacaaagttgaggcattacttactatccaatgaatgcactgttgtatgcaaagccgatgtgatcaaatacatgctatcggctccggttttaaaagagagagttggaaagtggatatatgctttgacagaatttgatctcaggtaatccaaggcagtcaaggggcaagctatagccgattttattatggagcatcgtgataattcaatcggctcgattgaaattgtgccctggactttattctttgttgggtcagtttgcgagccaaaaaaaatggttaatcaacggagtgacaatggtttgatccataacactcggcgtgatgagatctctctcaaggcagtatcagagggatttaaacgaaaagagtggtgaaatatttgagagtgacaccatataaggtatcttgggaactctcttactttgggaactgttagagaatcgtaagtggcaattacaccctagtggtgtgattatgaatcatggatggttttccattgctcatggcagccactataaattccagaaatcatcatgatgttcctcggaacttgacagaaattgttctgtacgtgggtcagaagcatacggagtcaagtacagaaaggtgtagtcagtaaggtatatgacagagaacctctttttaacggatcatctttaccgaagttatgaaagcgaagttgttatgatcaaagggctgaaactctcgacagcatcaaagtcagtttccatcagacgctcagattccagtacttttgggaaagtagctgcggggcctatagtccgtcaacccagaaagagtcagcaaaggatgatcgaagaagtgagaagccatatcaggagaaggaccttttaagtttgatctgttaagtgatcactgtatgtttcagagaatgtcaaccatgccatccgttcaggcatacaacaccgaagccaggcctgaagcaggacagttatgctagcagtagaactaatggggaatgtcagtcaatagtcagtatgctcatgagctaaatgagaatttctttgtgtggaatcgcctatcatcagctaagggttaagctccatgtctcgccgggacgaaagtgcatcgtcattgcttcattttgattgatcgatgaagttttcagttttcaaagtcagggctctttgcaaatcagaggagtgttgttatttttcaaggacagcagtttaattgttcccagtcaggcggaagtatgactactctctgtaagggggttaggtcgcagagatgagttttggcttacctcgtcgctgtttcccttaaagattcaacccagtgcagccatccgggtagtattcaacatatttttttttctaaaaaattgatgcatggaaatgaagtgctaattaagttaccaaaaagtaggattgcagtcatcactttaaatccaaaattcgtaatgacttgcataaacatagttaaaaattaaatgtcaatatataattaattttgctggaagcctttcatgtttccaggaataacccgtaaacatttaatagagcttgaaaatcatcattaagctctaacctgattcttgggagtagcatgcgcctgagccaaaatttctaaggccgtgtttagtttcaaaatatttcttcaaacttccaacttttccatcacatcaaaactttcctacacataaacttccaacttttccgtcacatcgttttaatttcaaccaaacttctaattttagcgtgaactaaacacaacgtcatgttcacttgtatacatatccgcagacaatactacaatcacaccagaaattgcatatctacataattgccctcagattcaaactgtatctaccatcgctagctggtgagctcacatttctaacatgtcaatctacgttcagtcatgcaaataatctactccctccatccccaaaatgtttgacaccgttgacttttttaaaaacgtttgaccgttcgtcttattcaaaaaatttaagtaattattaattttttcctatcatttgatttattgttaaatatacttttatgtatacatatagttttacacatttcaaaaaaaatttgaataagacgaacggtcaaacatgttttaaaaaatcaacggcgtcaaatatttaggaaaggagggaatacgtcactattaagaaacaggaataaatttatgagtgacataaatgagtgcagtttggaaggaggacatgccatagaactggacgcacaatatttcatcaaataggtattgggcgtttagattttgtttaaagtccaaagctgaattcaccacagaaaaaatataaagatcccaatgttagttctgtcaagggtgttcaattcttcggttccacattgcagaagcttagagataataaaaggtatatggttgttaagctgacctagggaagattttacctgaaagttccatacaatgcacgggtcgtttatctcaaaatgcttgcccattgccatatgtctgaatatgaaaaaaaaaaaaagaagcattgtgacagttgttacctcgtcagcgtccagtcaccttagccataaaccaaaaaatcagacaactccattacattaggcatggtcagagagtgagaataggctgcggtggaagcttgatagcaagataaaaatgttagttctactaatataatatggatagagatcaattgcatttaagacattgtcagttccagcatcactttgaaattttgtgaaaatccatgtcgctgaacaatgacaatatagacacatatccaccgttcaggatatagtaggaggcgttccggccacacttctctagctccttcactacggccgtcagcatgaattcttggttgcatcatgtgcatgccaatctggtggagcccggtgccaccgaagcagcatcatgtgtatgtcaggttcgcccatggtcgtcatacatgagtaacttagcaaagttcagatctacattttgaaattcagaaaagcaattcacactaactgctctacatcattctcacacaagtaaccccacaactcccaaggaaaacaagaaagtacctgaccttttagctttaaggctatgtgaactcaagaactctgctgcatctgctacgccatgcctcttactgagcctagcattgcttctggacatcctgcatatggattaacgatttactatacttgaaatcagcaatacaatgttcagaagcatatggacgggatgacctggttggctggtttcacatttggacatcaggataccatcaccatccgtgtttgctcacacatttgcaccaacgaaagaaaataccaagcatacatccattgaaaaaaatacaaagaccatgaattactgcagaggagtgctgactggaaaaaaaatcaagcaaaaaattaaagatatatttgagaaatacgcatatgatatattccaatgaagcagcacaccttcaaacttccagatctcctccacttcaaacttccaggtacacagaggtagtacctgcactggaacctctagaggtagtaccactctcctttctcaatgaacaaagtttgataaacaaataaaatttctgttaaaattatgtccggtgaatttaacattggccaaataaatttgtccgtgttgcacatgctgacagctgctgaccttatgttccaagaggaatttgaataaaatccaacgcaatttggtaaacatataatagagttaaacaattatatataactaaactttaaaatacagctagacaattcgatggcggcagaggggaggtgccaagcagcgaggtcttccccgatgatcggctgtgtgtggcggggcgactgatgagcagagaggaggagatattagggatgggggagagattaaaggggaaaggggtgggggaggagggatctgtacctttggaggggtagcacagttggtgtgctagcgacgacgaccgagctcattttaggcgtagggggcggcgacttccctggtgatagggcaccgcggttgaggcgtggcggcggaaggcgaaggaggaggtgtggcagcagaaggaggaggaggcgcggcggcggaaggaggaggaggtggtggggcggcggaaggcggaggaggagacgcggtggcggaaggaggaggaggaggcgcggcgacagaaggcggaggaggaggcacgacggcagaaggcaaaggaggaggcgcgggcggtctgggcgacggttttttttttttggcgatttggtgaagagaaggattgagaagcgctaatcgcagtgttaatcccaccaaacaactcgtgccttttatattagtctagatataacaccattttaagtgtttatgatttattctttttttggaaaaaaaaacaaggagttcaagtttaaatatgagtactgtctggtgccatttataattgaatagagggaatatttttctgtgatggcaaagtccaagcaaaccctaaaaatgaaagaagtaagagaaaacatcattgcaatgtctgttgcttgcacttttttgcaagttgtgggtgtgtctgtttctgtcaaaatgtagcctggtaccatgatgaaaat

SEQ ID NO: 5179 - DNA, 3945 bp, Oryza sativa
aaaggcttattgaaacataaagtcatataagcttaggtagctaagttgggagtgggtatttcagcaatgcccaccccattaatcaaaagcaatgagaaactaacacacaaaaatagtgcacaattagtgaattgttatggtgttagtgaccaaaagttagcgagatgcatactggttgtaaatgatggagtatgcattatagtgcaattaactaatagagccaatgagacccaacatctaacaattcgtctgaatcaaaacacttgaaacatgaggcaaatctaacagcttgcccacatttacaattggtacaaattaatgtcctgaaaggaatctgaaatgagtaggtggttagtttgttggataagtatgtaaatagctaccaaggaaggagataagtagatttaagatcgatgttgtgttccacacgcatgctcgactagctgctagcttgttgatacagcagcacttgtgcagatttttaattcacgcatgggcagaggcaggcaggcatgtatccttttgaatctcaagatggatagatttatcgtcagttgcctatatcaacctataatggtatctagctttagacagagtaaccacaagtaatttaccttgaacagggagtgcacattacaataaagcttaagtgaaagctaaagagagggaaaattgtacaatttgaaacgaattcggcgataatctagttatgaaatggtaccatgaggagggagctggtaaggaggcttttgttttttgcttgtttctggtggcgcctccttcatacaacagagtagcattcattttttaagacaacagtaaaacatttcaactagagaataaaattaccttatgcaagctagtaggtttccaggaaacattcaactagaaaacactgtactaattacttaagtaattgatcatgaccaagtcaacagcctaaggctaaaccatgcatggtatgcagtctcagcttaaactgaaacttttgttggctagttaattaagcacagacaggagacaagttctcgagtagaaactacaaaggcgatccatacatacgaatacgattccctgaacgcaattcaaatgaaactgaagggaagaaacttgcgagtttctgacctgtcgatctgcttcacgatccgatcgcggaccaggcagcttcttctccgcgtccgggcagggctctaccgatctcgggtggactccggcgacggtgacgacaagttagggttaggggttggggtgctcggaggcaggagggggaagagggggggcggggcggtggcaggtgacggagaaagggcgcggcgaggcggcgcgggatgcgttacggggaggtgaggaggcggggatccgacgacgttagccgccgctgacgcctcgacggaggggaagaaggcggcgcggaggcgaggtgttgatggcggcggacggggtgggaggaggaggaatacagcggcggaggggagggctggccgcggcggcgcgtgttctggtgggccttgccggagtcggaggcgacaccggcggtcgtcaggggcgggtgggggaggcggcgggcagcgtgaggtggggccgtgtgatcaaaagtactcatcacaagtgcccggtcagatctgcaccgtagggttcaatccaacggcccgaatttcgcatgtgatggaatcataatttctttatatcgttttaatctcactcataatttcttaataatctatccacctactattctactactgtctatttattaccatatagtttcacgaacacagtactcatttatcaaatccaatatcctccactcatatatgtcaaaccgaacgggttaaaattgccttcacctccccccaccgcattcctcccgtatgcacccaccccaccccaatgagaattttgattatttaccatctaaaatgcgcgctttgatttatttaccatctgatccatatgtcttactacactttgataccaccttctacactaatactttctacccatagccatcgacaactatggcagcaacgacgagaagagatggcggagcctccgccatcgtcgccaaatgccacggtggtagcagctgcggcaaggggacaaggagaggaaggaggcgccagacctagccaccggcgaccatggcagaagtgccaagaagagatggtggagctatcatcggtggcggcaaggcaacgcgaagaggatagaagtacgggctaggaagagatggagtgatttttgatgagtttaatgtcaccggagcagaggaataagatagatccaatcacctaagtggaagaaaataacagacgatagggttgttgcagtctatcgtatatgtttgttgcactctattttattcaagtgtttcatccttgttttattcgatgttacacatgatgtactatgtggtttcttcgatgtttgaagagtagagtgttgatgttgtgagtaatgtttttcattgtttgatgatttgattgaaatatttttggcgcttcaaagaggactatttctaggataaatttttttaggggtctatttttgaaataagtttttaagaaggaccaaatagtaaaaaaatcagttggtaacttgttatatgctctttctgatttctgaagttgcttacatgctttaatggtgtgcttgtcagtctaatggtcgctttggtttcattggtgagaacttatttctatgtgactatgtgcatgtcagagttgaggaagagatgaagtttgtcgtgccaacttgatctggctggagacgtggaggcataatatatatctgcgtacacctatgtatctgtggagacccgagtcgggcaaggcaccatgcacgcatgcagagatgggatgcggcttgacacgggccggtgttgaggtagacccgaatgcccgtatcagacgtcggcggctacgtacaaaaaattatgtgacgatggaacgtgacgcggacgaactcggattgacggatgaaaatacgagtttacttttgaaatataaatacgtgtttgagtttatttttaagttcgttcgcttttggaaataaaaaaatatcttataagaaatctctttaaaaaaacctcgctcagctaacttgggacacttttggaaatacaaaaggagtcgtataagaaatcaattttaaaaaactcacatgctatcttgagatgagaatcgaactcttaattacaactcattattttacaaaaaaaaaatccaaacgattttccacaatgattttcactcgaactcaaccgtatagaataatagtaagactaaaatggctttcactcgttgcaacgcatgggtatttttttctagtttttataaaaattgaagatgtttttatcggtattttggtacgtcatccgtgtataagttggtttttaagtttgtttgcttttgaaaatacatatccgtatttgagtctgtttttaagatcgttcatttttattaatacaaaagaaaacatataagaaatctatttaaaaaaacaaactcgcatgctaacttgagacgatcggactcctaactgcaacttatgattttctaaaaatatatatatccaagcgaactcccgtaatgaattttatcttcactaaatcatataacaataatgggattaatatagacttcacccgttataacgcacgggcattttttctagttttatagtaggtaaagatttagactaaaagtgtcccagcgttgcaacacgaagaaaattgaggaaaagttaaaaaatatttatattatataattaatcaaaaatacaaattttactatcttctttatataaagaatatatatatatatatatatatatatatatgtgtgtgtgtgtagaactactatatggcgttacaggcgccacatattacatggcgcctaacacagccgcaccaccactctgtcccatcttcccccacccaccaca

SEQ ID NO: 5180 - DNA, 12291 bp, Oryza sativa
aaaaaaaagctagcagattggcactttctgtcatgcatgggtgctgatgattatcttgtatctaatttaatcaatcccatggctgtgattgatcaggaatagtttgtgtgtgcagctatattgcctattggtgtccagggtcacacaccataagggcatgcatgtcagcagctggtcatgtgtgccttttcattcccttcttccttcctagcactatataaaccccctccaaccaggtgctaagctcatcaagccttcaagcaaagcaaactcaagtagtagctgattaccagctcttctctcttctcattgagaagagggaattaagttttgatctctgctttattgcctgatcatcctcttgttacttgcaagcaagaacagtagtgtactgtgcctcattgatctcctcccaccaaactctctctctctctctcatattccgagctagctagttaatcaagatcttgctgcaatggctggcatgtctcttcagcatccctgggccttcgcctttggtctcctaggtgtgttgcctttgatctgatccaaggaattctcttgagaattaatcttgcatggttatttacttttgttgttattattctctacatttttaatcatgtacttttccatgttccacttttgttgccaaagctactatatttttcctaccaattcatccaaaactactatattatagcaaggcagctagtggatcgactttgcacttttggatgcaattgtgagtggtttacattagaggggccatgcatagccaaataaattgtttggcaaaatatgatttcccttgtagttagcacaatattgtgatctttcattcctttactctttttgttccaccaccctcattattgcaaagccccctcttttagaaccaaactaaagataagaaacatttgattcatcattagaggagattagatatacatacatactacacatgcattgctgtgataagcctagccaggcacagaaagagccaagacaaaaggagctcaaaagaaaaggggctccaatatcttgcccggcctgatcagtgtaacatgacgtcacccacacaattattaaaaggatagatgcatatgtgttcgttacgtatctccttgtgtcacgttgctgtgcatggttcactcgcttaattataacgtccgtcgcattttatgcatgcacttcgtttttagttaatcaaattaaacaagatcctaacatatgatttctattttattctctttgcaggcaacatcatctccttcatgacctacctggccccactgtaagtcccacacatccggatattttcttttctttagcgaaattttacattgctccagaaagtaccttttacactaaaatttcttatacaccaccataaaattaatgtggtactattggtaccttatcaaaaatgataaaattacctttttcttcagataaaaacactccccgtctctgtataactaagatgtagacaaccaatacacatgtctagagctaatcctatcaattaacattgctagtaaatacaaggaaaaatataaagaattaaccaattgcttggatgtcttgcaggccgacgttctacaggatctacaagagcaagtcgacgcaggggttccagtcggtaccctacgtggtggcgctgttcagcgcgatgctgtggatctactacgcgctgctcaagtccgacgagtgcctcctcatcaccatcaactccgctggctgcgtcatcgagaccatctacatcgccgtctacctcgtctacgcccccaagaaggccaagatgttcaccgccaagctcctcctcctcgtcaacgtcggcgtcttcggcctcatcctcctcctcaccctcctcctctccgccggcgaccgccgcatcgtggttcttggttgggtctgcgttggcttctccgtcagcgtcttcgtcgccccccttagcatcatcgtaagaaaccctagaattgcctgtaaacaataataactttcggtctctgcaccaactaaggatgcacatatttacgcaccgcttttgctatctctgcagaggctggtggtgcgcaccaagagcgtggagttcatgccgttctcgctctccttctccctcaccatcagcgccgtcgtctggttcctctacggcctcctcatcaaggacaaatatgtcgctgtgagtagctccgattcgacccgttcttcttcctaaattttccgctgctcgatttaatttctatttctaattgtggaagattgtttaattatagtgattatggctagctgataaccgattttaatttctgatggtgatccaaaatggaacagcttcccaacgtgctgggcttctccttcggcgtcatccagatggggctgtacgccatgtacaggaactcgacgcccaaggccgtgctgaccaaggaggtcgaggcggcgacggccaccggcgacgacgaccactccgccgccggcgtcaaggagcacgtcgtcaacatcgccaagctctctgccgccgtcgacgtcgtcaagacccgcgaggtgcaccccgtcgacgtcgagtccccgccggcagaggcgccgcctgaggaggacgacaaggccgccgccgccaccgccgccgccgtcgccggcgccggcgagaagaaggtagctgcatgagtgcgtgcatgcgtacatgggtcgccgtaagaaggaagaaggcgtgacgtgtccagcccgtacgcgcgccacgtggccaagctagcttcagagctagtgaagctgcagacatgctagctggctagctagcagtgagagagtgcgacgactaaaaaaaaagtagtgattaattaagggcttgtaatttaatcgttgttttttttttctctgtttcgttgagatcgatatcgttgtcaccatgcatgtatttcgtttttgattctcagtaattaattagatgggctttctgtaattcaacctgtaagggttccttccatgattaattaattagcgtgttaataattgtcccaccaatacagtgcttgaattattttattgatagtctttggagttttgttgggtagtactaattaattaattcatggccattctgaagtgatgcctagatacgtaattgatagagttgagtgaattacaagaaattaatttgacgcaagtgacgagaatttgtgcatatgccttttgtgcttttctttcggcggcagattgtaagcttttccgggtctatcttagctttaattgttgcctaatcctcgctcgctccagagatttctccttttttgttccaactgaaatccgctctttcaggagcaccgtagaacgttaacgaggctataataaggaattatgtgaccatattttgcatgttctagaattttttttctttgttttgataattttctagggacaaaacaagacaggtcattttagtcatggatgattggatgttgtgatcaaactctggcaacgaaaagcgcagaacaaactagggattcgaatttattttaaatctattcaaaacagcttgcaaaaacccacgcaaaagaaaaacaaatcgctaagagaactggtgtggtgcacgtctcaagcggcccaagttggcccagtagcacgcgggctgcatgcgttgcgcgaggcatgcgtgacagccggccggcggcgttcagattggcgtttggtacttgggtgaaagtatagttggccaataggcccgcagtccgacggcccgacccatggtatgaagatttggcccagcccagacacgacacggctcgactgttgttaggcctgtgctggcccgacccgacccgaccgtcgggccgtttctgggtctcttacttgacacgacatgccagcccagcacggcatggtccaacaatcggcacaaccgcggcccaacattcctggctcttgcaggccgtagcccgtcggtggccggactaaagagatgagggagccaaaatagacttattaaaaggacgagtatggtaggctgatcttgccttcgggccgacacgacatgacccgagtcttattgtgggccatgcttagatgcaacccgtgggcggggcacggcatgacatggcgtgttggtcgggccgtgccggtgctggcctgactgatcacgggccgtaccttggtcatgctcaggctgggccgtgcagggcggtccatttggccatttatagatggaagcttatattttgacttagtctatatagggtaccccttctgtgttttaattataagtcgtttctaatttttcattaagtttttaagtgtaattaaacttaagaaaaatataatggggcgatggattaaaaaccttgtaaggaaaggctatcaaagtcgttgactattaatccggttgaaaagtttgaagtcagtccaatttgcgaatcaatcgagctccccttgcaatgatgtggtggtcaacctctcattcgtcttttagtgctcaatattttcaataaaaataaatattgcccacagactgacttggacacccgattagctagtattggggggggggggagataggggttcggaggaggaaaattttagagagaaagaaggatgtgttcaaagggggcttcaataataggtatggctgcatggggtaggaagttgatcgatggccggtgatatatatggcagtgcatcatcacagtgatagtggcaccactagccacaagttggggtgaggcggatgtattaagcgggttagactaagggaacaagcaaatatggtggtaatattgaactcctaaaaatcttgtattggggccatcccaaaacaaattagacctaaaaatcacctcatactccaagagacacctaaaatttggatcccaatattttagttgtagagtggactggttcggtactgatatcaatctcatacgccccacgcataagagcgttctctcgcggtggcctcaccactacagtacatcgcgtcatcgccattgtctctgttttctgttcgccggtatagtacgtcgccggcggcttcaacgtgtagagaaacagaaggcaaaggtgtgatcccttacctgaacatgtgagaaacataaagttgcattattatcacataacatgacaagttctgctccaaattcaagtgctggtgttaagcaatcaggttctgtgtcaagccgattgttcctctccctatcgacaggattagttcatctcaagaccaaagatgctaatcggtccacttcctcatatcagtacaaaattttatttatgggggcttcagctactccagtctgcactctgcagtacaacatctaaatggattgcacgaaaaaaaaaccaacaagtttgacatgatctgatgatcagtaagcaacaaaaattgaaaatttggagtttcacaacagagatagaactgatttttttatattactggacaacagggatatataccttgttctcacattaagctgaaaatgaatcagacttcacactgaactgtccaagaatcatagaaactctgacccatcaaatcttagaggaacatcataaactatcaatgtataaatatactagtacttaaaattataaatctgaatataaaaagtcaaggctgaagttggagtactctacattctgtacagcgaattgattttcagaaaaccgaaactatactgccaagccatcatcctccacgctacaaagcacatacattctaatgaacagagcaagacatgatagactcctaaagttccacaattttgagccaaggaaacatattaaaaatctgtgtccaggtaaagccaatctttatgcaatctctgtaattcaaccacgaatgaacaaaagaaatctttctgcaacaaaaagggaaagcacatatcagcagggttgcgtaataatgcagcatggagccattttattcaacaattcataaggaaatggtattggtatttgttaacttcagagagacagattttcaccatcaaaatctggatggaggagacgacggaggcagcacgggaccccatgccatggatggaggagatacggcaccctagacgaggaatcgaagacggcgtgagcgtggtatcatccgaagctagagaatacgaaagaaggaaagaaaacgcgagggtaaacatcgcacatacatgcgcgagaggggaaaagggcacggacggacaaaaaatggcgcaggcagagaaaaagtcgtgcgattagttggattgggagcgcgtccacgttcccaagtcttggctcagattggccctgattttggtcataggtaaattttgggactatggttgggaatttgttagaggcctgtttttcatcgaaatcctaaaatttatcttttaggaacctgtttagccctctcttggagatggtttgcaaatcttacggtgcaaagccataagagaaggggatacaaagcggcgcaggggaatcacatacaaaaatgaatcttatatcacactcacatgcgcgcacacacataccatgaggatctgtcctagcacatttctaaactataaaaagaatagaaatctagccacctagtgacaaagcttgaacctgaaaaaagtagatttcacaaaaaaaaagatagcttggctcactaaggagtaaatgtaattttcatatctttaattagtggaagctatcttctggcgaaagtatacctcaagggttttaaggtggtgacaaatctttacttgttttgtattgaaacgatatatgactaattttaaggttatgaaaaatgggttaattggacccatgctacaataaatcattcggtttgaaaataccacattactattcacttatttagagccacaccattataattttatattttttcgacatatgccactacttcggctgtgtttggaaggtgaggttggaaactcatctcccacgacttaaaacggagcaacgtattttcttatgattaattaagtatttattatttttttcaaaaatgaaataatatgattttttaaagcaactttcgtatagaaattttttttgtaaaaaacgcatgtttagcagtttgaaaagcgtacgcgtagaaaacgaggtaggtgagttgagaaagttgtgaaagaattcagcctgaccttcaatgcattgtctaacatttttggactgaattgcccatggcttgttcattcattttgtgtttattgtcttccagccctttcttccccttcaggatttggatcttgcggcttgtcatcttcattcccatctcgtactccctccatcccaaaatataagcatttttagcatagtgacaagttaaatatttttaactttgaccgttaataacaaaaagaaaaaagatcaataatgtaaagttgatgttactagatttaccattaaacaaactattataatatacaatattttttatttaaaacatcttagttttacagatattgttggtcaaaatagcatctcggagaccgtgtcaagaactaaaaatgcttatatttggggacgaagggaatatctctttagctttttcattttgatctcttctttccttgtccttttccttcgattatcttctctcccattgtctagtgaacctaggcaatcgtgggccaccctctccacccacctccgccttgcgccgtcctcagatcccaacgagtaggagatgaaggtaacagtgacgacaactgtcagggagtgtctcggaggaggtgaggcgctacgatggtgtgggtactcatgtgggatcaggttgaggtgcacaagggagatgaaaggcaccagagatgaaaagaggaatgggaagagacaaagcaagaagaaaaagataagttagtatttatgttttgttaaatgcatcatattggcaagtagccacatatatccaatatctgaaaagttgtaatggcaacagctaaaatattatgaatagtaataacatatttgaaaaaccgaaaactttatattagcatgacacgattaattaactcttttttgatatagtcttctatagatggccaaatggaccatacagcctagcacgatcggccctgactgaggtcagtcgggctaggctaggcccgcccatgggttgcaccaacggcccaggcacagcacaataagactcaggtcgtgccgggctagcccgaagacacaacagtccaccgtgcttccctataaaacaagtctatttcctccctcatctctttagattcctcaactattttcttcctgcttactggaccgtgccgtgccgggccgggccggcccaccgtgccaagcaatcagtccaagcacggctcatctgtcttcgttcctttggtaacgcaccaatctcaatgcaaaatatagagagagagaaaagggaggcacatataaagccaagccggaacaggatcctctgacgtagagcaatctacgtcagagggacatccgatgccgctacgccgctcgatcatcatcgaacagaggtaaacaagcacggcaaccaactggcttcttttcagcccatgctgacgaaatcaacctacgaaaatggaaaggctcgctcccaatctattccctcgtcatatgccgctgagttcttcgccgatgcatagtcagtaatccatgcatgaaccaaaacaaaacatttgcagtaaacaggaggaccatagaaattcaagagaaggggaaggggagatcatgtaaataattgcatcggggtacaggggaccggaaaggttgagggcaagagaatggactgtggcaaactaatatctttgtatatatatttgggaaaactaatatctttgtgtggtacttttgattcagatgttcctctatttacctcgtgcaagcatgtcctgcaccgtgagagaatagaatctcttggttagtgagagaccgacgcttgtgctctctcacatggacccagcgccccgccgccaccgttgttgcagctggcggcggcggcttctcgtctctctcctccctcaccaccctaccctagtcctgtcccttccccacttcttcttcaccctcttcgtccttcctccgtgagtatatctcgccgccgccaccaccatagttgtcatgacagaagcagagcagagcagagcgaacaatgaatatgcccgactccgttgaggaggcgccggcgccgccagtgacgtactacacatacaggatggtgcaagatccgcgcccacatgagggtgctgcaggtgtagcaggggtaacctcgaccactacggcttcgtcgacatcaacgataggatgttttacccctagctagctggctagatgcctagctagaccaatcaacgaattatggaataaaacggcacaatgagaggtcttaatatttgtcatgcttgcagctttgtattctgtaatttcgtggtattaaatagtactgcatttcatatataaggccaagttctttcgttcaactccgaatggtgtgttttgtgcaaaaaaaaaatctatataattttttttgttaaaagataaatagatctaatttgcaagggtataatagttactatatactatacacaattaattatgtgctaatggctttctcatttcgttaaacagctaaacatggcaatggtggccttgtaactccacgccctgaagtcctgaacacactgtagttgaacagactcaccaacacactgtagcatatccggcacgggcaacagaatacacactgtagcatatcagaacacacactgtagctcatccagcacgcacgcagcaggacccacactgtagcttatctggcacgcacgcaacagaacatgcactgtagctcgtccggcacgagaacacgcaagattaccaaattaaaccaaacaaaacagaacgtctgatgagaaggaaacaagcaagagtgcagcaccgagagtatcttgtaacatcactcgttgtgctccgtgtaggatttacaatccaatagtaactggcaagagttacgatgttctccaatatttctttgcagagtgcaccatccctaaaggttcatcataaataaaactacagtagtgataataattcttttgttgccattctaatacaaggttattctagtgtgtacagctggaactttctctcttaaaaccaccatcaatgaaaatatctataatactcctaaatagcaagattctagagggctatttaatagccctccggatccaaacagggcccatgtatgaacggacacttaccactgatcttaatggctgtacgacaatgtaagaaatatccatacaaatcatttaggttatgtgtacgatcgtaatatatatatgtaagttgagatggatgtcaatgccaaaataaaaaagaaattgaaccagaaaagtaacgaccaacccaacaggtactgaggtaaaatctaaataaataatcaattcttatctttttttttgaacctgtaaacttttcgataaaatgttgtatgcttgaaccagaaaagtgacgaccaacccaacaggtactgaggtaaaatctaaataaataatcaattcttatctttttttttgaacctgtaaacttttcgataaaatgttgtatgctttgtagtaaaagtaacctaaataataccgttgatataatgcgagtctgactgggtctcaattttttttttattttttagaccttttatttttaaattttattagggggcatttgcaaatttgccaccgatttttttaattttgcaagaatgccactcgagtgacggttctagtggcatttttgcaattttctagtggcagtcttgcaataacgattcaaattactggtacatttgcaattgccccattttattaatagaccttttcaaaaaatattttcaaaaactgaacattttgaacattttggccatgccaattacagtagcgtggcaggccaataataccacactagctgtacgtggcgcgacagagttatttggacacgccaagcgagctagcttggccaaaagttcggatttagaaatattttttggaaaggtctattaacaaaattaataaataaaaaaaagttcctgggtctttgagtagcgcgctttctcattggacatactctacagaagcatatagtagtatgtcttctcatcactctacgaacagtcgcgaacccagaacaatataatcagggtcatgtacatactaattatctaattattcactgatatactaactaatactacatccgtcttaaaatataaagtattttggatggataggaaacctgtccagattcattgtaattgtcctatccatctaaaatcctttatccagattcgttgtactaagaattgtcccatccgtctaaagtcctttatattttgggacagagagagtaggatataatttagttagaattagataatctacctagggtctatgaccccagggaagaaaacccaggagcaccaatgtctacaaagcaggatcgacttgcatgaaaagattaagaggtgtgatctcaattttcatgtaaattttaccgctcaacaaaaatgacagtgctcaacgaccttattattcattaataatcaacggtaaatacattgaatacattcggcgtaaaatgcaaagaatgtgaagaatacatttgcctcccgatacccgaaagaatgcccggcttgcgtcccaatacctgcaagaaagaatcgggtatcgggaggtaaacggctagctatagcgaaggggtccggcttagctgctgctggcctgctgctggggagctagctattttgtttttttttactttttttttcgtatatgcccatgtgttgtaaacagcatgattttcttttcctgatattttttattttttccgcatgattttttcatgaacttttttaatcacgtgcaagtgcacacgcacgattcaacacgaatttagagtcaaagtttttaaaattgtagttagaagttttaaattttcagtttgaaagttttttaatttcaagataaatgttttgaaatttgggatgaaaggtttcaaatttgagctgaaagtttcaaagccgaattggaagttttaaatcaaagttgaaagtttttaaatcttgactgaaagtttttaaaatttgagtcgaaagttttctaaaaattaggagttccctgttgtacgtctctatttatttgtcgtggagtttcctatttacatacttaataaccccctcagtttaagattaagactgttttacaagctttgattttctttttctctaagtcaaacttcttaaaagtttaactaactaagtttatagaaaaatatagcaacacttataat

SEQ ID NO: 5181 - DNA, 4855 bp, Oryza sativa
tacatccagtcgagtccatacatccagtccatacatccatcgaaccatgcatcaagtccatccatctatccatccatccattgaaccatgcactcacctcctcctacctctagtgcgaggacgaggcacgtcgggggtgtacctccagtcctgcgaaggagcccgccggcgtcgtggtcgagacgggccgggctgcgagatatccggctgtgacgactctggtgcgtcctctagctgcgagggaccgagctcatccgcctcctcttctctgtcctcatccccttcttcctcctcatctccttcctccgcctctttgtcttgctcgccctcctcgtcacccacctccccttcttcatccccctcttggtgggcatgagcatgttcgaccacatcagtcgacctgcagccgagccttgctgccaacttccgacatcgctgccgtagtctctgcataaaaaataatccatgttaagttatcgcttttggaagaaaacaccgtagtttcatctctttccaacgattacctgtagggcgttgcggagggtgccgccctctccttcggagccaggagccgtgcctagcgccactcccgcgtcgttgacggtccgcaagagctctcgagcctgtaggattgaaatgaagtaagtcacaacatatatggcattgaaatgaaataatatacaacattaatgctagaaactaaccactctgtcgcgaacaggtcccgtctcgaccgtggtacctagacgggtacgagtatcgtactcgttctgctcctcaacatcctcggggtcatccgctatgtcggctagtgtccaagccggacgaaggacaagacggtaggtcctgtggagccacgccaagtacaagtcgaactccgtcccgttgtgctgaccctggtctggtactccattctcctcgaacttctcccattgcgtgatatgatcctgatggtagtaagcccaatcagtcaccttcttgttcttccgacggtccaccctgcacgtatgcaaaatgtccaactcaaatatgtagtaaatgttgaagtgactgattgggcaagcaaaataaattgttaagtgaaattactaacttgtgtaggtcgatactcgtggagaaatggtgcgggattgtttgaagcctcccgaattgccgcatcacgcggtggcacatctggaactccactgcatagaagcagatcagtgggcaccgtagggtcttcaacgcatcctctatatggcacatgggattcagttctagctcgagcacttcctgtgcctgatatggcatccacaccacctgcagcaacaaaaataaaacacattgaagcacatttagtactatatagtaagaaaccatcttcatgtgtgatagaaccccgaatagcttacatgttctggctgtaggtagtccatctcgtttgtgtagtggtagtacgccaaattcctgcggcctactactggagatgggaccgattcccacaggtgagctacagtgggacgtcggtctgcatcctggtgcggccaagcctgatgggtcctccacatgggccgaccaactggaagcctcatccacatccaaacctgtgtcacatacgttagcttccaacatgttagcaagaaattgaaatgttatgaaacataacatgcgtgaacttacctgtagcaaccaaacacagcctgctaggttcgcgtccccgccttgccttcggcaagcatcacagagttgccggtacaaccaggctagggcagccgacccccagctgaaggtacccgcctcgtcccagtccgcgagcaacggcagccacatccaagaagccatgtctccaccagagtcagggaacagaatactgccaaagatgtacagcacgtacgccctgcagtatcgctgtactgtagcctcgtctgcctcagcgggacactgaccgaagttggctcgcaaccaactcgaaggaacccctgatgtcttcgtctgcctctgaccatcaggtgccactggaggctccagaccaaggtactcctcgaccctctccctccagttccccgacgctgtgtcacctgtaaccggaaattaaatggaatcattagtaattgcaaaaaaattaacaaatgaatacgaagactcgttagtaattccctgacgctgtgtcacctgtgaccgcctgaccccggataggaagacccaggatcatggcgacgtcctccaaagtgaccgtcagctccccgcacggtaggtggaaggtgtgtgtctctggacgccaccggtccactagggccgtcagagcagcggcgttgtacagaggcaccggtcgctgcgccatggtcacgaacgccaagagcttcgcccgccgtaggtacgggacgtaccggtcgtcgaacagtatgtgcgccgtgtgacctctgactcgaagggtcttcaagcgctgcatcaatagacaaacataataacataaagttagcgacaatatatcatatacaagggttgtggaaaatacatcatgcaactaggaactttaattttgggattgagcaagaaaactgaaaagaagatctgtgtgtttacatgctctgctttgaggctcctgaactttgatttgagatatctctatgatggatgatctatctgtacaaactaaaatcaaagaagaaaaaataaattcgatcataaaaaaaatggaatattgttgatgctaacctctccgctggcaatctgtggggcccggtgcttctcctcgtagaaatcctccaaccccggaaagtactccatcctgcaaatgaaaatggaataattagtaattgaaaaaatattaaatggaaaaatcacaatgagaatggaaaggaggacaatagaaagtaaacattgaagcaacaatatgaacttagcaaatgaatgtcatccaatcccacctgtgtgctaccctcaccacctccccccgtcctacggcgctttttcggtcgatccttagacttgtctcgcttcgggcacctagttttcttatggcctagttcgtggcatagcgagcatctattttgcatgactggctctgaatttgtattgttcggcttttgtgaccgtcggttggctgagcctttgtatgctttgtccatatcgttcttgaaccttcttgtccttcttcttcctcgtgtgttgttctttaacgacaaatcgggcacgaagaactctccatcataacttggccactgcgatggatctaggtaaggttcaaacctaggggagtacgagtcctgcacagccttattggaagcttcataacacattcggggggccacctccacatccaaacctcacaacttacaaacggttatcatgtgggagcatggcaagtgatggagctgagggaactgacaactacatgtgttatctctcgcaaccacgacgtagtgacgtccaccccattgaaccccagccgccgtgactccgccttgctcgctgacctcatacttcattgaagggaaatcaaaacatgctgctctttgccccaaggttcgtctttgctgctcctccaacatgtccttaacttttgtgggccacttctttccacacaggatatctacagttgcctctttgtgtctatcgacaaaccaactattgcacttcgaaaatgtgtatgccacaatagctgtaaccggcagtttccgaatgcctctcaatacattattgaaactctcggccatattactagtcatgatgctatgacgacgcccgttggtatcaaatgctcttgcccatttgaccttaagtggcatatggtcttctagccacttctttggcctctctccgaccacacccatgaggcgttttatctcatctaggaacaatgctttctcatttatttgacatatgcgctcaagatctttcatctgattagtcgtagctccagctgtgtagaagttagcacagaagtgcctcatgcaccacctgtggtgaatggttaggtgatgaggcatgatgtggatgatggagttcaaaatgccagggtgtctatcagaaattatacacacttctctattaggaccgatcaacttgtttctcaacatgttgatgaaccactcccagttggatgtattctccttctctaccagagcaaacgccaagggaacaagatgtaacccggcgtcgacccctattgccgtgagcaatgtaccttggtatttaccggttaagaaagtgccatcaattgctagcaccggcctcaagtgcttgaatgcttctatggactggccaaatatccaatatgcacgtccaaatactcgcctctgtactccatccaccatcctggactttcgggatgagcctcaacacggaaatgcatggtagggttctttgctttgatggcacgcatcagtgtaggcaagcgaacatacgcctcgtcccaatctccccaaatgaccttcatagcaacttgcttagcacgccatgctttgccatacgtaggccgatagtgccatatttgctcaactgcctcgacaatcgctgctggagataaagttggttcaactcgcacaaatgcctgtaacttgtttccaataaaccttgaagtaagttgcaaatgcttgccggttacttccgcactacagcatgtgtggtcttcgcccaccctagtcacccgccacctatctcctccactcttccttgcattaatctgccatttgcaatggcgatcgagacaagccacagtatactttactgacgcgttagattccttcacatggtacggccggtggacacggatagaataactctgtagccatattttcagatcatccatcgatcgaaactccaaccccttccttggttcatcacacattggttcgaaggcaccgtcatattgtgg

SEQ ID NO: 5182 - DNA, 6305 bp, Oryza sativa
tggtttgtggctcagtctggttataaacaaaagtacacggatggagatggacgaagtcggggtcgatggacatctctaggacaaatgaaggctacacgagctgcggcccggtagacgagatgtcatggcacagggctggtgtcctgctgctaggggctcaatcctgcctacctgtcccggaggttccggccgtaggtggggttgggtcggtactcttgtttatggctaggatgggttgggaactatgtcacgtcttccgtccgtataccgtggtggtatgtggcacgtggttacacgtgaggaagatgtgtcttgtgggtaaagatgtacacctctgatcagagtataatctattcgaatagccgcgccctcggttatgggcaagccgagcaatgtacccaagttagtgttttaattcttaaaatttgctcaacaactaaaatgtggaatggttggcctgggttggcttgggacgagctgggacccagggtcgggttgccagttcggtctgaatcatcgtaggccttgggttaaggcaggttcgtgagggttcacggccttgattaataatactgtgtagctctaggatcgtctttttaaaatggctttgggcaactaagtgacttttaaatgctgttttctgcaaaacttaacccctatatcattaccccttgtacccccttgcattagtcgtgcatctgccggtgtggcttgctgagtactgtggttgtactcattcttgctctatctttctccccccttcagcaagagaagctttggagaagaagtcttaggtggagtcttggcttataccccagttgagcgcctgtgaagatggagccgtaggcccgctagtccgctgctgtttattttgattgtcaggccttaagtgcctttgtaataatgtaaatattatcgatataataaagatgtgtcttttatatcatgtttgtatggtgtaccccggcttttcctgggacggggattaatacactagcgttcgggaaaaggcaattttctcggtcgcgacaagctggtatcagagccatctcgactgtaggataagccaagtggataaaacctaaggacatattttataaataaaactatttgcgaaagttccttttttctccttcccctaatgctatttgcaaaaggtttactcccttcttccttcttcggatttcaactagtactagatggtcaggtcagtgaagaagaagacatcgtcagttgtttgccgaagctccggaagactgcaggatccgctagcgaagtggaggaagcagtgaagccagctgtaaagcaggagtgaagatcttgagaacccgtcacagaacctaagccaccctctagggtagagtcgttagtcgtgtgtttccttgcttgtgtgtgtagtgtgtggtttgcatcggtgggttgtgatgtgaccatgctaggttgtttgcttaatcaacttgcagaataagcctaacatacatcataacagcaaaagacttagatctgttaaggtcctatccttagtttctaatctgtctctcccctttgttttccctctctccctctccaaacctttgcaacagatggctgacaatgagaaaggcaataaggtcagaagtcaggacattggtatctcaagctcccgagtgaatgaagcaccagacaccagttgtgtgacactggtccaacacctgattaaccagaaccaattgcttatagagatactacagcagcatcagacgccaattctgaacctaagtcagatacaacctcaagcgcagttggaggcagtccaagcactcacaccacaagtcagcatgccgccagcatcccgaaggacccatggtgaagtgccacatgttgactcaaaagaagcaagtatcatttgttttatgtgtgatgagcaagggctctatgcaagggagtgtcctcagcagaaaagaaaaacaccaatgcgaaccgaagatgaagtccgtaagatgagcattaccagcacagaatggcctccaccaggaatgacaaaacgtcagagaagaaataccttccgaggtgcgccacagttgacagagcatcttttagctaatggaggtagagtgtctgatagtgaagattcagatcaagtctcctcagatgatgaagatgagaagtctccccaaggtttcaaccagaataaaatggaacgtaaggcatgctctcgttgtggagaaatcggtcatgttgccagctcgtgtgccactacatgcgttcattgtgaggaagaccatccacccgacaggtgtccaacgagcaggatcacttgtttcttttgtgaaggaactgatcatgtcccaaaagattgtcaattcagttttctgctgacgaagaagacggccaaccaacccgccagttccaatggagagaagtatcaaggcaacacaaatcctcaccaagattacagttttagcctaactccagtgccaggacagaggaatcaaaatgagaaaagaaaatgccgagtccggaaagatatctgttgcttcaattgtcaaggaatgggtcatttcgccgacaagtgcccaaaaccgagaaacatagctgccagcacgtcagtccacgcaactccctgcaatcagaagcttgctcctcagcgaactgtcatccatgcatcccgaagcagtcctacagcccgcgttgcaacagctccaactccagcgagtgcattaccacaagatgtcactgcccaatttcagccccagccatcagttgacgagaccgaggccagtatcggcattgtacctttggatgttccagcacagcagccaagaaatcaagtacaagatgaagaacccgagcataagaaagttattgtcagttacaactgcagtacctgttaaagaagcggacatgccaatcgccaagtggtcactggagcaaatgcagtacctgttaagcctagcactagtcagaagcaaccataatactcttatatcagtgttcaaatacttttgttttatagttgttccccatcaatcatgtaataacagagaaacatgagataatgaatgagtttgataagtttattgagggatccatgttaagattgcaagtgctgggagttgtgtacattttgttgttgattagggagacctagggtctcatttctgtaaactcataatctattataaatcaaataacctagcgattgatggcgaagaaaatcaagtgatcaaccaaagagacatttgtttggactgagagtttcagatgtgtcttcttcggatcagaggcatgcacccgttgtggagaaactggacacgttgctggcatgtgtctcacactctgctctcactatgaagaagaccatccaccaggggagtgtcccactcgcaaggtgacatgttttctgtgcgaaggaacaaaccatatgcccaaggatggccaactcagtgtgttgttgaccaagaccgcggaaatccaacgaacaaccctacgattgtctcatcagctagtcagctccaatagcaacatcgacaatatcatccccagcaccaatgctcctcctgctccacctgactctgcaataaatcatagcaataataccttcagcaccaaccattctctgcaccgacagcctcagcaaagaattgtcatcgatggaagaagttgtgtccctccccgacctactccaggccgagcaaagggcaatcaacctccggagggcgataccaagcagaagaccgtcatccgcttcaaacagcaatcagaaggaagcttctcctatgaatgatagcaatatgcagtcctatcacatcatcacagaaccaatcaaggatgatgcagtcactagaacaatgccagctatatctctccagaaacaaaatgagcagctacgcttgtggttttcagttcgctacttatcactgtaatcgaaagtttgcagcgatcatatataaataaacatattgatgtctataaacagtgagcttgctatgtttatggatgattcctattgagggtacaatgtaccgatgttaagcaccttccctttttgtttaaggcagggccttgtattcgtataataagggagaaatgtgtaatacagacaagttctaagaggattcttttggaagatgcggatatgtgatcatgtgtataattgtttactgacaaaggagacctagggtctcgtgtcagaggaactatattctaacctcgagttaataaccaacctgttgatggaaaagaaaaccaattaaactgtgttgggttaaaaagccaatgagacagtagttggggataggagtttggatacgccttttacagatcaagataatgattgttggatgaaacccataagggtacccgccatgcctctacattgataagttcggatatacctgcaagcagttaagaagatccaggagatatcaatatttgagaacatagtagtcgatggttggtaattagtctatcaggtatcagaaaagggtcaaaggtgatatggcagaagaacaatttggatgctccccatctcgaggaagcactaaagatgatcatcggcaattaaaccctagtggcatagatacagatagcaagcaatgtatttccttgaaggtagtcagtgcagctttttgacgaaccacatcaaggtttcactgaaaggcagcaagccaaaggatctcatcgtccccagaagcgtccgcaatccacattaaagaataccacctgttagagataagccgaaagatgattgataaaagagattggcaaagatgttctctagcatgaaagaagtaggccgaaaggtgattgataaacagaaacatgctctgcatcgctcaaggaagacccctgattgtaattgccccgcaacagtcaccttgtcattaagtaagcaagatgacctaggtaaaagtgtttctaggaaggcaaagagtgaaatcttcaactcggtgtcagatgctacacggagtgaaaagtgcaagcaccggttaccaggcaatgccatttcttgggagatgatccaatgggaaagaacacatcaaggttaaaggtgtaaaggaatacgttgaatactaactgaggacaacctgaagatgataatgggaagtaaactgaatgtaaagaaagtgaatccgagttgcttgttcgtgagagctattcccagttatgaatcaagtgatatgttcgaagataatctacagaggtcagattaaaatcacatctaacaacgaagcctcagatttggcaggataatgattagacaataacaaatccagcagtaaaaccatttgggaagacgtcaaagtatgtcaagtgggataagttggttctcttgggaagcataattcaaaggcaaagttatcgacccttacatcgaatagcagaagtagcttgcacccggtgaccaggaaagctaatatgaggcagttggtggcaagttagaagtaaatgacaagcatggtattctcatgatgacaagcatggtatcttagtaatgacgagctgatctcgacgcatgacatgaagcgggtaacttgtatgaggttgacgccaaaggtacgaatgataagaagttctagaaccgaagccccatcctcaaccaccgcagcctagtctgggtcagttagaggttcaaccagggacaagtcgggtgaagagaagattccatctgcaacaggagatcgagccaagcattccagagtggagaagttttgttaggcaagttggttatagaagacggagcggaagaagtcagacaagaagagaagaccgcccaacctatcttcatgctagcctcctcgaatctcggggacgagattcttgtaagggggggtggatttgtcacgtcctgataaattcatcccgaattaaaaatcattcgctaaaaggaataatagaattaattaaaattcgaaaagaaattggcaaacattaaaatacgtgcaagaaaaattcaaatgtggcccggagaatttttgttaaattctccttggtcaaaaaggagccctcaaattttagtggaattttcagagcacaaataataattattaagaaataaacaaagttaaaatgagtttataaaaagaaaaaccctaaaaagtctttttcccccccttcccctcttgggccggctcggcccacctccctccctctctctcctctcccccgcggcccaatctgtctcctccccgcgcgcgtgccgctgacgggcgggcccgcccccaccctcgctgacgggtggggcccacctgtcatccctgtcctcccgccgctcccgccgcctcgcccgtgccctagcgccggcgccgccgcggaatccgccg

SEQ ID NO: 5183 - DNA, 10347 bp, Oryza sativa
aaattgtacagtactaacagaggctaaccgtacggcgatggcaaattgtagaagttaagtaaaagtcgatggcatattgtagaacgtgacaaaatcggtggcaaatcatagacatgtaacaagtcagtggcatataatagattccctataataacaggaggtgtgatgtaaaaagaaacagtgaaatactaaaaggtttgttacgtaaccctttagaaaaacatttttctagccaatcaaaccaaggtatacatatttaattggatttacaaattgataaggacatcataagtattcctccccagtacaaaaatgcatgagaacggctagaaataaagttttcgagggtatttaattggtagttttttttgttagttatactttagtgagaaatgcttcgtcattataatgtctataaaattggtcgaagttgggtataggtgttaataaattaggcgtgtaagtagagaaattaaataagagaggtatgatcggttgagataagtgagtagatactcaattgctatattttgagatagactttagatgctagaaactactctattttgaagggaagaaaaatatgtattttatcattaattcaatttggtctttctttgacgtaaaaaaatagtacgaccattatttaaaaatgtccatttttgcaaaacttatttataaattgacaatggcttatttagctgaagataagacttgataattaatattttaaaattaagctatgccataagtaaattaaaatatttagctgaagttgctcataggtattaaaataagcctttttaaaataagtatatttcaaataatgtagacttacataaaaacactttgtaatagctatgccataaatagattaaaatctgatgattttcagttaaataaatctacgtgttaaatgaataatttattgaagttggtctaatcctgcaaaatattttgaaatttatatgttcatacaagtaagcacaggctaaaaagagcgcgccaattggcgcgacaattttctagttttatttaattcggtggcggacatgttggcaattcttataagtagatcggttgaaaggggtatgacacgaggagttgttccaaatttagttgataatgggttatcaatcctgcaatatgcagatggcactatactctttatggaaaatgatattgatgaggccaataacctcaaaatagtactaggtgcctatgagaaattatcaggcttaaaaatcaattttcataagagtgaaatgttctactttggtaaggccaaagaaagagaaaatgttttctctctaaggaggttttagaaaaggttaagtagttggaaaggacaatttttatcaactggaggaaggctagtgctcatcaattcggtcctaagcagcacgggaattaaatactgctatagggattacaacaaaaagaaattgaatgtagcacaggcatgggtatagcaactcatcaatataagcgaaacatctataatcttgttgatttcctagcccagcattgtcctgtgattcctgtgtgccaccggctaccttcagagacaacatcgaatgaaacaacattagacaagcacaacatggttggttggccagctgggggatcagttgagtcagctggtgtagtttggaacttgaacgccctacaataccgtatgtgtgtatctaacacaacttcgtatgtactccctccgtctctgaaagaagtgattcctagatccctaatgcatgtttagtactaatgtgaaaagacaaaaatacccttagtaactgcatattcaattatcaatgtcgtttctctcaccttaggcaaaggcatttgaggcaaaataaaaaatgccaaaatatttgaaaattttaacttgctgaaagcaaatactactagaacatctctccaattgagaaaataaattctctgaaatcacatgtaagaactactactactagcaatagcactataagaactgctactactagcaatagcaggaacatagcaagatcacagcttagaaaaaaggaatgcagtgttgtttgccttcagcaccgcaagttcgtgcatggagcaactgcatcagatccgccgatgataggcaaacaagtccccacagccaatggagccgcatccactcgtcgcctcagtcgctgacgatgctgcaaccactcgtcacctcctccgccaccgccgatgccgcgtccactcgttccctctgacgccgccgacgccgcatccacttgtcgcctccgccgccgcctaagggaagaaacaggagcgaggggaagcagcgtggagcagggaggggcgtgccgggaggtgtgggagggaggggcagagggggtaggaagcttggtaaggtctcgcatctagacgatgtcgtggcttcgattcagtcgttttgggaacgagaaagagatgagatagaatgagagagagaaatacgcgagagaccgcgtggaagagataaggttttttttgtgtgagagaagagaggtcaccgcccactactatggcccacagattatgcaacagagatgaagtatctggatttttgtgctggaatcattttttgagggacaaagtctccgctccaggaatcacttctttttgggacggaaggagtatgtatctaacacaagtactcactaaaagattacaaatgggacacccaaaatcaatttttaatgtagaaaactgacagaaaaacaaacactaatatgggaaaaaaagactaacttgtgcagaatagtgggatggcttacaaaactatgaaaatacaaagccaaagaattgaagacaaaatataaagctaataaaacttgcagtaccatgattagtagacagaactttatttaaatttaatttgaattggcaaacgaaactaacaaaattgacaaaatttcagaaatcgtcaaccattgctaatcttgttcaactttatctcaaaactgaaaactgtcaaaactaagtattgttcactcaaaattttgtgatgaggcattctaattactgacaaaactaacaaaaccatatgtactattaatagattacaaaactacaaaataacaaaagaatatttcaaaaattatctactgctagagaaaacaaaaaacataaatcatgcttcgtattcgagcaggtactagtaacaaaggtaacatcccaaggctgaaattttgataatatagctacatatgatcagtgctaacttttcgacacatatgtgccataaggaaataagtatgtttggagttgggtcagaaacatatataattacaatgaatttgcctttaggaggagagcgttgtggtgaacatcacccagttgtgcggcatcatgtgcccattgaacactaggaccacaacgaaaaagagatctgactattagtgcaatctaatagtaaatataaacagagttgaaacaaagaaacatcatcctccataaccacatcaaaccacagaaaaagcaggaaaaatagaaaaaaaatcagatttactgaattttcagaccttggccatcagaaaaaggaattgacataggaatgcacgttcaaaagagatgagctgctgccttgtccattaatggtgaaaataacgttagactcaagaacaaatgggatatatcaatggatgaaattcttctgtgctaataaaatgaaattgatggcaacaaacctgcagctgaatcccatgagctcctttgcaacaaatcccagcaaatatgccatgcagtagaatggcaaaaggggatgcaatatttgtacatttcacttttagttaccaagacgtatatatattcaatcgcaagaacaagaacctcttttacaaacacacaaactacataataattgttgctaattgtgcatcataatgccaataacaaaaacaaattagtttagtacatatagagtattgtgaaaaatctatcaaaaccttcatgcagattttctgaaaatctgctcagtacccacctagcaatctgatttgattatgctgccctgttatgaccgccattcctaatggatggatcatttatgccgccaatatattataactagtataatatgccttgaagcacgaaagatcaaaataattccaatgattacattttagggctattagttggaaaacaaaattcagaaccatatatctctggaaacaatgtaaacaacatatatagtagagttgaattaaaaatgcactttagtttggttggtttacccctgcaaatggtgataaaattgacgagcacttgaaaattgatggaaacaaacataaaaggattgtagtttctgaacatatataacacaaaacttaaatgattcatataagataatttttaaaatatctgagaattactaaacccctcctaaataaaattactactgggaaacataactacatagagaactaagaaactaaattttggcacgcctgcacacactgctagtctgatacgaaacatatgccatcaaaaaacataacagttctgctagtccaacagaaagagaaggggagagagaagcaacaaaactaatgaatattgtaactactaatttcctctgaaatatattaacaaagctatgctttattattacaaagcaaaaatacatgacaaattcttagttcaaatccttaattttcatcagaacttttagcaatatcttcttagttcaaacatatggtttgagctataaaccatcacactgctgccagaattcttaattcgaaaatatatagtatgagcaggaaggaagcaatttaaacttcttatttcatgctcagacaagttaaagcaaattaattttatcaattcagacaaattgagcacgtaattagtgagctcaaaaaatagtttcttctaattagtgagcatgtaacaactaacagaaacaagcaagattttcttctagttttcttgcaattagaaaatgacatgacatgcatcctctaaaacacaaaagaatggtgaaaaaagaatgctaacatgtcatgttcaaacgagcccaagaaacgagaatccagttaaaataaaacaaaaccttaccgccaacttgcatcctcccctccggccggcgggatcctttggtggggacgccagggacagagcggagagtgcaaaggaagagagagagagaggtggtgagagatagatggcgcacgacagcaactcatattctcccctctagccagctggatccgccggcagggagactagggatagagcagagaggaagaggagaagaatgacccacagcctcacatctagcagatcttcttcccctcatgtagctggacccactggcagggaggccggggacactggagcgacaatgatggcagcaacgtgcgtgaggaagccaacgactcaggaaggagtcgaggacgacaactggacatggtgacatgtgtgacgaagtaaggggaagcatggcccgggcagctgggcgtctcttcttaattgggcagagctttgggccaattgtctcctagtgggccagatgaagacgcaattccggccaacaagtcaaaataaaacagccggtagctgcctagaaaatcccataaaaatgttttttttctgttttcttttgagggggtaaattttcaactctgttgagctagatgttaaatggtttgctcgagacgatggatacaaagtgttactcttacttagttacaccctctgtaaaaaaaaactatcttttggggttgaatctgaacatatgctcgaccagattcgtccccagaagttgtttctttctttttggatggagggagtacgtattatgaccactctaatttaagcataaacatctatatttttccaccttctctcttttattgaagaaaactgaggatttacggttcgcaagagcattctcaagaggcgagatatgtctttatactaccagacttgagagctatgtagaaaaaaaaagtgatcttgaaatttgtcacatcccattcatacaatatctaagcaaaaaattgatgctaatagcttcatcacttagattccaattggttatgttgtggaactagaaagggttaaaactctggttttgagcagaacatgcaaaatcgaaatgcacagtgaaagtaaaagttgacaaagatagaagagaaaaactttaaattctcatgtaaaaatagtggacattttttcttgcagcttgttctacattgtgtattttgtgatagctacaagattgtccaacgttcaatctgtaacatttcttctaatatgcataacttgatagctttgcttgccttcctttaaatccatataagtgaaattgacctatttaactgaaatgtctttgatattatgtccatacatatatactttatagctttgcttgcttgccatgtgcatccatgtgtgcataaaccgctgctctttcttgagttcatggatcactttgatttgtacacaaataccgctatctagcctgccgtgcccaaattcttctttttctgaacaaactggcacaagagacaatgccaactctcgatttggtggaaacttgacacacacgatccggctttcgatcaacacaatccgaaccctgcaattgtagcaccatatctccactagttatcaaccgtgcactgctcggttgacctcgccaagaagactaatccctgcatgcgaatcgaagaacacaagcaagaacaatatagattgcaacacaattgcatatgaatgattaagcactcgaatttggggttctactaaccgaactagcagcgaaactgcaatgacataaataatctaagcaaaaccctactctaaactatgacggctactgaatgaatatgatttggggagtcctagggttgccctagggcgcacacccccttgggcttagcccatggcacaattataaggcccaaaacccaaatcagattcggtctggatgaggtgcgtggcttgttttgcagattcccgatagctcggtggggaattttgacgtgggaccaaaaccatcgaaaattaggctcaataagctttccaaccagtactcatgggcccttaaattccttctagatcagcggctaggtccatttgaagttgatgctgtcaggagaaccgaatccgaatccaaaacgtgtaaaactttatctcttgtcttctatgaaccaaaagtgtggtgaggtagaagtagacttggagaagatcttggtttggtcccgaatcaacttctttgatcatccatacattccttacgctcggtttcttttccttcacccaagcaagtatctctgcaaacgaaaagatacaaaactcatggtgtagtaacgtttgttcaaatatataataagtaaatctaacatagaacatatgcatctttggttgatgaatacataagttagtcatggtagttgtgtcctcatctatttcattagataaagcgcatggtcatgttctcaaaatcctacatttctgtttctaattaaaagatggcactacatttaatttgtgctatcattttgcatggacaggtgcaaaaaacatgcatgcatccttaaatactctcttcttgccaaaatataacaacacttcacaatttttggactaagtagcaaagacaaaagtctatcgtgcccctcattaaacacacgagacaactcttgattggcttaatattgtttgtcagctgttagactaatcaggtaaccatgagggagtggcgtgcaataaatcagctggtacacatgataattcaattacttgagggttgggcctattaaattcctataagttgttatttttaggatctaccaagtagtggttacgtttaatagtaccattggttttcttaaaaaaaaggagaaaaatattggaatggatggtcataatattttgttagggttatttggatatattatatagagtaaattacattggtatggtataataacttgataggtgggtgcaatacataaacttacaaaatagttgttttggtatacagacttgcatgatgcgtgagaaataaggctaaaatggtacattatgactagtaataatgtgttggaacctacattagaatagaatccgcatgcttaagcgggtcatgaggcatgctacatgtgcaaataacctctactttgtatttatttttgttcatccactattttcagttgactgcatatccttcatatcactagtacaaaaaacctcatagagatcggtactataggtgctgaaacagctagaaccggcacctataatgcttttctctcatccgtggactcaaaacacgtaaaaccgacacatttaaccaactataggtgccggttctaagaagaaccgacacctttaatatagtataggtgccagttttctatagaaaaaccgacacttatactataggtgtcggttcttctttaaaaccgacaccaataataaattataggtgtcggttttttaaaaaaaccagcacctatccaaaccgagccgagctatcgagccgagccgatccagctgatccaggccgacgcatatatcagtctcgtccttatcgcctcgtctctctcgcctctctctctctctcgcctctgagtgtagcgcgcggcggcagtcgggtggcgtcccggtggaggcaacaacggcggcaccctcccctccgccggatccggcgggaggggaggcagcgggcgacggcgggcagcggcacgctcccctccgcccgatctggcaggagtggaggcggcgggcgacggcgggctccctcccctccgccggatctggcaggaggggaggcggcgagcgacggcgggcagcagtgcgctcccctctgcccgatctggcgggaggggaggcggcaggcaacggcgggcgccctcccctccgcccgatccggcgggaggggaggcggcaggcggaggtgccctcccctccgccggatccggcaggaggggaggcggcgtgcgacggtgggtggcggtgccatcccctccgccggatctggcgagaggggaggcggcgggcggcggcgcaagagggcccgccggtgacgaagcagatgaagccttgggccagcctctcttcctccctcttctcttgtagattttttagatgttttggtggatttgtgaatgattttattggagtatgttcgcgatgtcaatcgattttggtgacgatgaatgattatttgtgatgtcaatcgattttggtgatagatttgtgatgatctgtggatgatttggggatttggggatttcaatattatttgggcgcatggcgacggtggtgctcagtgaggtcggctccattcgagccggctctctttttttttttgctcgagctaagctaaaggtgctggtttaataattgtcataggtgccagttttaattattagtgctgaccaataggtgtcggttgggaaaccagcacttatagccggttcccaaccggcacctatgcccctttttgtagtagtgtatatatttgatattatttctctatataattaacagccctattatacataggtttgattgagcacatgtacatgtatactaagataactgtgaaattgttatttgggcttgggttgcatgcaccaaactagtttgtgcatcaaattaaacgaatattttgcaagtttgtatactaggttgcaccttcctgttaaatttgtgtaccattagtataatttaattactctattttatatgtatggataatcttgccctctaagtaatttgtatgtatctatctatgtatatctatctatctacctacctacctatctatctatctatctatctatctatctatctatctatctatctatctatctatctatatctatattaattcaacactttctacaaatctatctatctatctatctacctacctatatatctatctatctatgtatatctatattaattcaacactttctacaagctctcgtgttaaccagataaatctggacattgaccaagtaaaccgtgttatcttagccgtagattattaattttcatttaataccgtggcctcatggcttgcaatacccatatatccaacctgtctccaacgtagtacgtattcaattttttcatacgtacatactattttggtgggaaatccgtttttacatttttttttaatttgttgtgacaccataagtattcccatgatagttttcggcactaacactggtagagaaaccatctttggtcggtcgacccatatccacaatagtcccggttccattaaaaaccgggactaaaaatgatttttagtcccggttaataagaggaagatctttagtcccggttgttgttaccaaccgggactaaaaa

SEQ ID NO: 5184 - DNA, 7834 bp, Oryza sativa
aacaagtcacttaaccaaatcttggcttaagtgattgttggacatgggatattattatatatttaccatccgtatatcatatctctagtgaaatatagatgtagttgatctcgagcgaaatcatcggcatgcagtgagagaattatttcattattcgtggttgagatgtgctgcacaattattaatattactcagttataacattaggagtatgtgttatgtatagacaatgagatactatcatatttagagtgagtactgagttggcaatgcttgcattctggacatgttttcatggagaaaaaaaatacagataagaggaagaatctgctgccatgtgtacgtatgcaaaaaggtctagcagattaattttatcaaattttgccatgttagaagtacaaaattagtacaaaagatatatatagcatggctatgcagattcaaactgagatcatatagatttccccccagtactgttgttgtaaaacatcttcatattatagcacatgaacataaaaacacctatatatgtatatattgctcactgttaatgagggaaagtttactatttgccaaccaataaatgcattaataattatttgctactacatgcacagatatggctgctgattatttggcatctagctgatcactactcccagtaaaatgacaatttaaccaaactatctgcacattacccaccccactacctaatcatgctaaccttaacttttcgcacagaaaatcgactcctttccccactaactagttgctcttgtctggcaagaagaaaggatttgcagagtggtgcttaacccttcctgtgtctgctccacatcaaatttttttctaattttatgagtatagctagtgctgcgaaaaactatatgcaaccaaagctattttacttttatatcataccatgattaaattcatgttgtgcttttggccatgactagatgtggatagcatttatcgttgcgtattgcattgcctttaaacttggcctaggggttggcgaaatcctaggtttcctgcagtgacagaatccctgtcattgtaaaaatcccagcacacatacatccctactgacatcttgtgcaaggaaatgtatcttaatctcctgcacaagaccactgtgacatgtgtaggggtaaagtcgacatgaattacggtgtcccgtgattatcagtgggtaaagtttggagaaaattatatacaaaaaatgtttcattaggggcacctatggtggcgtgaagctagctttaaactcgatcacatttccagcacaaggccccccaacgtgtgactagcaaacaagaaaaggaaaagtcttaccaaccatccaaatgataatttaattacaagcttgcaaacaaggctcattcaccctttaattccagccttaataggcgcccacagttttcctaatgattactcttgtgcatgtctcgtcactgctgtctcctcccccacaaagcaacaaacaggaagtgaggtagagtgagattaaccggttgggtgaactctcaagggatggaaaagcacaaaaaatcagaagagaaactgacattggggtcatcatctatcccctccccatctcaaattcttcttcttttgggctttgtgtgttagtgcatgcatgcactcatacacaatggacgatagctctatagctgttgcttggagatatatgatagagttgtgtcggagtaagagacaaggattgatacggcacccacagctgcccatccaagtgtcagtgatgagttggagatgcccccctagctgggtgctataaatacagccctttcttggcatccatctccatcaccacagaggctttgagtattcattcatttgagtgaccctatagtgtaactcgagcgagtgagcgagtgatatttgtgtgtaggctgtagctagcgagctaggacgatatggccagggttgtactttccactcccatagtgaatggtgcaacgatgcacctccccgctgtgggcatgtcacaccccaccgagggtgagcttgtcttccactacctctatcgtcgtgccgttaacatgccgctgccctctgaattcatttgtgatgtcaacgttcttcctcataacccatgggacatcgtcccaggtaagtatattttgacttatgctgccatatcatcttgctcccataaaaattgttagcacatccagatacatctcgaattgattaatctatgtctaccaggcttgattgattgcatggcctaatgtccgatttgttgttggttttgtttttgtctttttctctctcttgttccatgatggtgatcatggacataggagcactgacatagagggagaaagggaagtacttctttatgcagaaggagataaagtgccctagtagtcgccgtagcaaccgtatcacaagtaaagggttctggaggtcggcaggctcagaaaagccagtctactacaaccagggaggtggcagcgactgcatgctggtgggaatgaggcgcaccctaacattttactttgggaattcacggaccgcagagcgcacaaaatggggtatgcaagaatttcgccttgctggcaatggtctttcgccttaccctgcgatgaagcatgccaccggggatggctcaaaaccaccctgcaactgtgccgaaacaaccatcgccaaggtaattaagatgttgacttcaaacattttcctgtcatcattttttaatcgtcttgttcgtttcatctgcaaattgaatctaataagtttgttattttcgagcaagtgtactattgtgaggtttagctttgggaaatagggagggggatttaataaatatgatgagccgtcttctagatataactctcatgtcgattttattcatggaaaggaaaaggtagagattgtctttgatgccgcttagggtacatgctattagatctgtagttatggactgctgcgatgcaaggaacgtgggatctatacatgattcaaattttgtcgagacgtagggatttatagttggtaaaatctagatatgtatatgtgtcagtggggagttccatgcatatgtgtcagtgggatcgagtcgatgtattataaattttgtcataaggttagatctggttacgagatctataatcgacttgaatttgacaagaagacaaaagtggtttgttgtcagcttgcgagcaatgaacctatttaatgaacaccatgtgttgttaactcgtttctcccatgatttttggagttttatatcagataatgtatcaaccatttattggtcaaattttctgtgatgttcaaactgaacaatggagaatactcattttccgacatcaggaagaaaactgataacaaataagttaccatgtctttcaaattcagtagctatgttattagcatccgtatataacatatatacaaaatattcctttccaactaatagtacttcatcaattttcccttaggtatacatcttacatataccatgctttgtgcgttcagcagcatccattaacaggcaattcggtgactgttttgcagagaaatgatggtctctctgcagttcttcgtaatgtgctcgccgtcaccccccttgtggaaaccgttgtcgaacctgatggatcatggctgatctgccgcatctacaggacaaggcagcgtgcattgcctgttatcactcctcctgccatagaaaatgcaagggaaatcattatccctcctgccaatggcaatgcaagggaggctcaagtccgctttattgacttcctgcagcagggatcgcacattgagtcatcctccccctgtagttgtatagttggcccctctttggcagagggaagtgatgaatctgctggtagtgttgaccaaaaggattgagcgcaatggagggagcaactaatcgataaaagcatgtcaactagtaaggaataaaaattgtgagtgaggtgacctagtgcaagtatgacctgcaagttatataagtactgttggagactgtgttctgtttaagttggggaactgtatgttctgtttaagttggattgtaagctttgttcaatagtttcaaggaattaaagcgtgtttgggttctaggaggaaaacaaatggtcattccagatgaagaagtctgagtaagcaacttttctaaaaaccgtttggtctgtccttcttcaatatattgtgttctgtattatctcatgcctttgtgtgagactactagctatctattaatatctatatgcttatcttccaccgtatatatagcttcttcagtattcctgttccgttgctgctctgtgcttgacgttgtcgatatccaccatatgagatatgtccacaagtgtaggcgtgtgtgtgtcttttgtgtgtgtgtgttgtttgtgtgtgtgtgtgtgtgcgtgtgcgtgtgtgtatgtgtgtgttgtgtgtgtgtgtgtgtgtgtgtgtgtgtgtgtgtgtgtgtgtgtgtgggcttgaagtgattgtatacacaagggaggtacagagtttccatccatatcatatctaaacttgttgaagtgaggattattacatcttttgttgtagcaccttgcgcgtgctgcaggatcactcgcaggcgacatctccatcattgcaggcgatagattcacccgcctgcaaaaaacatttcagcgaataaaaaaaagacaccacccacgggcgctgccatgggcctccccttccgggctctcctatgtccaccgacgcccgtcgtcgtcaccgttccatcggggaaggcaaggaggcgcggtggatctggagattggcgacgacgtacggcgaggggttggccggcgatgacgctgaggcgggatccgatgccggagagtgccatgatgctagattgcgtcggatggaactgcaagttggcgtccaggcgctgggcctctgcagtggcggagaggaagtcctccgcctcgttgacgacaatcaggcagagcaggtcgggcgagccgccgagtcacgcggcgaggaggcggacgagcaccacccactggttggcgtcacaccgccgctgaggtcgacgacgtggatgacgccccgcttggcatccatcaccttggtgatggacaggttggacacggcagcggcgagccggatgatcgggcacatcgcgtggaacccttggcgcgtggtggagatggttgccgacggtgtggcctgcatgagatggagggaacggcacaccccgacacatggtaggatgaaccgcagtgcaagcacctcggcgaacggaggacaccagccgctgcatcgaccttcccccgccgccgccgccgacgaggtcaacgacgctacgcagcccatcgttgacttgcatctggcatgtcccatcggccaagaaggcggcgatggaccgcagaaacctcaccatgagaacgtcccgttccccgtcactagcaaggtactccgccggtccacctagggaaaatgagtctagctggatcccagtctctgccgccatggctgccaaggaggaccccaccatcggtgcttccccatgttcgtggcggccggtgaatcctccagcactatggccatcggtggcgctggtagccactctccccttctctctgcttcgtcggcgccagacatatgtcactcgtcgtggccagcgacggaggcgacgatgaggggagctagtggtggaggcggcgaggaggggagccagtggcggaggcggcgaggaggagagccggcggcggatccatcggtgtcgtcgtcatcgctcatcgcggctggcgacagaggcggcaaggaggggagccggtggcggttccgtcggcgctgtcgttgtcgctcgtcttggccagcagcggaggcggtggggaggggagccggcgctgttgtcgtcacggtcggcgggggaggcggcaaggaggggagccggcggaggatttgtgcgagtggataaatgtgagagagagagagaggggagggggagggaaatgagtggtggagaggatagagatggcggaggagatgataaggatgagacttagatattttttttgtggcatgatttttgcaaacggacaacataaggttccgcctgcaaaaatcatagttttctaggcggacctcttaagtggttcgcctggaaaaattgatcttcacaggcgaacggcgagcttcactccggtctacattttcgtaggcggccatttagctccgagggtcatatctgtttggaaaaaaaccaagtctgcgaaaatgctttttctagtagtggatataattaatattccctccggttttttttatgttggtaaactcatctttgaactaacgaccaacgtcgttaaaaaaggaagggagtattactgatctatacaattgatgagttgtagataatcatatatattgctagacatgaatgagttaaaattgatgtcaagctttaattttgtgctactcgatccaaggcatgttaatcagtgtgtgcacgtacctgctcaaaagttttctgcagctatagccactaatctatttggaactgcttgtctgcattcactattaggatgtctttaatggaaaaaataggaaggaaacaaagaatattattgtgacatgcatacatataggtatatacgtgcaaactatagctgagattctatcgaatttattttcatattacaagtacgtatgtcttgatagatagcatagctgaatgcaggtttgaaagccttcaaagatgtaatgtgtatggagcgaggttgttatctctggatctagatttagatatcaccttccatgccattctcatttctcttaattaaattcagtatgttctagcatgctgttttcatcgaaattgaggctcatcatacatgtgtataactagttattttgcaaataaggtctatgttaaaaattctgatgatgcaaagaaagaaattaagaaataacttcaacataggctccatttaaacctaggatgaatggtggccttggtgttttagagatttgtagctgcaaagtaagggtctcgttaaacatctgcacatgttttacaacttgcattggctcatgtaccatgtgtaaaattcatttgggaaacttttatataacagcgtaccagatatgtcctcaccccatcgcactttctgatggaaacacgttcttcaatttggcattatctttattagaggccgggatagacaaattcttggtgcacatatgtcctcaccccatcgcacttttggaatgataagtactagtgaagagcaatttccttcccatggccttttaagctagcctctatgcagctgaccatcactagtttaaaattatcatcatgtgatcgaatacctatatatgtattaaggctagttacaattaattattacgaacaagcatgcaataaacaactccctccatgacaaaccaaacactagagacaacacattgtattatggtaaatgctgaccttgattgtgctatttgcaactgagaaattgtagaagagaacagttatttttccgtgtcctttctgtgttgcatgccattggattcatatggagttcatgtcatcagaacaccctcgcactcacttgatcactgataaacctttagtctgaagattcccagacgatgaacagtgatctgacgaaactgaaaatctgaagaaagaacagagagcgagctagagcaagtttgttcgttccttaatgccttgcagtttttcaggtttacttctccttttcacctcccatccaggtgtttgacatatatagatcttgaatgaacggaacactggatcgagtgatcctgccatcccaccatatttcttccagcctggcca

SEQ ID NO: 5185 - DNA, 22550 bp, Oryza sativa
caaccgggactaaaaattgatttttagtcccggttatttgaaccgggactaaagatagcgatctttagtcccagattcgtagtcccggttggaaaaccgggactacagggggttacgaaccgggactaaaaagcatttctccaccagtgtaacttctgacatgcgctaactgcttcgtctgatttgagagattaattccaagaaactataaaatacactattatttggaaggtttaattgcacctattatttgcaatatgtaatttgatatttaattatcgtgtgttatgcccatcgtatataaccatgtcgctgcagtaacatgtaccatgtaatatccaaactgctggcaaatatcgaaagaatcttccaaacagggagcgcaagatgcatctcgagaggagtatgtatgctgatcacactcaaactttgtcaacgacaggacacttgggaactgctccaacgtccttcatctaacgctgttgtgacggatcggagattatggttcagatttatgattgtgacaaaactcactatatttccgcttggtcagaccccaaagatgcagattttctaagtagaaatgtgataaattgtgtgggacattatatatagtagaaatgtgataaattctgatccgctggtgtgattttgtaatcgtataatcaattcatctgatgattctccaatccgggccattggtctgatcttcataaattggagttgagctgccgacggctagttgtattttgatggacagttgctcgggtgctattttttcctaatataaagactctctggcttaacgtgctatttttctccatatttttttaccttcaactatttttctctatataagattgatttctgtacttgctaaacaagtgtataactcaattattatctaatacaagttttataattacttcatctaaaacctaaaattaggacttcaaaccgactataactcaatatttattaatgagtgcagtaaattcgagaattattaaatcatgaaaagctctatttgatgctccaaactaactacaacctgtcatttctaaaatttcaaatttctgaattaatttgaaataccacaaataatttaaacaaaaaattaatgttttgacttgggcacgactacacatcaatatgtactaattttcaatagtaaaattaaaactattttgtccttaataataacaacagtggtaaatgaattctatatgtataacatgtaattataagagagaatctatgctataccactgagtttgttggagttcaacgatttaccatcgactttgtctctttctataatatactggcgactttatcaattgttctacaatacgtcattggactggaccatcttttcaaaaatacccaaaatgcccttagagacatgcaagattaacaattgatttatctcattagaagtttaaaaaaaatatgaaatttttttatgtggcctccttacacaacatggaagtttgtgtacaagcttcaagttttttcagtatattatgtttttagaagaaaatattgttatgtggtatatgagagagaatttgcttatacaagacataatatagcacaaaaatatcttatgtagtgtatgaaagatgatttatattaaaaacaacaataaataagtattttatatatcatataacagataagttatattttttaaaaaaatagaaatgtaaaaaacttaaaacttctatacaaatttccatgttgtgtaaggaggcgatataaaagttttcatattttttctgaaagttcaaattagataaatcaattgttaaccgtatatgtccataagtgtattttgggtatttttgaaaagaaggtctagcccgatggcgtattgtagaacaattgatgaagttgctggtatattatagaaagcgacaatgtctatggcaaatcgttgaacttgaacaaactcggtagtatatatagaatatattatctcttattaataacgcaatattcaattgttacattttgtaatatcagtattgataacacgtgcaacgttaacatattgatttgcgactagtttacatattccttcggtaatacatatgttttattctttccacatgtaacgccatcaatagaagcaggctcaactaatggcacatcctcaatattaataatgttatggtggaatataacaaaatgaccatccaatagatagcattacttgtacttttccgttgctttggtgtcaccagatcactatgtgttactcatgccatatgtcaagttctcccttagtacgttgtcaagatactttatatagctatctacaactctacacatgattgtttgatgatactctttgtgcacaaaaaaaaaaaccttctcatgaagataaagaaaaacatcccccaaagtgatggatcttgcctgatgatacatgttatttgtataccaagcataaacaaaaagaatagaaatgttagccccagaagctatttcactacttttatcctttccagcaacgttacaattgtagatggttttattcttgccatatcttttgttgcctagacggtattaccttaatgtgatcttccttttgttttatgggccccacttcctttccaggccattccactttacatttgcatttcagtttctgaaagctaataccactagcatccagtctgctcatgtgtaagtatgcatgtgtacaaagcattgctctgccaaaaagtaggatttacctaatgtcatgggcttagtttgttagtgttgtttgaatgtatatttcttttaagtagtgtaaaggaatatatagagggttctaaggatagcacgcaaactattgatagacagcttaagcaaattcttttctctttttgctaagtagccaagtcatgcatagctagttagcaagatccacaccgttggtattgtgtagctattacaaaaattttgtaatatactactttggttgaagcaaaagattccttacattggtatagaaaacatttgtggaggcgtctgataaaccttttatataggtgtttccccaaccgcctgcaatcaatggcatgtgaaaatcagctatttacaagggtggaaagtcagccgcatgtggagaaaccttgatacaagtggtttacttaagataaccatgcatggaacatcttttcatgggcagctcacttaaaagaaccacccgtgcaaacacttttcaaggtggacgactcgccaaacctcatgcgaaaattgtttgtcatgggcagttcagttaagtgaaccacctttgtttttatttgaacagatgcagaaattatttatttctttattcatcagtacccagatgtttcattacacattgtattgactcatctcataattcatatcattatcccaccacatatatcaaacagagaaattggatgcaatcctctatttacaacacatcacaatccaatgacatgattatttacatcacaatgcaaccacattatcatgtttcaaaatcaaataacatcaatagtttgagtgtcatgcacataggtaggcatccctacctcccaacaataaagtgactcatgcgaggcaacgttggtctcatagtcaaaatatttatccctcttgttgcaaatcctatggtggatgaaccggcacatgtcattttgtatgacagcaatatgcctatcattgagtgctccactggttggatctacgggccgctgcaatgaaacaacaacaaaaagagctataacattacagtcacaatagagaacaatataatcaatagccattgttcaattaaaaatggttgcatacttgtcttggttcatcatgtacctcactccaacccaacaaactcacaaacatattgcccacaacgatcagtaccactaggttgcttgtggcatttcgtaaagtaatgcatgtaattcattatcatacttgttcctctgatcataaatattgaagaagaatagttagaaatgttgtcatatacttgtccgttatttcatttgggtgcaaggcacaacacatgatatttggtttggtgtatttggacccagcttgctcaatccatagaggggggctagttaggacatatttcatgcacaagaatggaaaataaattaaaatggactgaaagccccctcccaattggaaaaaatgtatcagtctgtataaaggctggctttttaaaaatgtgcaatgtttggagcagtcatcaacgcctatcaatttctctctctcctagatccattccccttccctcattcatcatctcttccatcacattgaaatgttgcgcacttaggccaaggccttttaaatccccaagtaagatcatgactcaactaggcctgttagaccagtctctttcatcaacactgtaccactcctttagactagctcatttacctgctatcattactttagattatgctctaccttgtttgaaatagacagctctttactaggccttgttgcggaactatttgctcatttttacgtaatgaatgccgtagcttcaaaaattcaatgatttgttgatgcatgctcactctttttatgtgggtagacctagtatgcacaatagtatttggtgtatgctacttccctatcatcattaaaaaaggttatcctatacttgttatgattggaatgcttaaatttatatatgttggtcccaacctatcttagtaaggcaggccgtatgtgaaaaattcttttcacaggctagcctactttacatagctgcctgagtaaatggtttattacatgcggttggaccggccgcgtgtgcaaatatccattttatagacgctcacaggcggtcttgttggccaacatgtgaaaaccaccttttgctgcctatggaaatggaatatgtagtagtgactaagctctacaattcatgagcccaatattcaaatgcatagaagcccaacaatcaattgccacaaactgtcttcatcaaaatttatagcgtcacagctcttgcatccatgtaggacaacctgtcatctttttagaaccccttgttgccgtagtccaccaatataatgctgaacttcatgccctacctctaagacaacaatatgagaagattgcacataccagctatatcttcaaaataacattttacatattacaccgttatttttcacctcatgataagcatgagagagggaatatgtggacatgatctaagtcattaataacgacccaccattaaagtttgagaatgcaaatctcagtttaatttgaaatgaaaattcagccatgagtggcatgtattaatagtattgaattttttgtatcactttcctcaatttgacgttggtgtccactaattttaggagtacacacatgtttgtgttcaatgggttcaattaactctcatcattcattcttgtaaaattgaatgtctagaaaatctaacattcaatggattatccgtaaagttgtgtcaggatcctgatacatgggtgtctgataatccctccattgtgctccagcagatgccatgctcatatggtaagtcttaattttctagtttaagtacctaaccattaatttccatattctaaatgttcatatagttgtgtcaaattactaacatttgtaatgatggcctaacttaatctgtcatatttttagtggatttccaaaggtgttctaggaagtcgtgtcaaattactgacattgcaacaatgatggatcaacttaattagattatattatatttttttatggattctaaaaggtgttctctagcaagtatagccacatgccatatttaaaaataaaatactactttcgtttatatttttaaaacttaattatctgtcttatttaaagtttatttccccagattatttaatctgcagtgcttttctcatacagtttgaaattaattaaggtacttatggctaaaatccgaaactctgcgcacaatcaatcatgtgataattccttgtttgtaaagtttgtgcatatagatgcatgttgtgttcataaaaactatatatagacttacttcataaatctatctacgatgaattttaaggagatcatgtctacagttaaattgacaatgttatatataggacggcgctatgtagcgctagaagctacatagcgtgactcaggataattcccacgaccggttttccctcgttcccccttcattcctggccccatggctcgtctcagtaaaaaaaatattcccacaattgttttttcagttccaatagtggaccgtgtttttatccagacactcgtggtgtgactcctcccttacagagatgtgagattgacgagtgggcttaacctttagaatgttaattaagaagttaatgaaataaattaaaagtgagagatatacttaacacgttaacagggcccatccattacagaaacctaattaaaatctttaacgaatatttttctctccatttcatgaaagcagttggcccatgggaaaacttgtctttaataaacattatatctccatttctttcttatataataaatatgccacaagtgaccagcaaccaattatcaattttttgcagcacactccagcagaaatgcattcttgcagtaccctccaacaaggagcacaaacattaggtgtcttatagcaaaatttgcctttagatgtaatgtgggaatttctagtttttctgattaatgagagaatttatatcttgtttatgttttagattaatatgtatggattctagtagacctttccatctgtatatataaagatgcagcccaagttttacagttctgtcaaaaagatctatactactggaccattttttatggtgtgatctctatagtacctaaccttaaccaaatgaatgcttactatagggtgaaaagattagattggtacacaatatgtataatatgtctgtagccttttttacccaatacaaattttcaacaataactatatatgacaattagtgcaaggtaagaataataacaaaataaaatattactaatgaaaatggtaagaataaaaaaagagactaggacaaactgttgcaaattttctatcaatattacgaaatattattatcttaatacccaaaaaacattaaatagataaactttaatttagggacaacaatgcaaaaattagaaggaaaattcctttttttttcatgtctacccctccatgttaggattcttcacaacacaaaccttgtggtcccaccccaattaaactcatattctccaacacaagccccctatctttttactaggaaacaaaccccaaaaagctatctaacaatccaaataaggacacaaataaacatgcttgcaagcaacattcacacacctttaatttcagcctcaataagcatccacagttttcctagtcagcatggttgttcacatctggtcatagttatctctagcccccataaaagaccaaataggaagtgaggtagagtgaaattaaccggttgtatgagcttccaagaatggaaaagcacagaactgaacaaaacatggcattgggattctcatcccatcaacacaaacctcaatgctatctcaccagccatatcttggagatagagggagtgtgtgagggccagaaacttgcaaagggagaaagtgaggttgaatctccgtcacgtcactcacagttgcccatccatctgataaaggggtgtcccctgggctctataaatattgtccctctttgcctccatcaacatcactgcagtgcctttgagctttcgttctctagagtgtctagggtgaatcttgagcgagtgagcgagcgatctctgtgttgtgtagtttgtgagctagggtgatggctaacaccggacttagcatccccatggtgaatggtgccacaatccacctcctccctggtttccggttccgtccaactgacgatgagctagtcatcaaatacctctacccccgtgcttttcatgtgccactgccctgtgcgatcatcaccgatgttgacatccatcatcacaacccctgggacatcgtcccaggttaattttgatatgcacttctttgcttctatgaaaattattaccacatccgtctgcatatatctctgatttgactgattaattgcatgtgtgtcctgacgatatttattctcttgttttgtttatcatttttttcgtttgttcgttggcaacgatctgatgatgaagtggcggagagggagaaagggaagcacttcttcacaagaaaggaggtcaagtaccctggtagccgccgtagcaaccgtgttgctggtaatggcttctggagagcagcaggctcggaggtgcccatctattacaaaccagaaggtgctgctaacgacatgctagttgggatgaggcggactctagtgttccactacggaaagtcacgatctgcagagcgcactgaatgggccatgcatgagtttcagcttgctggtgctggtctccttcctcaccctatgatgaggcatgcaaccagcaatggttcagagccaccctgtggctgccttgaagcgacaatcgctaaggtgagatgctacgtccaaaaattttactgttccatttatcatgattccatctaaatgcctgttgaattaaattgctcaattatttggataggttggattatgagttttagctttagggaatggggaaaatatgatgacttagtatacgtgatgatatactataactcttgtgttgatttattaaataagggaagggtagttgttttcgatcttaggactaagggtacgtgacgcttgatatagggttcatttattgttgccatgcaagatgcgcgggatctagaagtgattcaaattttgtcgtgacaaggaatctagaggtggtgggcctgctgatttgaatttgtcatagcctcacatggttttccttatgtattactaggatgtaatgatgattaattgattttgccgtgaagcgagatctagcggttacaagatctactagtgattcaaatatattgagaaaaaaaggggtttgctgtctacttgcattttcagtagggaacctctttattgaacaccacgtgtcatgatacacttgatactgggatatttggatttgtacatctggttttaatttgatcattgccacaagatttatataagtgacatgtcaacagtttacttctcaaattagttgcaacattcaaactggacatgaagttatcacacatctttctaattcagtccccatatgatttgtcacagtaagaggcttataaactagtttactataatggtcaattcatctattctctttgttgtatatgttgtatataccatggttgcaccttaagtagatccactaacagacaaaatggtgtctattttacagaaaagtgatggtctctctgcaactcttcgtgccaagcgtgattctgcccctcttatgagaatcatggtagaacccgatagctcatgggtgatctgctgcatctacaagaagaggcagcgtgccccgcctgttgttatccctcctgtcattggcgatgtaggggaagctatcatccctcatgctattggcgatgcaagggaaggccaacttcacttcattgacttcctggggcagccagctcgcaatgatccatcctcgccccatagctgcaccattgacccctcctctttggaggaagggagtgatgagtctgccggtgatggtgaagataaggatggtgatggcatgaatgaagcaaattgatcgagtgtgaaggaagtgaactgagtctcaagaataaaaactgcaagtatggcgctccattccatggaagacctgcatgcatcctatatatgtgcttttatgttcaagttggagaactatgtgtgttgtctttaagttggagtactctaagctattcgatctggagattatgctgtttttaataaaagtttgaagtgtatctgtcctgtttaattagtttcaagaaagccaagcgtgtttgggttctaggatgaacaaagtcgtccaagatgcaagaagttctagagaggtagctacatttctggaaattgttgcatcttcctttcttcaatatatatatattgtcctatttcataatgtcattctagccagctatctatattctatatatccatttccgttgccatactttattcactatgttgcatcgagtgagctgcattgctctgtactacatgttacttgatatgtgttgttcataaacacacacattaataatgatcagattgtgaaaaatcaattctacggtccttgaggaggtaccatgagataccaaaaatttagtgtaaaatttggtatctcatggtacctcatagtatctatgtaccaagaggtaccaaatttacaatagaaaaagtggtacctcatggtacctccttaaggaccgtaaaattgctcattgtgaaatgcatgtccagaattcacttaccaagtgttcggaaacaaattcacttaccacgtatctgggcttgaggtgatagttggacatgggaggtaacagagttgtcatccatatcatgtatttatttatagtgaagcaagcattgattcatgctgtgcaaattagtcgcagtgagagcattttctatatattttgtggcctatgtgaattaggagtaatatatattaagttggaacacctatgtgttataccgaatttgaatgatatatcaatatagatgaacgaataataataaaaattaatgacaagtgtgaattttgtggcatagcttcagcgttaagtccctaaatttagaggtaagttagtgtactagtaccgtcacttcttaaggtgctccaagtttttctctgaccgtacattagactaaggtccaactgtggacacagtctcttacattccaaaagtaataaggacagggataatattcattattaggaacacaattaataaggtaagtggagtaatttataaaatgatattaaatatttatgctgtactaatttacaaatacaccatggtaattatatgtttaccctgaatgcaaatttttaatggcatttcaatcacgatcaaatggaaaatgcaaaatttcaaatctgatatgagaatacaaaaatatatagacattgcgaaaaactaatgtgcaactcttaatttaaatatagagtgaaaagtttgcgatgtgctgctgtttgaaatatatttacgtgtgatttcacacattaaatttaagcattaatgggcatccagatcttcatatcaatatagataggctaccaaagttatagtccttaatttcctgcgtgcatgattaaggttgggaagggtaaataataggtgctaatatttccttattctgttgtgatatatcaattgaaaggagcaaatatttttttattggaaaatgtatacaataaccaagtgctagaccaattgtaagttggagtacggtaaaactgctctgaacccaatggttggtggcttggtgcagctagtggtggtagcagaggttaaatgcttggaaaggttgatgatggcttggttgaagatggagttggccgctgatctaggtgaacagcacagcagtgaccaaccctagacgagggaaagatggatgttcgtcgggcactaggtgaggtttggagaggcggtgatagcggcaccagccaggctgagtaaggatgcgacacatttatgacagccccactaggaggagaggtgccggcaaagctggttgatcaatttgatgaagctgcacacatgcacttttgaaggagaggtagggccttaggggtgcctacatgcgcagttggatcttgacgtcactagaccaccggcttccactagccgcttcacggtgcacaaaccatgttgcctagcaccctgccaccacacacatggtctggagcactgcaattgttggtacctggcggctactgcttgaaacccaaggtcacactatccagtgcatgcactcacatccgcttccctctgccacctaggcatactttacagtcaacgccctactaggctcaccaccacgcatctccttaatataatgtggaacaatggaaaagatgaataaactaacatacattgtttgaggacatggatgccgccgtctccttctctgcttcttttggtgccgttgtagatgtgcatgtcctgaatgtgagtatacctacttgataccataggtgaaactggcgataaacgagcggatgatgccataggtgccactcgcactgccctagaaccacactatgggtcctctctagcatttgcttaggatcagtggtggtatggtttatgaaggagtttgaggaagtggagagttcttcgcctgtccacaggctgagctctccttattttattgcactcatagacttgggggtgatcccaatcaggacattatgctgctcccgatcatggtgaaccaacaagcatgacagaaaaggatggacaatgcgccccttgtgacttggtcttggttgttaatcaagaggatcaaccaacaagaaaaacaatatcctacataacataggcatggcatcaaggagacagcaaccctggccccatcgatcttcgcgatggccacagcatgctgtggaggaagcaccgggaaggagggagagcaaggaggtggtgctcgattaaaggttaaaaaggatggaggagagtgacagatctagtcagttagggcttctataagtttttatactcctcagtttataggtatatatatgtatatgtatttttccttcttagtgaaatgaagtgcaactctcatgcgttttctaaaaagataattacagttataggcttgattatttaaaattgtggatggttattttcaatcacatggggggacaagtgctaaaacggtgtcactagtatacggatcactgccctgagcgccgatggcaataaataaattgtagaagcaacaattaagtaagtatcaaatagttaactgcatatctttgggtggcaaataattaattttatagttaatccacgcagagatatggtccactcattattcacaacaattaattttgttactttctgtcatctttgtgatggatttagaactcatcatacatgcattactggtaatttggaaagatctatttgaaaattttgatggttcaaagaatatatgcataaacttagccttagccttgcagcggccggctccaactttacgtagatggtgctctcatatagctcaaaataaaattgggaatacagaaaggcatagtctagcttttgaactcacattttcctgcaccccctatctttattctagaaacttaataaggccaaaataaaaaaaagcttgccagttgccaacaaggttcacacacttttaatcccagccttagtaggcgcccatagttttcctagtcagcactattgtgctcatctcattgctgttatcttctcccaaataaacacaaaaaagaaagcgagagagagagagcttctcaaaaggaattgaaaagcacaaaacaacagaatatataactgacattgggattctcaccccctcatcaaccctggccatctttatttcttcctctttttggactttgtgtgttactgcatggattcatgtgttgcaacaccctggatgctatctcaccatctgcagcctggagatagagaaagaggaagtgatcgtagagttgagtctctgtcacaacattcacagttgcacatacaggtggcaataatcatgagttggaaacacccctcttgggtaaataaataagagctcctccctccctccaccttcatcacaatagcatcattcaatctttaattcatttgagagttgagagtgagcggaatatatttgtattctacgattgaggagaatggccagccctggagtttgcatcaacttggtgaatggtacatcgacgcgcctccccaccaatgctgatctagtagtccactacctgcaccgtcgcgccattcaggaaccggtgccctgtgacttcatcaccaacgtcgacattctccagcacaacccctgggacatcgtccctggtaaatatttttttgacccacacaggcttactcccattagatatattaatccaaaactttgccagcttcttcagttaatttgatcaatctgtagtataacctcaatagatagtttgcagttgttttgatagttaatttattgtctgctgggttgatgatgatggagcagcggaggagaagacaaatgggaagtacttcttcatccatgaggagaacgaacgccttggcaaccaccacagcaaccgtgctgctggtgatgggttctggaggccagtaggctcagaggtgccgatatatcacaaacgtagtggtggcgctgatgaagcactggtggggatgaagcgcaccttggtattccactacgggaattcttcgtccgcaaagcgcaccgaatgggtgatgcaggagttccgacttgctggtgctacccttataccttgccctgtgacgaggccagccaccggtgatggctccatgcttccctgccaccgcacaggaacgaccatcgccacggtaagacactacacatccgaacatcaccgtgcctatatattggatataacatagaatcgatctacttttataatctaattggttaagtatttacatgcaagcatagaactgtgtcattcaacttggggaatatggacatgatgaattacaaacttataattataagaacaatatttttctatgttgacgttgatggtgcaacaaggtctaggatggacctagctagtggtgattcaaattttgttatgatgtcagacctacaggtgctggaaccaaaaggtgatttgactttttggatagcgattctatatatttcagtaagatctaattacaataaataagatttttccatgaatcaagatctaataattaaaggaccaataagagattcaattttgccgatgtgcagaaaggggtacgttgtcggcttgcacttttatcagtgaaactctttattaaacattacgtggttatcctagtagtcccaggatgtgtagagatctaactgtcatgggatctataagatattcaattttgtcaagacgcgagaagtgttatgtcgtcgccgtgtgttttcattagtgaaactctttttttaacaccacaagtggctatcccctttgtcccgggttgtttagagacataacagttatgggatcaataagatacttgactttatcgagatgcaaaaagaggtatgcagccggcttgcgcttttataagtgaaactctttgttgagctccatgcatgatcattatccccttagtgtcgggaagggatgttcagatcatgttttgatcctggtctgtaccttttcatggaaagtgacatctctacagtttattggtgaaaccggatggtagattgatgacactcctttgcccatatatggaagaaaattggacatagaagataccaattccttctaattcagtcactagatgattagcacaaatctggaatacaactatgtctttgctattaatagatttcatctatctctctttgttgtacatgctatatataccatggttcctccttaagcagcatctagtaacatattatatgtcgaccgttttgcaggaaaacaatggaagtccatcagctggacaaactcatggcccacttgagaaaaccatggtcgaacctgatagttctttgcggatatgtcgcatctacaagaagaggcaacgaacaccacagttcatcatccctccatccattggcgatgcaagggaactcatcctcgcccttcctacaattggcaatacaagggaagtcgccctcgcccttcctgccattgacttcctggggcagccatctttcgaggaagggagtgatgtgtctgccgatgtcatcacggatgacaaggatggttatggccatggcatgaactaaataaaggaagccactcagctgtgtccagtaaaaattgcaagcggagtgtttcctcggtgcgagaaagacctatgacctgtttatgtgttttaatttgaagttcatgcttgatactatgtattctatttaattaagtcggagtactctatgctgttcaaactggagtctatgtttttctgtttaagttgtagacaatatatcatttaattagtttggggaaagtaaagtgtgcctatgttctagcttctaggatgagacgcattcgccccagattcaagatcaatgggaggtagttacctggtagaggtaactgttgtaactgcccttcttcaatatattgtgcttttgtgtttttttcttccatgggcatagcttgttcactctgctgcatgtgatcgattcacatatgcgtgtggtatacgtgtgtcgacaagtcacatagcacatgtttgggctcgaattgattgttggacatgggatgttattacagagttaccgtctgaatcacatgtagtgatataatagatatagttaatcttgggcaaatcattcgcggtgagaggattattacatcttttgtgtctgagctgctgctgtattattaatattactgattacactcggagtatgggttacatgtagagaatgagatgacgatatatatggagatggatacaaaaaataattgataacaaaagttaattttttgtatgcctaggcctagcatattttttgtgtatgcgtaggccacagttttgaactacttcttgaatggcgtcgatcttttacatggagaaaaaggataaaagtggatggacgaaactaccagtgtggccctcaatgggaagggaggaggaccatgtttgtgcgctgtcccgcacacagatgaactcatgtcagccactgttcccaagccctctcattctacatctcatgcactcaaatcagccacctttgctgacttccctcatactatggtggctacaggggaggaatgtgagtttataatcaatgttatgtaggattgcacaagaccaaacaaacctactggaggggggtgaatggtagagaaaaccaaaaacccaaaatcttttgcgggataaaagatttacctcaaatggagtagatgacaaagacctgtcgccgctagtcgaaccgccctcctgccatcaatcagaccaccgaagcctcgccggtcagaccacccaatcacctgcggttagaacaccgctatcggttagaacgcgtacatctgtggttagaccatcaagacctagaaacaccggtagatgacatactcgaagatgtacattgaaactttcgactttattgcatcaactagtgtttacaaagtgcaccaacagcacccctcaccaaaatctcgaactaaactcgaaaccttaactttctctcaactcgagtctctctaaaaccaataccgggaggcctcaccctccctctctatttatacatgagttagactgtgcaaagcccacgaatctaacataacttaagatgcctaacccatgtaggaaaccttctcttgcaagtatccaacttatccctttccttatctcaatcaatctttccgaaattcggactcccttccaaattcgactcctctttccatacgattacaatccctcttgtataccatatggattcttcatcgccacgtgcattgctctctagccttttagtgtcccgcatgatctcttgatccatggacatcaacttctcctaagtcgactccgatctatcaccggcaatactctcccgaggcctcaagcaacacctgcacatgcaacaacgaagaaaccatattccaagcacaagttcgtccctacttgactcacattagtataacaacagtatccatacgcatagaaaccatctagaagccaaatccccaagggaacatctaattcaacaggacaacccgaaaccgaacacgataagaatcctgccggtcagaccatcaggtcggatggtctgaccgctgcaacacctgcagtctggccggcggcacccggctggtctgaccgccagggtcaaccaaaaaccttcacttcacaaaatcaaccgtctacaaaatctccaaaataacatcagcaaaccaccaaaattttcaccgcaaaatctaaatcaactcattggttttacatgttataaagatgtgcttagcctaacatcatcaccttaatataatgtgaaagagaagattaaactgactaacattgtttaaatctatggatgcgacctccttctccttctctgcttcttttggtgtcgatgtagatatatgagtcatgagtatgagatttcttgcttgatcccctaggcaatgctagcgatcgacaagtgggtgatggtttcactctgagtgccactttcagtgccctagaactgcactacaagcctcatccagcattagctaaggaacgatgatattaggctttatcaaggaattaggggaagtggagaggtcttcacttgaccacaaggcgggctcctgttgtttttatatcgctgacgaactcaggggtaatcccaatcaggacgttaggatgcctctgatcacaactagttaacattcgtgagtggaacaaggtggatcatgccccctgtataccttggtctcagttgctatccaagatgatcaaccaccatggaaaacaaggacctacttaacatatggaaatcggcatggcatcgacgatactacatctctggcaccatcaatcatcaccattggcatagcatggtgtagaggaagcactaataaggagcaccacaacaaaaaatacttcgtagagacatttttctaacactagaggcagttttaaaatgcctctagaatcctgtagaggaattttgagaatatcttcaacacacttaccatctccacctcatgtcatttgagaaataagtcaatttatcaagatgaggcattttgattcagatcatttgatttacgttttgaaaactttcaaaccttaccagagaggggccacttatgctggacgttggcttcaagaaatctcctttagcattacttcaacccgggctttgaccatgtctcccgaacaatttcagtacatattgtgcaagacgattcttgcattaaatcaaaatttgaaaaagtgcctctacagaggttaaaacgccataacaaaattcctttacatatgaggcaaatattaaagtgcagaaaagatgcctctacaacattaatttaacaaaatatgctaaaagtgcctctaaaaagtatctttatactatagaactcttggtttaagtggcaaaataaaaactgtctccacaaaagtgcctctacgtaatgattttgctctagtgagaaggaggagcggtgctcggagggaggaatggaagagagtggcagattttggcagtttgggcttctaactttttattatattcctctatttataggtactagtcaggttcctgtggttcgcaatggattagtatgggttattcactattttatgggtcctgtaattcggaatggttggaatgggatcaaagtaacaattttttgaaccaatcgcttgatatcttttacatgggagaagggggttaattagttacatttaaggagtagagataggctttaacatttaagattgtggttagttattttcattctcggtggggatcaaaaagttgataaaatagctcgcacgagggagggtataccctgatcacctctgacaataaatagtagaagaaataattaattaacatatgttgagttcaaaacagttaatcacatatgtttgggtggcaaataattaattttatttttaattcaataggaagatattttgttcactacaattaaattcattacctcttgctatctttatgatgaaattggagctcttcataaaatttctaactgtttttggaaaataagatgtatttgaaaataagatgattgaaagaaaacatgtataacataaacatagactttagctgccactacacctatgttacgtatagatggtgcgctcatgtagcaccaaaaaaaaatttaggaattcagtgaggcaaggactggattttaaactcacattttccagcagccaccccccccacccccaatctttaatgctgcaaattaacaagcctaaaaaaactgtatcaactatcccaataaggccacaaattaaaaggcttgccaacaaggttcacacacatttaatatcatccttataggcacacacagttctcctagatcagcactattgtgttcttctcatcactgttatattgtccataataacactccaagaaggagatagagtagtccacctcaccagttgaaaaacacaaaaaacaaatcagaagatataactgacgttgggatcctcattcctccatcaaccccagccatctttaccttcttcctcttggattttgtgtgttactgcatggatgcatgccttgcaacaccctggatgctatctgacccatctgcagcctggcgatagagagacaaaaaacagtgaagtggagtccccctcacggcactctcagttgcccatacaggtggcaatatggtgagttggcaaacaaccctcttggttctataaatacagctcctcccagcctccatctccatccccacgggaccattcaatcttacattcgttttagtgagtctagcgagagcaagcgagcgtgcgagcgaaatctgtttgtaggttgcaagctaggacgatggctggtcctggagtttgcatcaacttgctgaacggtaccacgatgcacctctccgttgggtgtgtgttccgccccaccgagggtgagcttgttgtcaactacctgtaccgccgtgccatgcaggagccgctgccttgcgacttcatcaccgatgtggacatccagtgccacaacccttgggaaatcgttcccggtaaatatattttgactcgcactgtgtcactcccaaatctttggcagcatctttgattagtttcatcaatcagtagtatctcctcagctagatcgtttgtagggattttgacagttaatttcttgtatgattatgtttgagtgtcaacttttctattgttatgttggtgatgctggagcagcaggggagaagaagaatgggaagcacttcttcacccgcaaggagaacagccaccctagggactatgaaagcaaccatgccgctggtgatgggttctggagattggcaggcacagaggtcccaatatacaacaaacccagcggtggtgccgatgaaaaactagtggggatgaaacgcaccctggtgttccactttaggaagtcttcatccacagagcgcaccggatgggtgatgccgacttgccggtgccagccttgtgccttgccttgtgatgaggccggccaccggtgatgtctccatgcctccctgtggttgcaccgaaacaaccaccaccaaggtgagacgctgcatccaaacatcactatgtcattgtattggatatgatatagattccccctcaaaaaaaaaaggatatgatatagatttgtttctgtatttttaatatgattggtaaattatttgtataaaaccgtaggactgtgaggttcaagttggggaatagggaaacatgaggaattactatcttataattatatagagtatttgtgcatgtcgccattgaggggtgccaataggtttgggttgattgattgatgccatgcaaggtgcgtgggatctagtggtgattcaaatttttgtatatagtgatctatgagatggtggaatctagggttgatttcaatttttcgcatagtgattctatataattcaatctagtaggatgtgtcacccagcaaggtctaatggtttcacttacagaatccataagagattctaatttgtcgagatgcaaaaaagggtatgttgtcggcttgcatttttattagtgaaactcattattgaacaccatgtgtttttatccccttagtcctgagacgtttggagatctaacaagtacggattctattgaatgttcaaatttgtcgggatgcaaaaagggctatgttgtcagtttgtgtttttattaatgaaattctttgctgaacactatgcatgcttgtccccttagtctcggtaagggatgtttagatcatgatttgatcttgtactcctggtcgctacttttccttaaaaaagtggcatcactacagttattggtgaatcgaatgggggtgacactcctttgcccatattaggtactccctccatttcaagttataagatgttttgactttggtcaaagtcaaactattacaagtttgactaagtttttaaaaaatatagtaatatttataataccaaattagtttcattaaatcaataattgaatatattttcataataaatttgtcttgggttgaaaatgtttttttttcaaacttagtcaaacttaaagcaagttaattttgaccaaagtcaaaacatcttatgacctgaaacggagggagtagaaaattggacatagagaagttaccaaattcttctaattcagtcagtacatgagtagcacaaaactggcatgca

SEQ ID NO: 5186 - DNA, 6386 bp, Oryza sativa
aaggaatccacaagagaaaaataaagagaactttgacaataaatggcccttcttatttaacgatgtcatagatagcttaaatttgagagagattaagctttcagggcataagttcacctgggcaaactctttaccaaacccaatctatgagaagttcgatagcgtgttagttagtgcggagtgggaggagaaaaatccattggtgtctgttcatgcccttacccgagatccctcggatcacacccccctgctgctagacacagggaaagggtctcttaagaacaaccaacccctgtttaaattcgaacttgggtggttgctgagagagaactttcatcaattggtggtcaatagttggtccaaacaagttagagggaggacattgagagatggcaaaataaaattcagagactgcgtgttgatgaaaaacacgaggcctgggagatctgcttaactctagtgcaggtccaaaactcgcctttgggtatgcaagtgtgccagttgatataatcctacaatcaacaagaaacgaagataaagaaaccgcggttaaacctataaatgatagccgatcggcaaggtgccgatgacatatcatttatctttgagccgatgtcatgtacgtatcaatcaacagttataaatagataataaaggataaaatctactcgatcggatgtacatattaacaatatataatttctatgtcaatatatacttaagtcaagtgattgggatagattggtcgtcatgccgagacagtataaatcacatagatcgaagtatatactaacaatgaaactatatatgttcatagcatagcctatcagatagatctagcatgtatcggttaatactccaatactactctacactaagatattaaagcaagtaaaatatatcaaacaaaagcctaatatacttgaatgcaacaagatcttgatataaagggcagatttaacatatcaataaagcagatggaacaaatatagttaaatcaggtaagatcggctaaaactccgatactacccaaatcagcaaccaagaagcaggctagagattgagattctaatcacgactcataagatcaaactcaactgatgcagctataagtatgaaaagaaggacaatatctagacaatcaagccgttggaagtttcatagagtggttgacaccttatataatctaagtcaacatcgatatctaacctaatcggctgccctctaccaatagatgttagccgactgtagattagatagcgatattgccagagattatgtaagatatatcataactcgatgaattacgtaaacaagatcagagtatcacaaagatggaagcactaatcccgagaacgcaagctgtcataacaagttttacctcttgttgaacatcgaaaccgatgcagctcaacccgaaagcaagaactcgtcgaaataaaacgaaagtaaaaagagtggggatgcgccgagattgtattgaacgtgtgtttatttaattacatgaggttcggggtctatttatacccgagaattacaaactatgtccatatcggacacgactcttatctctaacaaactctaagataccataagtctttatggcagacttttgcccaaacatatctctaaggaaattacataaaatatcctagttaatagatacaattgccttctcaggactctatccatgtgtggcaaccatcttgaagcatatcaactcaacccgatgtcgtacagcaagtcgtattgtcggaatcggctatatcacctaacccagtctgactcgaacttagccgatcccgatcgtagccgattcgaactccagccgattcttactttgtttccgcgacgatcctcatctttgattccgcttcgatctaatcttcttctccgataccgatattaccaaatttggtcgttaacacatgctccccaagtccggaatatttggtaatgtttcggattttccatatatcgactccgagcaagattcgcactctgtcgtttcctgaccgttattccagtgctttaaatactaaccgttgctcccgaaaaatcttcactccgtcacttccgttttcactgccaaagcaaactttgtcctctctctctccgacgattcctccaacgcataaggcgatccccaggcgattccatctccgaccagatcttcgcccgcgacgatgtcatcctccgctagctagtctaccgcgccgtcagccgagtatgctgaggtaaggtctcatcggctagatctcttttctcggatcagattggtttttctattcctcatcctgctttccccttcttgattctcttgaatttgtagcacctctccaatctagttgcaattccaagcctctcgcatgaaaattacaaatttctcagcccggttggcaaccctgatcctaccgaatttatcatcggtgaaacaaatagggttcctttcagattagccaacccaaatctaggtcattggaagaacaccttcatatcttggctatctcttgagaaaaccccacccgagaagagctggaccacgtggttcaagcgcatgtcagctagtaaaagagttcattgggacgaaattagaatcggccaagcactcgaccttaccatagccaattcagccaaggacgaacccctaatggcagccgcctcctatttctggtccaacaccatcaatgccttcttgttcaaccaagggccgatgaccccaactctagtagacatcactatgatcaccggtctagatgtcacctcattggctaaccccatgagtttgaacacgaagaatcagtatgacttcatgaccaagagcataggcggttggtcaggttatgtagcaacatacatgggtcaaggctctatcacccctcgagagcgtgtagcctttctactgatgtggctagagaaatctcttttgtggatcaagctgtggccctacaaccaattggcagtttatagccgaagccttggaaacaaagaagcaatttcctttaggaaaaatccttctcggctacttatatcaaatgctaaacaatgcatcagccaaaatagtcgtccgctcagtagtcggagcaggtggaccatggtggttgttacaatcttggctgaatctagtagtcatgaaatttgtcaatcggccgtccgtaacagaagcagatttcccgagactggagccgattatagatgatgatggagaggaacacacccatcgtaggtgtacatcatatggagaatatacctccacaccaaccgatgcatgagcaaagctatcgaccgagctgctcaaagactggttttgcagcttttatgatggctttctcaaagaagctcgaatttggttcctctacgaagattcatcgcttctagagaatctatcagactttagatttgaagacatcaaccatgaaagataccaaaagtctagagaagtccttttagctgcaatcagcccatgcatccttcctgtcggcattcatcaaggaagaaatatcaaggtttcttatgagttctattacccaattagctcagctagacaattgggaatgggtcaactcccaatcagcttattctttgctgataagatccagtgccgaggagaaatctcatcaaccctgatgatgtatcggctgctaaatctccaaggacctcctctaggaagcattgaaaacatagagctggaaaccttcaggagcaaaacatttgacagatggtgaggcgagtggaaactgcatctattccatcaatcggcttccatgacagatctctttccagacgttatccctcaggtatgtcttgattaattttttgaataattgctcagccgattcataacttgactaattttcttttgaaatgcagacgacagaattttctcctcctcaccagagcaatagtaacagaaatatcaaatatgctccaggtctaattcctaatggaggcggaccatctccccctatcattggctttcatgcccccaggacttcaactcttcttcaagggctcatcagagaaccagccgatgccagcaaaaagaaaagaaccagatcatcggctgtggatgcatcagctcctgctccaaagaagaaggccaaactaaagaagcctatgccaaccgatgatctgcctgccctagatccatccattgaacaagctctagatgaagaagaaatcggcgaggatgttgatcaagccgcagataaagtaagcgataccgaaagaactccatcggcttctcctaagcacactcgtccaactccttctgctccagcccatttttcaagggtaagcaacttcctctgattctttttgcaacttcttcacttatagctgattcctcacagactttatagttccagaagaagaaaaccgctgtaaagaagaaatcggcagcaacgattttcaaaccagctccaccagtaagacattctttatttttttactagttgatctcagccgattttgtctaacatttgcctcttttatagcctcctcctcctccttcttcccctgtacaacaatcattgagtgatcaaactccatcggctgtagagaggcaccatattgaagaagaagaacaaccagctattcctactatcccagtaagtcttgtctatacaaatcttgaatcggccaaataactcatgttgatactcaactgtttttaaattccttcttgcaggccttagccgatctgttctctttcgaaattaaagactatcttgatgaagaaacagaagaagacaccaccagcaagtctttggctcccttgtctgatgatgtgaagaaaacccttgaagacatctctcatcggctagaagcatcatcactagacaacttggtggtaaactgtgggccgattaggactcggttacacgagatccatgctctaatcccagatgagctagccgatgtccttactctagctatatatcttgagcagcaccaattcaagctggaaaaaagccaaactaagattagccgaatgtcgggagcgcaaacatatatcgaagctacaatccaagccaatcgacagcttgttcatgaagagaaggccaaacttgatcagctatctgagggcccgattaaatctattattgatcggcacaacttgaagaatgcaacgctgagctggatatggaacataaaatgctagccgatctcccaaagtctgtcgaggagcaaaaggcaagattaaaatcggctatcaagattgttgctgatctcaccaagtctttaaaagtcattcctggaaccgtgctcaagatgcccaagccatggaagaagtagaacaaatcaggcaaaggctattttggctatccagcaatatttgtctcggtgactttctgtgtattagaccttagaaatttttgtaatcggctaagatactctggtactttattgtcttgacaatcctttgtgccgattaatataacttctaaatttgctaaaatattttcatttttcgtatatatgtgcctccttaattttacaatgtcaaaagcattgataaaattataaaaacaactaagggcgatataacaatatcggccattgtacatcggcaaaccacaaccgatttacaatatgaaaaacagctaagggcgatataaccatatcggccatctcaaggcgatgcaaacacatcggctatcatgtatcggcaagcatcagccaatcatgcgttaacccaaacacttgggtaatatttcttcaagtacttgccatttagtgctcttccataaacttccccatcgagtccttgcaacatgtaagctcccttagacacaactttatagatttgcaacggtccttcccagttcggtgaccacttgccgaatttgctatcccgagtcccaatcggcaaaatcaacttccatacaagttcaccttccgaaaaatctttgggcaccactttcttgttgtaatgccgagcaactcgttccttatccttggtaacctttgcaagggctcacaaccgtgattgaaccagatcttctctctcatcggccataaggttataatactcatcgtctgttaaattattttgcaactccgttttccttgagccgattctaacttcccatggcaaaacagcctcatgtccatatacaagcttgtaaggaaggacttggatcgatccatgacaagccatccgataagaccacaatgcttcggctaatctagtatgccattgccgaggataatcaaaaatctttctcttaatcaatttgatcaagctcttgttagatgcttcggcctgcccattagcttgtgcataatatggtgaagagttcaacaatttaatacccatgctatcggcaaactgaacaaactcatcggacacgaaaattgaaccttgatcggttgtaatggtt

SEQ ID NO: 5187 - DNA, 12885 bp, Oryza sativa
tcttaagcttcactaaagataacccatgtgcaccagcaaaacgcttggaaatgaaggaatgggttgcaccagaatcaaacaatattactgccggtgtcgagttgacggggaatgtgcccaatataacttctggtgctgactgcgcctcctctgcagatgcatgattaacacgggcctgaacgaacttgggtccagcacgtcttggcttcgggcactttccaaccgtgtgtccgggtttgttacaattgaagcagagttcgggtttttctcccaacctcttgggctgttctggcagagctggttgaactgattgagctggaatctttagtgaactcggagtagggttgagactgtgctgctcactgttgttgtgactgccactatggtggttcttgttgaagctacccgggtggtagggacggtgctgtcggataatcatggtggaaggtccaccgtgacgtcccatcgtgaaacgaggcttctgactcttcccctggggagtcctgaactgagctgccttcctcttacggtttattttgttacagtgctcctcctgacggatagccttatccaccagcttctcaatgtcctcataatctctagagatcaactggttagtcaattcatcatcaagacccgacaaaaacttctcctgcctctcggcatcggtacgcacgtcctcaggggtgtagcgcgcgaggcggttgaactcatgcaaatactctataactgttctggttccttgttgcagggaacggaactctctcttcttttgtgccacaattccctcgggaacctgtgctttattgaaactatgacaaaactctgtccaagtaacttctgccccagctggacgggtcaccatgtagttgtcccaccaaacagaagcgggaccttgcagctggtgtgtagcaaaagcaaccttctcttgctcgttgcattgcaaaagattcagcttcttctcaatggcatgaagccagtcgtgggcctcgattgggttggtggtgcttgagaaggtgggcggcttgacacgaagaaattctaacagtttggactgaggaggtggaggaccaaactgcaggttctgctgctgcagctgtgcttgctgctgcacctgctgcaacacctgatggtactgttgctgcatctgttgcatcatcattgtcatcatctgagtctgattgtccaacacctgagcaattgttgggttctcgggtggtggggacggactgttgtcagatgcaccgttggcacgtgctccattgatcggctcttcactgccactggcgttgttcgagtcgcgtgaaccattccttatctccatctgaaggggataggtagaaatatgagaaatggaagaaaaacagggggctcagaaactaatcttgcttatgaatttaagtgcaattatcttaatcttgattaaaacactgaaaaagaggcacgcaactcctaattgaggcagtcataccactgacacatgatatcgaccgccgactaacccacaagcaacaaacctaaacacgaaaactagcaagcaatccgactaagaaggcgataaagctaagggcggcgactctgaagctcggggcggcgcttgcaaacgagggataggactgacatctaaagtagacaagggataggaaccaattcatgctcaaatccaaattaaacaaagcaaaagaagactcaaataaataaccgagcatgatgatttttatgcatagaacatttttcatgaactcaaataaagacactaatgcaagtaaacaataaattaatgcatagactagttgcatggaaaatgatgcgcataacattgcccccatcgaatatagacacgacctaatgcataacccccaataaattcccgactgactatcgaataaactccaactaaaatttttctaaagccctagactgagctaatttttttttttaaaaaaaatccgatccgaaagaacgaccaagatttttcctgcaaaccaaagaggcaaaactccaaattttcccgaaacaattccaggtgcaaaaaggcatatgcagatgaaaaaggggttcagagggctcttagggtttccagttggcttgtcctacggtcaaggtcggctctgataccaacttgtcacgcccagaaattctcaaaccagaatttctaagctgaatgtgcattaaatccctgtccaggaccagccagggtacacaaacggcaattgttgacatacagatccacgtcttacaaaaatagaaaagattacaaatgcagcggaaaagatgaaagcgagctaaaccgggaagcttgacttcagcagcgagcgactccactccacaggcaatccttgacggcagcgacgaaaccaactttgacaaaacagctccaactaggaagatcttcagctctggtgtgggggaaaagagagcaagactgagtactacccactgtactcagcaagtcataccggaagaggaggtatgatgcaggatataaccaaaggaggctagaggttcttttgcataaagctagcatttaaaagcagtagttgaaagcagtaaaacagttgtagtaattaatcaatattaaccaaacactgtccaacgctacaccacgttgcaacaggcccaaccaaccacctgaactacaccagttcattaagctaaactaggggtgagactaatcacggtgaatctggttgatcgcccataaccgcgggcacggctattcgaatagttttactctggccagaggtgtacaactgtacccacaagacacgattccacacatgtcgccatgccccgaagtatcaccatgatactgcaaagggggaaattgtgacaagaccctccacataaccctcccctaaccatccacaccacgctaaggtttcacccccacccctcaaaaggcagtgggcggtcccctcttgcgccgcggtgaatccggcagctggacaaccggacaccccggccgacccaactccatcacgcccaccctcgccaccggtgcctaggaaagggtcgagctatacttcagatcaagcagttacccactcccgcttgtggtaagcacggtaagtctcccagggtttcccgtgaaccggtccttaactgccatgggtgcgaccagcaaaaccatgcacccacagcccaccattcaatgtattttaattaactaacaccattgcggtggcaccaatccaaagctatgctcatagacaaagtctatgtaataaagtgatccccatttgtgtgctagttgaactaagcatggctaagcatttcctaaaccaacatctagtcattttgatacccaggttatcaatggcatatggtaaacaataaatggctgagtaataggacccatcccacatgatattgtaaaagaatgcaacatttaatagaaatgcgggatatttgtaaattgggtacaatatgatcaaacgtattgcatgacttgccttgctctcgcactgatgagatcacagcaacgtcttcgagaaactgcggatcgacgaaacggccgaaacctacgcgacaaacaaagcacacaagcaaaacatgctataagactacagaaacaggaaacaaaaccatttttaatggattctttgcatttttcttgatttactgagacttgaatggacttaaacggagctcggatgaattacttatgaattttagaagataaactgtgtttttactaataaagaaaagtccttaatcaatttattgcgcaataaagcccagggctgacgtcatccaaggggggggggggcggcgggcaccgacaggcgtgccccatgggtcagcggttcaagagaggggagagagaggcgccggcaaacgggcccactaggcagcggctcaaagggggtcggtccaccgtggaccgggaccacgcgggtggtccaccgccggtccacgggaccgacggtccagatcggccgggagaccgatcggacggcacggcggcgactaggcacgactcggctcggcttcaaaaccggccggccggccatggcgaggcgacgacggcgcacgaccgccggcggtgcggggagacggcggcggacggcgcggaaggcggcggcggacggccggagcggcggcacggccaaaggcggcggcgcacgcgtggaggggagaaaagggagggggagggaggcatcggccgggctcagctcggcctcaaggccgaccggggcgaggcggcggcgaggcacgaccaccgacggcggggaccggtgtcgcgggaagcggcggcgacggccgaaaggtggcggcgcatggccgaagcgcggcgatgcacgtgcggagggcggcggcatgcacgggagagagagtaaagaaagaaggagagagaggtagtcctcaccggcgatgtgggggaatcggggtccggcggcggcggacggaaagcgagcggcggccgaggtagctctcgcggcggcgaatctagcggcggtgattgcgcggcgaggcgatggctctagcgacggcagcgtgcggccggaggcggcggcaagcggtggcgctagcggcgagcggcacgggctcgttaggagacacgggaggggacggcaaatgggggaaacgagagaggggactcgggggagggtttttatgggtgagggaggggcggaaacggccgggaatggcccctatttggccggcgatgtggggagtggagggagagagagaggggtgggattcgaaatcgaatcccgccctctcgagcgcgcgcgcgggccgggagatgcgggggaagaggcggcgacgtggggaggacgcgggagcggcgcggcgtgggcgcgggaagagcggaggaggcggcggcgtggcggattcggcggcggttgccgtcggaggcgggtggctggaggaaggggacgacctgacaggtgggccccacctgtcagcgtcccggagagagggggaaggagaacgggccggcccacaaggggaaggccgagcgggagagggatgggccgacggcccaacaaaggaagaggagggaaaagaaaaaaagaaaaaggattttcctgggattaaaattgcactttggtgatttttaattggtaaaaattatttccaaggctctgaaaattccactaaaaatcctgttaatatattgtgacatgtggaacccaagaaaaaatcccacaatgccaattccaattattaattgcatttattaattatggaattagctctaggttaattaagataatttcttcggacaatttatttagccaatttttaaagctaggagagggggaaacttcaaggcgtgacaggtatcgccgtggttcgctccgccgctcgccgctgttgtccgccgtcctttccggctggcgtcgtcgtctacctcccgccggcccgcgtggcagccacgtaggtgccacgtcagcgccagctcagccgaggtcgggacgggccgaccccggtcagccccttccgtgcgcgtgttccaccgcgagccgtgaggctgcgcgtgggcccgccgcatccgttcctccgcagaccgcgcgcgtgcaccgcgtccctcccccgcccgcgcgcgtgcgccgcgtgctccctccgcacggtgagccgagccgctgacaagcgggtcccacccgggaccgcgcacggtgagcccggtccaccggcccactctctcctcccctcccgcgcgcgcgcgcttgggccgtctttggccggccggcccatttagctcggccggaccgccccatctctctcgggccgcgccctagccgcccgaggaaaagtctaatttccatccctcttttcttttgttttcttttcttttccaaaaaggatttaattaaatccttttcctttagaccaaaaatccaataatcttagaaattcaatatcttcccaaccgtaaatccgtttgactccgttcaacttccaaaattcctcaaatctcgagatctatctaatggcacgcttagaggtcattaatagggctttattttcgccgtttgttgagttgccccgtttcgcgtgtagtttcggagcccgaagacccgcagtgcgaggatttcgaggatcaagctctagatctcgagcaaggcaagccacctttgaacatcttgagcctatatttgaaatttaattatgttgcttgcaaaatattatgcatcgataggatcgcacttaatctgttgtcccgtctgcaaggcagattggcggacctacctaacttgttgcatttgatccttccattgttaattgctataccatgtccccttgtaaccatccagttgcgcctcgatattcgtgcactctgtgcgagtatcgacggtcaccttcaaacttaaaatctgagtaacaacttgggtaaaactggagttttacaaaagacttggaaaacccgacacctgggtcggcgcttgcgaactaaaggaatttccaaaaccgcggaccggggaacgtaccgggtgtacggtttttcccgctctcgcacttaaggaccgattccttggaatttcatccaaacataagacaagtacgaccacatgggtggaatgggacacccctggctgagtaactagcttatcaggggagccttgatgtcgagagacatgtggattcgccggggtggtgtcggggaggacccctgggcttcctggcacagtatggtctgggacctaacctgttgttggtctgggacccctctcgtcggcatatggtaaacctgtatcggctttggaaatgccttgtcatgaaagtttggaggtctcccgacgtggctgatccccacgggctgggtgatccgggttagtaatgtcgtgtgggtaaagtgtaccccctctgcagaggttaacaaactgttcgaacagccgtgcccacggtcatgggcggatgtgaggtgattcctagcgtagtttgtttgactactgcttgtgaaattgctgttatggaaaggggttcgatgtttgaaaaatctgcagctgatgggatcagctaggcccgggtggccgtttgaaagttgtaggcccgggtggccgtttgaaaagctgttggccgggtgccaaccttgttttaaattttcaagactgatacattgcacatactccgaccggacgagacgcactgtctcatccgtgtcgtttgaggagcactcacttagttgtttttagaaaagagttcaactaaaatcaattgcaaaaacaacagcctttccttgaagcctgcattaaacacttatttcccatggcttgctgagtactcccgtactcacccttgctctatataaataatcccccccagttgctgaagaagatgaagcggatcctgctgatgaggagttcttccaggagcaagccggctacgatgagttttagggtttcggcctagttctcaagtcgcgcctgtgttgtttggtcctagtcctggcttccgctttccttttgtaatgcagttgtgagctcgggatctgtccgcagcccaacatgactgtactcctactctataataaagagacctctgttgctgtgatattctgtcttcctgtgataccagcactgtttcctgggactggtatcgattaacaggttaatttggagcgtcacgggctagttccagttgggactagttcggggcgtgacagatatttttaattattaatagcttttttcattcttttcactttcgcagacttcctttaaatttcttttatttgatgcaaatgaactagcaacggatgtataccgcggaccgacggttgaagaagtttattgatggctatttttttaggtacccatttctagtcatgaattatgcgtaccgatagcacaactgggactagaaggggttgctaaccggccagtactattgtacacttctccagcagtacacatgcagcttagagatgctatttgacataggatattaggcctcttgagcaaaaagaatacaattattatatgggatctaatgtggatcactatttatcatctatgtaatcgatcaccctttagccttctttaattaaaggatgtaaaggacggtgtaacggtgtttatttatgcagatcgaaatccccaatgttgataattctatatattacatatgtacaaagagaacactacgacagaaacaatttttcctgtgtgggatggccagtagattgtaggcgggccataactactattgcctgccaaaattgctcccccgatgggtgcttcaagggtcgcagcgaaaatatattattgcatgcggtccattaagagaccagtctaaaaaatagacttatttcttaattcttaagaaggacctcttaagcggttgcatgggaaaatgcattattttcatggtgggctagagtgggaccgcacagctgcgggttcaacggcgacgacagcgattacgatagatccatagcttctctctcaattccatctgggtggcaccacgacagggatccaccgctgagcagcctcgcgatgggcaaatccactgctatcggccctttgaccggtagatccaggttgctgccgccatcagggtatggaggggcagtggagaaggttgtggaggcgcagggagaggtgaaggcggcctcagtgatggcagcggctacaacgacgacgagctgtggagactcggcgactgcgacagcaacgacgagctacaatgacaacgtcaccggtgaatgggagctagctagggttttggattttggtttttttatttttttcatgatttttctttttgcaggcagacgacataagcacccgttggcaaaaaatctaatttttgcatgcgagtgcaccacccacatggaaaaattatgatttttatagacacctccgggtatacggatggccaattactgcatgcaaaaattgggtttgggcgcatacaataatgtttttatagtgatatataaaaaccattaattacatcatacaaaactagtcaaaaagctgtggcattattaattttaattgttgcaaataaataaacgacctttgttgtatatatatcacaaagtgatcctattataagcagtacatacaaatgaattattggtttgttgattgagtcgatcatgtgtgcatagtggttcggacacccgaagttatatatatatagtcccgattatccaaaacataaaattgatatcctaaaaggtcaggcagtgactagagggatggcagatttatcagtactaggtccttttatatgacataagcgaatgagcctctctatctgagttagttaggtgactctagtagcactcctcgggtcctgggttcgactaccgtggagcgaatttcagactggggttaaaaaaattctctcgcctattccatgccaaagcacaggtctaaggccgtcgttggtcattctcacatgggctacagtaccgttgtataagggtgcaagggtaagggtttagggattttcactactagaaataatattttttcaggtggcccaaaaccattttcgtaggcgggggagaggaccgccgctaccatctcgcctgtgaaaatagactattttcgcaggcggacccatggcccgcctgcgaaaatcatctcagaaaaataaaaaaaaaacatggggcgccgccaccggcctcaccacggccgccgccggctagggctcccctcgtccactgtcgtcggcgccgccggcgtcatcgtcgcgtcaacgaggagagccggcggctggatgcgaaccgtcgtcgtcgcctgtcgtggccggcggcagagggggcgaggaggtgaagcggcgaggagggatagccggcggcgcgcgcacgtgggagaggagggagccgtcggcggaggtaatgagtcggcggcaaggagggagccggcggtgtcgcggtcgtcgtcgtcgtcgtggccggcggtgcgcggacgtgggagaggagggagccggcggtgcgcggatctggagcggagggagctgtcggcggcaaggagggagccggcggtgtcgcggtcgtcgtcgtcgttgaggagggaggcggcggcgcgcggacgtcgtcgtggagggagccggcggcgggcggacgtgggagaggagggagctagccggcgattttactaagtgtgtgtgtgagagagagagagatgagggggagggaaatgagtggtagagaggagaggataaggatggtggagaggataaggatgactgatttttttgtaggtactatttttgcaggcggaccatataaggtgcgcctgcgaaaaggcgcacattcgcaggcacaccttatatggtctgccaggcgtcgcttcaccccgatttatattttcataggcggtcatttggctccaaaagtcatatccgcctgtgaaaataagacccctacgttagggaaaatgctttttctagtagtgtttattgacctgcgtgacaagatcttctacatatgcgcatgatgctcaggagttgtcttagcctcttgcaggtcaagtttttttatatgtcataattaaatacattggaaaaaccagtagaaatacatctgagaaaaacatacagtacaagcaattggatgcatgtgctactcacaccacacatgtaagaacgtatgtacgtagctatagatcagtcttaatcaatttgaaattgtcactacattgttttacaatgattaaagcgcctgcatagaaaagtatgcgtgttgtttttggtttggaagtgccttttgttattttttgcttttgttgtacgttctttttcaacgtcactctcaactctcaaaggtgtgtaaacatcggaaatttttttttttaaaaaaattctatcatccaaaggttcagtaaagggttggctggcctgaaagcttcagaatacttgtaattaagttgagagaagagaaacagacggaatatattccagctggaattaatatggcagtagaagagtataactagttgcttagcgtcatcaattctcattttataggaataattcaacgaagaacatttgatttcgaacgatacttctgctttcaaggagtatttgacgttgattaattagtttaattgatttataaaaaacaattagtggtggtctgtgcatttgatttcgaacgatagttctgcttatcaaacatccaaccactactggagaagtgctcatctctcccggttcgcaaccacctttactcccgagtagcgaactgggagggagaatccgggataaaagatggcagtctttagtcccggtttaaatacccgggagtaaggatacagaaaacttctacatttatttcctagtatttgacgttgattagtttaattttaaggtaattaactagccttaaacaaagaaatgagggagtatatgaaattgtttgtctagacatttgtacactttactttactctataattttttttaaagaatttggcatagtagcatatataccattacatctattttagccacataataagaaaaaacaaaatcacaatttatatagatttttttaaatacttgctagttgttacaaagtctttttttcataatttttaattgactaaatttcacaaaactatacttaaaaaaactacatatataagaatgtgggtcataaaactacagaatttagcaccaaatttttcacaaactgtagatttaaggtatagtatcacaaaattatatattaaactctaattatatctgaaaactatagttttttaactaaaaaatagtagtgctatgatttgaaatctaaaatattactgtctttgataacttcttccctaaatctatagttttatagtacgatatcctacatatatggttatgatatatatatatatatatatatttaatgctaaatccattgttttattatacacatccttcatatgtagttttgtaatagtttaatctacgtgtttgaaattttctctttttaagttggccttgcttgggactcacatgtaaataaccagttttcattctgctagacgatcatatacttaagttctttcattagtgcttttattcctagaaagaaagatatcagcactaaccctttttctctggatgagctatacgtaatcttttggccactcggaaataattgaagtagacaaaagaaaaatataacaaagatggccatgatttaaagcgctctgattgttgacataacaactttaatgataatttgatctccttgacaagtggtttattttgatgctatccgttgactgtgcagatggctaattaaggtgaaagatgtcaccataatgtacatacattgaatagacaagctagggtctcctatataatatttgtatatatgacgaaatatgtgtggtaaaaattaattaattctcctctttaattcgcccctataattaaaaagttccatacatgccatatcaccaagactccttgaaagcattttcaagaccaagttgattaaatttggagctttatgttatttcacccgcctcagcacaaagaacagtgctagcggctacaatacattttaagaggttgtctgtccaaccatctctatcctattcaaatgtggtggaaagacacgtccatcatccagtccgagtgtgattaggatcctgtgccttgtgattgtattgtgggctgaaagggttgggtgaacgccctaaggctaactataggatatccctaattatcactggaggagaaaccatctttgctcggtcacccaaaattcacaatagtccctgttcgaatagaaaccgggactaaagatgatttttagtcccggttaaaaactttttgacctttattcccggttggtaatattaaccgggactaaagatcatttttagtcccggttcaaaaagttgtcgggtcgagttaggtcccagctcatttttagtcccggttggtataaacaaccgggactaaa

SEQ ID NO: 5188 - DNA, 22271 bp, Oryza sativa
caaccgggaccaaaaatcaactgagccgcgcgcgccagtccaccgtctctcccctctcattaattatcccttatcccttcgatcccaccgtcctctccatcccttcgctagctagcttatccctctcagcctcaacctcctccatccattctcctctcaccttcctcccccttctcttctcttcctcctcctcctcctaccacgtgaggccgagcggcagcggcagggaggcgggcagccgagcaggcggcaggcgaggccggcgaggcggcgggcggccgggcgggcgaggccggcgagggccgcgaggcggcgcgtggccgggcgggcgagtccggcgagggccgcctcggccgggcaggcgggcggcgaggcccgcgaggcggcgctccctgggcgggcggcgaggcggcgggcggcggtgctcccggtgcggcggcgctccccaggcggcggcggagcacaaggcggccggcgggaggacggtgaggcggcggacggccggcgcccgatctctgtgttgtggttttttttcctgatctgtgtgatatgtgcggccgatctatgcgatgtcgattttttttctgatatgtgtgatgtgtgatgtgtgaatgaatttgtggagatgtttttgtgattttgtgaatgatttgtgatgtatttggggattttgtgattgatttgtgatgtatttggggataaaaatgtagcttgatgtatttggggattttgcgaatgatctgtggtgttaaaatgattcgtggataatatgaatggtggtgctcgaaatcatgaaagcaggaaaaaaaagaaaaaaaaacattagtcctggttgttaattctaaccgggactaaatctttagtcccggtttttaacactaaccgggactaaagatccatctttagtcccagttattttaaccgggactaaaaatatgcatatttagtcccggattcgtagtctcggttgtataaccgggactatatgaggttgcgaaccggtattaaaaagggtttgtccaccagtgtatatttattcaatagccatcatcgtttagagtcaggtttgcttagattatttcttgcattgaatttttgccgctagttaggtttgtgaaacccaaacttcgaatactaaatcatttatctgcaaattgagttgcaatcttccttgttcttgcttatgttcttcgattcacatacagggattagccttcttggcgaggtcaatcaggcaacgcacggttgataactagatgagacgtggcactgcaattgcatggttcggatcgtgttgatcggaagccgattcttgtgtgtcaagtttccgctgaattgggaattatcaatatctatcgaaagaccgggacctagttcatcatcactaagggccacttctgcaattgaaatttgtacgcatatagaatatgagccaaaacaagaaatacacacagaaaatacagaaatacacaataacgtattgcaagaataatccagctcctgctcttttgctcatgctctggctggagcgctcctgcacttggtgattgctcttgcgagaaatcgtggagagtagtcagggttttttccactaggtctaggaccaccattgccagaactgaaaattagggtttccctcgcaccggttcttgtctccaccatgaggccaacactagggagggagggagggaaagagtgaggaagaaagtatgagcacggagagcaaataaggaagtgagaagctagaagccactacattattcatagaagtagaattctagaagcggttgtttaagccgaccacccaaaaatcaaggttattacgcattccaaaagtaattaacttttcatcaactaattaataacacatactacaaattaattacattactaaactaactacattaattataattaactactatactactcctgacatagtctcttcgctagtagctcgcctcccgaaggcgcgctggccaccatgcgggctgccatgcctaccacatgctcctctatgtgcctcccgtcacatcctcctctgtgccagtcacatctcctgccacttttttccttgttgttgatgtcctcctcctcatcagagtacaatggcactattgacctatcatcgaaaaaacgctcatcattggtgtttcatagttcttcctcagtggaagcgctagcagggggaggaagtagtccgacaatagctcagggagctcctcttcctcatcagtggtgttgtaacaaagttggtgcggcaagtccatcatggtcgaaggcatgcgagaaagaagaagagaagagtgcgatgagaaaaacccacccatattgccctctatttactgaatatgaggagaggggaggtgaggaggtggagtggtagtggatgatatgactggcgttcggcagctggcatggacgtctaggctactagtgtgatcaatgaagcgccagctcgatcggcttcctcgaggaagatgaaaggactagacatttttcagaaatagttttttaattataggcggtcccttaagacgaccgcatgtggaaatgtgttattttcagagacggtcatcctataagacgacttgtcagcttgtatatttggggcccatttatcagtgaccgataggatcctctgatgaaagattgaccacacatatatctcccacaagcttttaaagcctttacatgcatggacaccacgctcctcgagaccctgatcgagctaattgagcctcatcagccagcttatcctccttttgagctcatgcatgcacatatctgtgattgacagaaagcgtacgacgatggcgagatttgcacggcccatcttgtcccctttagcgcgcatttgctgctgtttggaccaatctgaattcatggagataagcgttatcacaatcgactcaagaaagtgtggctcaatccctgtaccatgcgccttatctttgttcctgccgtttgggccaaatgcatctaaaggtcattccttgataattagtcattttatgtgacgttacaccattgctccctcaagtgtgcactccattaaccaaagatgatttgccaaaagaggggtaatgagaggtacttatggggggtcctaatagcgtttggaaggagattagaggtgtgtttttgtgttttgccagggctactttgggttgctccttgcatcatttggttatccttgcatgcaccttttgttgtgccaaattatttttcaatatctttggcacattctctgccttatcttgttagctagtgtctagtgatgcatgcctcctgcagttgtcagcagcttcagagtatgtgtgttatgtgtatgaaaccctaaaccctccaatcatgatccaggatagaaaaaaatcttaatttgctgatgtctagctctactgtgcatcaaattgacccagaaaatgttgtatgctaggactaataaatttccacttctttcaaaaggaggactgaattatgtgttaggactaaatttgtagaattgtgccaaccaataaagattgttgtctttcagcatatactataataagcaaattgtgttatttgtcaattcaaatggagatatcattttcattcagaaattttgcttatccgtagttttttagcatactataataagcataacaatattgcctcaataatctcgaaaagatcaatatatagattggtcctaaagcatactaacgttgaatttgcaatcatccactaataatactgagcactacagcatcattgtggccatgcaagtggcaagtcaaatataatccatatatcagtctcaccatttcttttctttcacataatgtacatgtacagaccctatcaacattgacatatagatagttggcatatgatatgattaacgcagatttcaaggatgtacattgtgcgctatatcatcaacattatctctaaagagtaatacttgaaggcatacgcgtaggctacgatagtataaatcaaaattgttgtacagcataaaccaaaaaccatgcaagtattagataataaatcattaccactcaacaagctatgcagcagaagttagcgctaagaagccgaagaaacgtcgggacgtagtgcgcgtcaatatagagaaaatagtcgatcgcaacagctcgatcttctcctcctcaagtgttctcctcgccatgctcttacgctaatcagtaccacaaaccaacagcgcctaattcagaatggtttggccacaggtagagagctgcagagaagaaatattaaatagggagttcgatgcttatactgtaatcgggaggaatccctttttcaccggttctgggactgcccatttgctaggtggatttggcagaaattggaagagcatcgtggtgaggacattccacaaccgccagcggaatgcagaaacaataaaatcttatctgtttggctactggatcaattatcaatacagacacaagaagtctctttagtgctgttagttacaatctacattatgtggtcagcacggaatgatgcacggaatcaacagatcccagataacccagacaggacggtggagagaattttgttcctcctggaagagtgggcaagtctatttgaaaaatctgatcatactgtcctagtccgacaatgcactggaggttgccggaatcaggatggattaagctgaaatcggatgggggatttgctgcagatgaacagatgggaagtgggggagtgatagtgagaaatgatcggggtgagtttatgggtgcgaacaggattttcttcggggaagtgttaagtgcaactcatgctgaagcgttggcttgcctcgaagcgacgcgggtgggtgcaagacttgcagcaaccagagtagtcttcgaaacggactcagttgaagttgtgagtttggtcatgaataaaagttttgatcggtttgaaattgggcctgtaatccaggagctgaagaggggaatccagtcattccaggatttcaagctcatatgaacgaggagatcggcaaataaagtggcacaccgtttggctaaggaaagccttaacacacgtgcttcttctagctggatagtgtcagcaccggagtttttattttctctgttatcagaggactgtaatctggatgctgtaatttgagttttgcttgctttccactctcaaaaaaaaaaaataaattgcccttattcgtcatttagtctatcccaccatctcccttcgctgttcacatacaatccatccggtggcgtgaagatttcttctctgtcactaacgtgccacacctgagatacattcatatgatcaacatattgttaaccttcagtctgtacgatataacgagattctctacagtattacttgttatcctgcaaaatataataatatataatatgtggctctcacttgatctcgaggtattgtgtgcctctacagccaagtctccgactctatatccttttaacaccgtgactacttggctgtgttcttttggaggggtttccaacccctcctctccgcacggaaaacatagtgatagattaacacatgattaagagcaagtttaatagtatagctaactactagctccaattcatctatagccaatctaatagctcattcatacaatagttacatactacactattaatgcatagtcccacctgtcatacacacgctgcgtcttggagtacgtgctacagctggctacaaatctgtagcccgctgctcttctctctcctcatttatctctttaaaatatatttacagctggcttatagcctactattgtacctgctctaattaagtattagctataaaaactttgaaaaatgaattaatatgatttttaaagcaacttttctatataaacttttcacaaaacatataatgtttagcagtttgaaaagtgcgtacatgtaaaaaacgagagagatgggttgggaactcatgtgaaagacatatataccaacgagtggataaaccccagcccacccgtcattgtacacagcatcatcaaagggggtggccacatgaatttctccttgtgcgttcatgcgaggatcgatatgcatgccatacgtggcaacgcccagcacatgctatcagttctttattttgaataaatcctgtccatgatctttgtcttcatgagattatgtaataaataaaaccttgtaaactgcgatatataatatacatggacaggaaaaaataaggcatgcagtggcaaaaggtttccagcgtgtagtcactaccattaaaaaaagaaagagcatgaagtcactaacagcagcacagtgtgcactttcaatattgcaaagagaacagcattattatccttggttagtactgtacctgtcttaatttatttatgcaacctaactttttcaaggaacctttgtttgttttggaactcggctagcgtgtgattattcctccaaattaacacacactgaacagtacacgtatatttgctgatgtacatttaaaattaatatttaatcagtgggattttcaccttatagttaagtagcaataacagcgagtccccttgcatatatatgatggtgcagatgctgggattttactggcaaaggaaacataacttttattagcctctacatcatttgaaaatacacacagtcaatatttatatttatcaacataaggagttaaacttttgtgggtccatgactttaccatctcaccaatggccaggaacatttatcctaattataccttaaaaaaaagccccagtaacatgagtgcccccacctatatataattaaaatatgtttgttgatacataatttatagataagaagagtggtgcacagccacctggtaaatgataataatctttatccgaaggtacaaaatctaggatgcacctgatcaacaacaaaagatgtttatctttcttacgaggacagggtatatcagagtggatgaaccacttattattattgttataactgtcttaaggtttgcgcaatactataggtcacacgtctcatcacaccattaggtcctaaaataattcaacatcagaaaaaagaactccaagtaaaggagtcgttctaatttgtgcctctcagcctctggttaattaaatgccaaatgagcatgtaactaactagctagcttattcttctaatattcaggaatataatcaagataatcctagttgaaaattaaattaggatggcaacggatccggtcaggcacgggtagagcaaaaccatgcccgacttgttggcccatgttgcccacccgaatcctaccccgctagggttagcaggcaagactctatgcatgtacccatactcgatgggcatgagcatgcccgatggctacccgcgggtttcatatgcataataatttaataaagaaaaacaaaacaaataatttgccaaattattagttgtcaacaataatttagattgcatatcaagttattaccagctagcatcacaaatgagctaaaagaaagagatatgagaattaagtgatgggccaaaatcgactaatacatatgtttcggatcaggcatgagttaccaacgggtaaaatataaaacctggctgcttcccactatgtctccgggtctcgaacgggtatgcctacgggtaaaaagttacaccacgcctgtgctcatcaggttgggtatccgcggatacctggacccatggatatccctaaaattaatcaaagggggtgccctgcatcgaccccctgcaaattaaggtacttatagtagtaagaaatggatcgtggtacatacatctgtaatatatattaatatttatatatatgtgtttatgaacattgattcttgatatataattaagaactctaaaatacacattactttattccggccacgagcttaagaaatcaataagacacacacacacactatggttcctgagccaaagaatggttcagggttcatattcttgagcaatgaaaagtaatggtccacacgtgcatatctagagatctgtccgtgttagcttcttcttcaacttctctgtgtttgcaagggattatgagattattggtagatcataaagctgctatctgcataacttccacattttctcgtaattactattacgtaaaatctattcagagagttctcgtttttgtcttaactgaatatagagaaaacgtggagtctactacatcatactcgtactgtatgcatgcattttcttaatagacatgcatgtattttttcctcttcaaacaaaatttttctctcaaattatttatccgatctacaatccgattataccattgtgttcgttacaattaaatcttcataacaagatcttacatgattatattacgatcaaaaaatatttatatttataaattgcttttattatatatgtaagttacttttatcatatatataagttacttttagatttaactaaattacttcttagacatactacctccgtattttaatagatgacatcgttgactttttctcacatgtttgaccattcgtcttattcaaaaattttatacaaatgtataagatataaatcacacttaaagtactatgagtgataaaacaactcataacaaaataaattataattatgtaaattttttgaataagacgaatggtcaaacatatgagaaaaagtcaacagcatcatctattaaaaacggagggagtataaaagtaaattcaataaagtctaaaagtaatttacatatattataaaagtaacttaacacaaaacggaagtaactttatcacgacattagaagtaaattcgtgtagggataaaatatgactttttagttaattccataatttgtgctgattaatttaatttccagatagagttatgtttttatctctacaacggatttacttcaaatgataccttcgttttgttctaatttacttctataacatatatatatatatatatatatatatatatatatatatatatatatattacttttagacttactgaatttacttttatattttaagaagtaacttaatgaaatctagaagtaatttagacacatcataaaagtaaatttgtgatttttcatcaaaatataatcatgtgagatcttgttgtaaagatttaattgcaacgaacacaacagcgtaattggattataaatcggataagtaatttaataaaaacttctctaagaaggaaaaaaatacatagatattgagtgtactagtagttttttttttttggaaagaatggtgtctctctttagcactatccagctagcattctcgctgtagtgtccttttctgcagtagtcgtgtccttttctgcagttgttgaatatatatggtgttgatcgtgtgtaaaaagttccaaagatttaaaacgggctgatagactttccatgtatgtatatacgctagtagctaactaaagcagggcatcaattttgttgggagtaaacttttttttccctaaactcgcttcagacaaattatatagttttattaaatacaagctataaatcgtgtctcatttgtaattcatgatcaatgcatgagtcacttcagttgcatgtcttataacagagctaacacctcactactgcagataagcctataggtacactactgaaaaaaccatctttgctgagttgaccaaaaactatattaatcccagtttgagtaggaacaaggactaaagaatatctttagtcctggttcaaaaggccaggggtacgttttgatctttaattccggttcaaaatatggtaggcggtgtcagaccccttcactatctttagtcacggttagtaacaccaaccgggattaaagatctatttttagtctcggttgttaaacaaccggggactaaaaatcggccccgagcgccgtccactataccaggccgcctcttcgatcctcctcgagcgctataatcccaaggacgctcctcacctagcttcctcgatcctttatccaccttatctcctttctcctcttctcctccccctcattcactcacccccatctccacccctcttctcccctcttctcctccggtcccctcccctctcctccccattctcccctcccctccggctcccttccggcgggcagcagcgcctaggcggcatgcggcggtggcacaaagagccggccacgtggcaggtggccgggcggcggcggcggtggcagcctgtgcgaggggcggcagcctgcggcggtggtggcgcggggacggcgcgaggggcgcgagggcggcggtgggctcccctccgccggatccgggaggggaggcggccgggcggtggcaccagagcgagccggccgggccgcaaccggtggaatgcgggaggccagtggcggctgtggagttgatttgtaatgaatgatttgtagattatttttttgattttgggatgattttgtgattgatttgtggactgtggatgattgtgtatgatgtgtggatgatttttgtggatgattgtgtatgatgtgtggggatttgggtgtgatggagattgtggtcgaggtgcaaacagcataaaaaacaatgaaaataaaaagaaagaaaatcctttattccccgtatcggttattttaaccgggattaaagatgaatatctttagtcccggatttatagtcccggtttgtaacccagaattaaggggagttacaaaccatgactaaaaacccctttcccagtggtggtatcgattctgaaggatctataggtaccggttctggtaccggcactaatggcccaagtctaatagcagaggtacatagaacacctaggtaccaatgagtggttatagattatagctactccctctgtttcacaatataagtcattctaaaattttctacattcatatggttgttaatgaatctagatatataaatatgtctagattcattaacaactatatgaatgtgggaaatgctaaaatgacttatattgtgaaatggaggaagtagttcataaaaaccgacagttatatgatgtccataagtatcagttgatataagaaccgacaattatgacttgggagctatatgggggcgtcttcgttggcactgagaatgaacagctgccaatcaggagcaacgacgcgagcatggccttgccatcctcgactttgtcgtctggccgccagagcaagggcaaggagcgtgaggagtattgaggagatgccaactcgtcgtctattatgtttggccaagggagtgcgggcgacgcgacgcgttgctagtgtcggaaaccggagtgggggcgacggtgaccatatccattggtggggaggccgagagcatcgattgggatgtcgttgatccggatttgacacctcaccgagcggagtggagagagcgagggagagggaagagatggcccacagtggcgtggagatgaaatccctctcatccgggtggccggatatgccagccaggagggcgatgcccggtgccgcaatgatagctggagactgcagcggcggcatatgcgaggggaggaggtgagcatggcggcgcgctgaggaaggagggcgagggcgagggcaagcgcgagtgtgagggtgggggcgacgaggctagggtttgaattggtatgggccggcgaaatcctcactgtccattccggatccaacgatttcacgggcgcggaagggccaccacagtgggacacgtggatgaccatatcgaccctagagagagatcggacggttcacgatggatagcagctgggaccaatgcgtaattaactggaagttcggggacattttgcaaaatatttgccaacgtggcactttaattctcaagcattcccactgacgtttagagaggttaatattagtatcaatgttataaattggtaccaatacatggttatatgtaccggttttcaattttatactgaaaaaggtggaacaagctttacagaggccactctctatggggtgttttgtagtagggcctgtatacatgtcggagaccatggataaattcgtgtacatcacaaaattactaattaataaagtgcactcgctgaatgtgtataactacaactatgaacacactgtactagtcctcaagtaattttattttttctaatttaaatcatggaatgtgcgtacgaacacaaccatttcacacgcacgccacacacatatgggaatgtgttcggctcccaaactcatgctcaaatatagatgataaagttttccggtcaagtataattaactaaagctgaatgtgctccatcagtggttgatctagtttcagattggttgttgctcctttatagcaatttttttgttagttaattacttttgcaaaccagatcagtttagatatagttgtctatctcaccttttttttcctttgtacctaaatggcgcatacataaatcacctgccggccggctcgttctgtgcaaattaacaacaaaataagtaagtttacgtggcaacattctacaagccgcacttaattttttccataccggcgtacaccaccagcaacacatcctactggcattctcgccttataaatatattaactgatcaatcttgtaaacaattccgtacgacgatctctgtgaagcactgaacaaataatccacaaattaattaaagttgaacacgatgaaacgcaatctcgtctaatcggattcccctctttcaaataaagcgcaaaagtgcaaaaagcgaacataaaatttgattaaatgtctgaactttttgtcacgtaaactatctgaacataatgggtgtgcattctctgtggctcacgcctgagcttggtgctgccactgattgcttgaaacaattaacagtaaccggccggcttaattcgtgttctgttcatcattaggtcatgataagtactgtggcattgtatgctttcatggttgcttttgtgcttaatatagtatatcctttctgttcttttggaggtttgaactttgaacaaattagataaagttcacaaagtgtgtactttggcatgttaactgtaacacactgacaagaaagctatgtgatcgataaactttggtacaagattgtaagtatacgtggatggtacagggcagtttgctacaatttttttttttgttgaggaaattaaccaatcttatcttgacgatgtaccagatgtgcctttcacttgacacatttttattcggtttgcttggagctttttggcatcttggtgggaagttctactaactttagctgccctaattaataatgtgtgttaattaacaacgtaacattatgaagagcaatacacagaagaatttattaatatgaacagatctgtgagatcccatactcatgtaataatatgtatgatgacattatcgaaccatacatttgcttgtgataagatttttagggttcttttttcctgttgggaagctgaaaagtttttgcctgattgaccactatgcatcagatgccctttttgttaaggcttttgagttttgagcccctagctggtaaggcttcattataagatgttatgagatatgagaggcatctagccgtataggttatacatccagttcggtcatggatacaaatttaattagaacccataacgggtggcagttcatatgatggtttgcttaggtataattactttaattagtacttccacagtctctttgtagcttattaatctattcataactggcactactacgcataattgacatttcacggacaagaccccctccaaactctaggtggaccataattgcatccacatgtaaaaatatttaggcgaggttcggttaagtgcgggtgggcctcttaagactccagtttgcaaaaatatcctatttttataatcgggaatcttaagagatctgcctataaaaatccattttttaggtgggggtgtctctcttctacctgcgctccactcattttttccccgtgcgcccgcacttccccgcttcccctttttaatcaccctcctctctcccggcttactctatctctctcccacttattcctcctcatcgcctctaccctcctctctctcccacgacatcatgcagtgacgtacgatggcgtccttgcgtggcgacaacaaccatggtagcggcggctacagcctcgggtgatgaggacatcacacctttggatacacacgttactcctcaagttgttttgcaagatccaatcactagagctcgcgcccaacaataaatttacaggtgagctcgttcctatatacttctttatgtactcttgagaatagattactacctaatgacttaattatgattagaaactacggagaggaccatggagcaattggagagtggctgagagatagacaagatcatcatgggcgttcaagtcatgtcgatgtccaactcatgtcaagttcgagtgcacttcgggctaccagagcagttcacactaaaatcatcgtcgggttgcattcggactccgatttcgacgttatacatatatatggaaagctaacgagaccaactttggatctggtcccacgccaaattccttctgagtcaacgggaatcttcgaaataagaaggcattcagaatttgtccgggtgctgtgtcacatctttgagcctgttgggccgtgcgtcgtgtcggggtttaatagggacgtgtccaggggtctaaggtcgaccctagaacctatatattcggtagtcgtcattgtgttagggttgggttttgcttagattatttctgccattgcagtttcgtcgctagtttggtatatgtaaccccaaattcaagtgcttaatcatttatatgcaattgagttgggatctaccttgttcatacttgtgtactttgattcgcatgcagggattagccttcttgtgaggtcaaccatgcagcgcagggttgataaccagatgagacgtggtgttgcgattgtaaggttcagatcgtgttgatcggaagttggatcacgtgtgtcaagttttcaccaaatcgagagttatcgatacctatcggaagatcgggacctagtttccttatcatcgggaccgacggatccaccgttggtgggctcgggaagggcggatccacctccaatagtctcgggagcagcagatccaccctcgtgcgttgtggagatgaggtagaagggcagcacggcgaccaaggaactgggagtgaaggccacaaccacggcagtgaccggcgggctcgataatggcggatccaccctcgtgtgcagcggagatgaggcagaagggcggcgcagtgaccacgacaccgggagcgaagaccatggccacggtggcgccgtgtggtctcaggaatggcagatccgccctcgcacgccgtatagaggatgtggaggactgggatcggcgaccacaaccattgcagtggcgggctcacaggctacgtttgcggtacctgatggcggcggccttacaatgatctacggttttggatttcttttctttttttatttttttaaatcgttgtagtcaggggtccttaattgaccgcttacaatgatccggtctttgcaagcggcttccttaggatgcccgtctgcgaaaatagtttttttgcatgtggttgtggtgcctgcatgataaaatgcggattttcacatacacctgactccagacacaggtgctccactagcctacaaaaactagttttggctgcatgtgaagatcatttatgtagtagtgtggagttgaaagttgtggtacgtagaatccaaatatgagggttagttttttaaaataaaaaaataaaatcagaaataataagggaacaattaaagttgtttggtagaatccagggtgtcatttatccaactaggggcccagttatacagagagtccttctgaagcccaattactacagagaatcctgctcaagcccaattaggtctacccagcttggtctgaagcaaaacaaaataagtccaattagactccctcaaatatactccaatccaattcatatccctaaacaacaatacctgatattttgacccctcaactatgaaaacgggtgtaatttgactccttcagtagttttggtgagtggttttgctgatgtggcactttgacttgatctaacatgttgagtcatcgtacgggacccacatgtcatcgtccccctatttcccttatttctatctccttcctcttcctctttgtcccccttggctcggctcgttcctcttctacacaatggcggtgacgggacaacgaggggagcggtgcggtggcagctgggtggtggtagaggggcggcggccggcgggaccatggaatgcatgaagctcaagctcgacaaggtctgtgttctctcccccaccgttgcgccgatgccgtgtaggagctcggcggaatcggccaacccaccgcccctgaggagggggagatcgaggacgacgacgatggggtccgtgaaatcatctattcatgaaagagagggacaaaaaggcagacgacggagggtggcagaatgtcacgccccgaactagccccgaatggaactagcccgtgacgctccaaattaacctattaatcgataccagtcccaggaaacagtgctggtatcacaggaagacataatatcacaacaacagcggtctctttattgcagagtaggagtacagtcatgttgggctgcggacagatcccgagctcacaactgcattacaaaaggggaaagcggaagccaagacttggaccaatcatcacaggcgcgacttgggaactaggcccaaaccctaaaactcatcgtagccgacttgctcctggaagaactcctcgtcagcgggatccacatcatcttcttcagcaactgggggggattatttatatagagtaagggtgagtacaggagtattcagcaagccatgggaaataagtgtttaatgcaggcttcaacgggaaggctgttgtttttgcaattgattttatttaaactcttttctgaaacaactaagtgagtgcttctcaaacgatgcggatgagacagtgcgtctcgtctggtcggagtatgtgcaatgtatcagtcttttgatttgatcaaggttggcacccggccaacagctttcaaacggccacccgggcctggctgatcccatcagccgcaaattttccaaacatcgaacccaatccacagcagcaaatttcacaaagcagtagtcaaacaaaactacgctaggaatcacctcacatccacccatgaccgtgggcacggctgttcgaacagtttgttaacctctgcagagggggttcactttacccacacgacattactaacccgaatcacccagcccgtgtagaacggccacgtctggtgacctaagggctttcatgacaaggcatttcgagagcagacacagggttgccatatgccgacgagaggggtcccagaccaacaacaggttaggtcccagaccatactgtgccaggaagcccgggggttctccccgacaccaccccgttgaatctacatgtctctcggcatcaaggctcccccgcttagcaatttactcagccaggggtgtcccattccacctatgtggtcgcacttgtcttatgttcggatgaaattccaaggaaacggtccttaagtgcaagagcgggaaatcgtacacccggtacgttccccggtcggcgattttggaaattcatttagttcgcaagcaccgacccaggtgttgggttttccaagacttttgtaaaacccaagttttaccgaagatgttccttagattttaagtttgaaggcgaccgtcgatactcgtgcagagtgcatgaataccgaggctcaactaggtggttacaggggaatatggtataacaattaacaatggatggatcagatgcaacaagttaggtaggcccaccggtctgccttgcagacggggcaaacagattaagtgtaatcctatcaatgcataatattttgcaagcaatataattaagttcaaatataggctcaatatgttcaaaggtggcttgccttgctcgagatcttgagcttgatcctcgaaatcctcgcactgcgggtcttcgggctccgaaactacacgcgaaacgggacaactcaacaaacggcgaaaataaagccctattattgacctctaggcgtgccattagatagatctcgagatttgaggagttttggaagttaaacggagtcaaacggtctttcggttgggaagatattgaatttccaagtttattggatttttggtctaaaggaaaaggatttatttaaattcctttttgaaaaagaaaagaaaagaaaagaaggagggagggaaattagactttcctcgggcggctagggcgcagcccgagagaaaggggctgctcggccaaacttaacgggccggccggccagagaaggcggcccaaagcgcgcgcgcgggcggggaggagagaggaagccggtgggccgggtccatctcgcgtggtcccgggtgggacccgcttgtcggcggctcggctcaccgtgagcgaggtgcacacggggcgtgctagggtttggggaggggaggcgcggcgcatgcgcgcggtttgcgtaggacgcggtgcggcgggcccacgcgcagcctcacggctcgcggtggaccgcgcgcgcgagcagggccggagggagcggccgaccggggtcggctcgacccggtcgcggccgaggtggcaccgacgtggcgccttcgtggtagccacgtgggccggcgagaggaagacaaaggcgtcggccgcgaatggacggcgggcggcggcggtttctccgggacgccgtgcgacgacgaggggcgacggggtgtacaccggaatgacgagggagaacgagagggagcgagccaacggcttggattcgccggagggagttcgtcggcggcggattgcggcggcggcaaccggcggcgagaaaagggggaaacggcgacgaggtcacgaggggctgatttccggcggtgagagcatctacgcggctacgggaatccatcccttgcgccggattaggaggaaacacaccgagggagaccggcgacgagatacgcttccgagctcgggcggcgacggcggcgagcacgcggcgagtgacggcagcagtcggggcggtgccagctagctactggggtactacacatgctgctaaccgagtctaaggggaggagatgaatcgaggagggagaacggggagttgcactaccgagacgaggcggagcgctgtgacgagaggccgacggcacgggagtgatctctccggcctcgggccggggaagaggaagaaggcgagcgcccggagtccccttctgtgtcctagcgcgcaccggctccttcggcacacgtggcagcggcggtcagcgagacagaggggacggcaatggcgcggtggagcaagggcaaaagggagagggaaaggaaggggggagcttgggtttatatgggcgacaatgtcggtttgggagaggggaaccgacattggacggtcaagccagcgagctggcgctttggctagcggccaaaacggcgacagggaggaggggaattacgccggcgggagagaaaagggaaaaaggaggagagaaagggggcttgccccttgcctctttgggaaaagaaggagggagagagggcgacgcggcagagggaggaggagctctgcctccgtcccttggaggctagcgcgcggagtggcggggccgggttgtgacgacggcgatgacggcggaggcggtgtggagcggagcggcgatatgggcagcaggcgcggacaggcgcggcagaggctgacggcggcggcgaccaggcggtcggccaccacggcgtgcgcgcgggggaagcaacgggcggcgcggcgatttgggcggcgtcggcgggaagcggcagcgagggcggagggcgctcggctcggcgcggctcacgcgcgcgcgcgcggcgcacgggtagagcgggggagagagggagagagagagatggggagggagggagagatgggccgagaggaattcggcccatcgaacctgaggggtgcaaaatagacttttgtggagggatttgaactcgggatttgaacttgacgatagatcagggatttgagatccggaatggcacggagactgactgcaagcgaagaaacaattttcgcaattagggtttttagaaattacatttttccgctaggcgccacgacggaatgggcgctacacagaagaaaatgcaaaggtgaaaaaaacggcgcaaggaagaagccggcgagagactgccgccaccgctgggtcatggtgtccacctccctgctccccatgtgggcgcacctttgctccatgccgccgcagtagctcggagccagtgccgcctgggagaattaggtgagggccagcctctgcgtgcctcaggcggtgctatcccccgcggaagtcgcggcggtgatgaaatccgcttttgctgctccagatctgctgctatttgcttcttgcttgaaagccttgaaaaggacgaacgagcttgctgttgctagctcaaccctacaacaagctgctgctgctgcttgtttgcttgaggatgaagtgatgaactgaaccaaaagaatagaacgtcacccgctgcttcttgatacaacgctacagatcgatgaggcttgccctgggaagctgagaatggaggctcgaaagcttcagatatgtggagagcaaccacgatgatgacgaggctgcggcctcccctcacggcacgggtggtggagtcatcgtccctcagcccactgtattgaagtcgaatggggaagatgaaggagagagagaaatgggaaaaaagggaaggagtgtgagaatgacatgtgggtcccacaggatgacccagcgagatagacccggtcaaagcgccatgtcagcggacccatcctccaaaactgctgagggagttaaattataccagttgtaatatttgagggggtcaagatatccggtattgttgttacgggatatgaattagattagagatatatttaagatagtcaaagtggacttattccaagcaaaaacatccaaaacctgaacgtttcctctctagaaaaattatagaaaaccaaacctgcacattttctttctgaagaaaagagagaaaattgaagacctgcgaaaataacatcagcagtgttcaagagcatagtgttaggagaaattaatgcgaataataaataatcatgtgaaaactcacgaggttcgataaaccgaaggaaaataattacaagttggagggttttcatggtgagaacgcagaactcaacctcaactgctgtcacgaaacatcaattcacatgcaattacgatcattttgagagtgaaaagttcatgtttgctagctcaactattggcctaatataatgcatatccctcaacccaaaaccagattcaaagggtttcccaacgatcaaagctagatcattttgcctcacaacgtactcaccgtagccacgtgtgctcggcgaggaaggatgagagagctcagggcagcggtagaggcggcactaggtggggtgacaatagtggtagagaaggacagcatggagatggggtaaccatgagggcctgggttgcgggaacggtattgatgatcgattcacccttgccttgtcgaaatcagagtccaccacaacgttactgtttgcttgaccgtctttgggtctgacgatacagttgcagaagcacattgacaaggagcaatggaagaggatcggaggattcaccaacagcttgttgccgatgcacgatgtgttggtggcaccatgacacgaataacaccggcaggtggtcggagtttgcttgttcgagtttccctccggcgctgtcacacatgccgccaacttcctctttggaatagcctccttgccaggatctacaggccgctacctgacggctgatcatgggtgaaagaagagggaaatgagccactagttccctctacggctccgccatgtgctaccaccgcaactgtcaccctcccgctgaaggtgggagcgggagaagaggggagagagtagagagagagagaaggcgtgatgaagaagatgagatgggggaattacgtgtgtatcacatttttgttttatttatttatgagtgaactgcactttgtactagctgacttacgtttgttgcactttgaaccaccgactcatttctctagccatgcctatcctttactccagaaaatgtatggcctgctcataggtggacgatttcgctagcgtgctggagcca

SEQ ID NO: 5189 - DNA, 1503 bp, Oryza sativa
cctaggacgtggtcgagtggaggtagtgccttcacccgtagggcgagctccatctgctgctgatcctgatagtcctgcctccgccgcacttggtttctccttgtctttaggacaatgcttgtaggtgtgcccatgttcattgtatttgctgcaacgcttcaccctgccagcctccgactcgtacatattgttgcggatgcgacgagtcctcctccttccagccttgcctcggagcttcgatgggtcaggaatattgagtacttcatcgttagtctctgtgaactccccagctatgccgaacccataaatctcgccgctccatgtatgatatattgcttgcttactgaagtactgtgacacatatactgcatctggtatgccacactccgctgcggcagcaatgacatgggtgcatggcctgtggagcagcttcggctttgcacaagagcaatgacatgtgccgtcggcttttgagaacacactcatgcttcactctcttgcggtagatacccctgcctgccttatcttgacatagtatctcaaacctgtgcttgtgggtaccttgcactagagctcgatgtttcatagccttttacgcaactcctctagctttttctgcatgaaagctccaaacaaaatgctgttgttcggcatagagggaagaactgcctggaaccgatccctaaaatacctgcatgtcccatgtaaaatgaactccactatgccaactagtggcagtccacggacaccgcgcatcacccagttgtaaacttctgccaaatttgttgtcattattccatatctagcaccacctgtgtcatacgccttggcccatttctcttttggttcatgcagaatccactgagaaaatttccgaatctccattccagttcttctaaccaatgttggactatccgttgggagagattcaagagcttgaggagggtcagcaacggcggtcgatggagccgctgcacgctgatcactgcatttagctgtcaactcatctaatctcttccaaagctcattgaattttttctcctggttctgattgcacagcctcttgaacatgttcatgagctccttgttcttgaattgcttgaagaaattagctcccatatgacgcatgcaccacctactctgtacatcttcccaaacaccggggtatcctcgttccatactcccaaactgcaactctcctatcgctcgcagaatgccagcgtgcctatcatgtatcaggcatacatttggcctcataccaacaacttttgttttaaccaatttcaggaaccagtaccagctgtcggtattctcactctcaacaaaagcaaatgccaagggcaatacctgattgttcccatctacccctattgctgttagtatctggccccgatactttcctgcaagaatgtcccatcaatgcagagaacaggacgacagttcacgaatgccatcttgcatgcatgtagagctaagaacgccctttacagcacactcttgcca

SEQ ID NO: 5190 - DNA, 41566 bp, Oryza sativa
  unsure (1)..(41566): unsure at all n locations
gccgccgccgccgcctagcctcgcctactccgccgcaccccgccgccgctcgccgcctcatcccccgccgctcgcctccaccgccgccgccgctccctgtcgcccgcctgcctccgtgtgcgtgagtgagaagagagtgagagaagagggagataagagagagaggggaatagttggataggagtatgacaagtgggttccatatttttttaataaataaaatactgactggactaccagcgtatgccacatagaccaaaaccaccgcggattaggtcgaggggggtaattcgtctgatttacatagttcggggtgaagaatatccagttttatggttcagggaggtaattcagacgaccgctatagttcggggggtgattcgtactttttccaaaaaataaataataattaccgatcgattaattcattcttatttaattgtggtattggttggtctcaatctacccattgactgttcatgcagtagtgactgcagatctgtggttatgtttccaactgttcatgataagaacaaacacagttgctgggattaatacacagacaaagtggccacaatctttgtgtttgttcttcatgtatcctaacaaaactgaggttcttttacatggttcaattatgtgtaagattttacttgcgaacgagtaaattagaggttaattaagaagagatgatttatgcttacaagtcgtcgagaaccttggaggcgacgaggaggcaggcgaggaggaggcggtggacgttgcgggaggcgacggcggcggcggggcggcggtgcgccgccatgtcgacgtacgcgtacgccaccacgtagcactccggctccagcccggcgtaccggtgcacgcgctccagatactgcgccacgccgatgcgcggcgccggcgcgcccctcgccgcctcgaacgccgccatccctgctcctagccccgccgccgcctcccctccgccgctcagcgcctccaccgcgtcgttccgcgccaccagccgctgcacggcgcgcgccaccatgtccagctccggcggcggcggagccgacgccgtcgccttctgccgcgacatctcgccgcccgctgccgcggcggcgtccatggccatgcacggcatcgacagcgtggagtggcgcgcgttagctcaagctgtagccctgtagctgattcggcttggcgcttttttttttcctctttttggttggcgggggattaaccgcgggaacggacggtggatgatgcggcggcggtggggccgtggccgtccgatgaagctgtctctcttcgattttaggaacggaattttctgtttcgcgattcagacaacaccagaatggactgttcaacccttatttccgattttgtcggcattccgtgccaaaatcgtgatccgaaatggttttttaggagtggtggacaggatgctcatcctctcccactcaccgctctttgctgtccataattttagcacagtttatcgttaaaaaatatacaacttttaaagcgataaactttaagaaaaaatatgtatatttagtttattgatgtcatattattctcatgtttttttttcatccgttcgtcatcgccacttactgaattctaccgtaatttttccccttaaaaattgcacacttggacacttggttcatttaagtccccctctcatgctctaattacgcgttcaccgctgactgaaatttgggttactagaaggattttgctcacaaacttttgactcttctatcagtcaagaaaaaggaaaacctttcactctacttgttaggcatgcggcatcaaagttttcttggtcagttttggacttgtggttggggctgcacggcctaatcaaagtgtgatccaaatgatggttttatgccatcatgggccagtggtgtcactataaattcaggcctgataagcactagtgttctgaatatcttcagagttcagaggtgaatacccaaaatattcagaaatcagtagtcatgagtttatacttttcagctggaacgaatttgctattgctcgagcaccgaatgtaggatcaactacttcacaatctccagaactccagaagaagtttatcactgaacacagttcatggacaaactacccggtaatccgaagaacaacacctgcaaaaaaaagatgtgaaagatcacatgtcaggttgtcttctccacaccgctttagctcacatggctggagaagcgagcatgtcaacttgggaagtgtgctaatgactccatgaaattaaaagatcggaacggtggggacgaagtaattaagcagatggggggctggtgctttctgacctccggaattcatgtctgaattctgaaaacacaccggacaaatgctccggtctgaaagatgacagccgttttttctctgttccttcctcctcgcttttattatggctttctgcaggatggtgcaggtgactgttggctcaattctggagaacgcttttcttggccattcactggcctgaaactctggatgatttgattggattgacatgatgcattgtatcatatgatggcctacatgctaccttgaactcctcaattgatcagagagaatcagttgcatttgcaaaattctgcaatcttctcatttcaggcttcagagatgctatgggctgcagttgcagtatcctggcatcaccaacctgacggtccttaatcgtagaattattgaaaatcttcactttatctgcataaaagaggtgacatgtagggacacggacaggcatagatcactcgctcgctaccttcctttggcataggttaagttaataatcattgtgattctctgcgatttattctctgcttgaagagttgggtgagtgagaataataaactttgatgttctggccgtgcagatctctctccctttctcacgtgccacggttgttcttggtcccatccaagaatgggctcccactgggaaggaaggaacaaaagttcagatctatgatctatcgatctgtgtttcctcacaacgacagtcacagtaagtcagtaaaaaaatactcaggtaattaattactgtcttaagctgtaaataatttttgtttacccggactgttctgttcctaatcatcatcgagaggaggagttggagatgatgttgtggatttcgaggcgagcagctttaccacgagatgaagcttcgtctagttatagccagcgatttgacagtatgcgaataatgtagagtgtgatgtgttgtaattgcttcaaaattaatttgctttttattgaaggtttcggttaacttttgtgcacactcgccagtgagagtttggagcgtagtaacatggtttggtgatcacttttttgtagggcagtactgagttaattataatatttagaaaaggattaccatgtggaaaagggattatggtacaaccaaactgtgatgagcagtaaggtgtgcaagcgtcggttcggtctactgatgttacaacagcaaacgaggaaaaatcatggccaatcgcttgactaaagttggagagaattaaaacaggagaggaaaacacaaagcttaagacaatagaggagagaacaatgctgtgttctttcgagagagttaccaactcatttttcacgtgcacgattttcaaattactaaacgatgtatttttttaaaaaaagtttctatacgtaagttgcttacattaattcatatttcaaaacaataacaaatacttaattaatcatgttattttaaaaataagttaatatgatttttaaagcaacttacacgctcactatacttcaaattaaaactaattaaagttaaatggtcatgtcttaacatgtccagattttaacatgttttactgccttacacgtccactgtacttcaaattattaaaaccaataaaagttaaacacgggtattgatctcacgagcatcatttacaaaacaatgcgaatctgaacctgtcaaattactacagctttgcaaaaaacaaaacaaaagaaaaaaaaaagataaaaaaggcttaaggcgaaaggaagtctcagacctaaaagagggccccacattttctttcaccttctcttccattccacctctccatctcgccggaatctcacctccgatccggcggcggcgccgccaccgacaccgagaaggggcgtcccctccctccgccaccgcgcgcgcggcacgaagagccaccggagcattcaggggaggggcgttgtagaagcgcgggcggggggaaggcggggatggagtcgatcatagcgcgggcgctggagtacacgctcaagtactggctcaagtccttctcccgcgaccagttcaagctgcagggccgcaccgcgcagctctccaatctcggttgggatccgcttctccggttgaggatgccaatttggtcgcctccgggtgctaactttttttttgggcgtgatttgggtgatgcagatatcaatggcgacgcgttgcacgcgagcctggtgctgcctccgtcgctcgccgtcgagaccgcgcgagtcgggaagctccagatcacggtaatggcgggagccctgacccggtgcctttgtatatgtcagtgtgcttactcttcccggcttctccccctgaaggcttaaggggtgcatttagtgttagatttcttattgtttggtttccaaatttagatgattttcgggagagcattgttttgcactttacttgcgcctctgcgtggtagaaatctgtgatgaacttgtgatttcgctctcatgtgatagattatagctctgggtttgaaacgtttgtgtgggaggctaagtgaatgatgattaggaagcagctatttgtacctgtcttgacaatgccatgaaatttggactcccattaatttttatcatgtggccatacctgtgaaaaatctagagaaataaagctgcccttggtattccttgcgcatctggttattgcaagttttggttgggtggtgatctcaggtaaatttggaaaattaaaatctatactccattagcattgacctcaaagcttcaggcaattattgaatagccattgggtacttgcaacttttggtgataagcttatttcgtttccttgctacagcttccatcagtgtcaaatgtgcaagtagaaccaattgtggtgaacattgataagcttgacctcgttcttgttgagaaggacaattctgaagatctttcaagcactagcaggcaaattcattcttctggctctggtctcatatggttgaatgagcacagtcatttactgatttcagtcttctctgtcattttgttttggtttgcagtgctttatcgccatcaccagctaaaaacagcggatatggatatgctgataaggtttatttctttgaccttgatgttcaacgtaaacacattccaaacttttactctgtaaaaaattcaatatgctgtctaaaaataaaaattgtcacttccagttatccatgatggttgcatccaatgcacctattttgctatctgatttgataattcttctatattcttatgtgatcttgtctgatattctgaaaagcaattctctgctcttttattacaatatatacaattttgaaaaaaaatacgtgcagaaaattgaactatggatagggcttaatttgctataccgtggttagattgcagatggaatgacagtccaagtcggtattgtgaaccttctattagaaacacatggtggtccacgtcatcaaggaggcgcaacttggtattcatctttgtttgaatgatttttggccctttttcttatggcttagctccatatctcagttcttgttcatttctcttattaatatctgtttcatgatgtagcttttccctgcaatgtttttctgcaaacaggaacattcattccatctttccttttcaggtcaccaccgctagcggctatcacatttcgtgatcttgtactgtacactacaaatgaaaaatggcaggtactcttgcaaattagattagcattaaatatagtaaatgattgcacttcagtacctgattagaatgccttttatataggctgtaaatctgaaagaagcaagggatttttcgaacaataaaggattcatttatatttttaaggtttggtactctccttttctctccagaagattaatgtttatttatgttgctaactgttctattgacatttcttaaaaaaaaaactgttctattggaaacataatgaactgagaaatgctacacttgaaaggatttatgaccacacacatttcttctttcaaattcacagaaattggaatggcaatcactgtcagttgatctgttacctcatcctgacatgttcacggatgctcggtttaactcttctagcagtgaagatggaaaacgagatgatgatggtgcaaaacgaatgttttttggtggtgaaagatttttggaaggaatatctggggaggccaacgtgagtgcttttgaacttcaggacatatcatatggaactcgatgtttttcttttcagtttctcttgaacttccctctttgtgtgcttggcttacacattgctttgaacatcagatcacagtcaaacgaacagagcaaaacaatcctgttgggcttgaagttcagctgcatattactgaagctctctgtcctgccttaagtgaacctggtatttggttacttttcatgatgcttgatcccttccctttctgaatgctgtttgaagtggtatttgagcttgaatgctattttattcaggtttgcgggcttttcttcggttcatgaccggggtatctgtgtgcctaaacaggggtgatgtggatccaaaagctcaacaggtttgccttttccatcatgcattttaatcactgcattgcatgcagtacagaagtaggatgtttattggttttctttgtgtccttatttcttttctgcttttcttttttgaccagcttgcagaagctgcaggatcttccttggtatccattattgtagatcatatattcctctgcattaaggatgctggtatgtaccagctctggaaaacttcaaatatgctatgtttactattctattctgactttaaaccattttgtcaacagagtttcagcttgaatttctgatgcagtctttattcttctcacgggtaaatttctttaccttccaatttattgtactgatgtcatctgctgatgatatgattgatttaggttatgtaatttatcttattgtactgatgtcatgacaatcgtttttaaatttgttgaaggcaagtgttcccgatggggggatttcaagaaacttgtcttgcataaagattgccgggctctttctgaggtactatatgttactccctctgtaccctaatgtcgtgaccgagaaaaattaccttttcccaaacgctagtgtattaatccccgtctcaggaaaagccggggtacaccacacaaacatgatacaaaaggcacatctttattatatcaataatatttacattattacaaaggcactttaggcctgacaatcaaaaataaacagcagcggactagcgggcctacggctccatcttcacaggcgctcaactggggtataagccaggactccacctaggacatcttctccaaagcttctcttactgaaggggggaaagatagagcaaggatgagtacaactacagtactcaacaagccacaccgggagatgcacgattaatgcaagggggtacaaggggtaataatataggggttaagttttgcagtaaacagcatttaaaagacacttagttgctcaaagctattttgtaaagacgatcctagagatacacaatattattaatcaagaccgtgaacccacacgaacctgccttaacccaaggcgtacgatgattcagaccgaactggcaacccgacctgggtcccagctcgtcccaagccaatccgggccaaccattccacattttagttgttaagcaagttttaagaattaaaccactaacttgggtacattgctaggcttgcccataatcgagggcgcggctattcgaatagattatactctgatcagaggtgtacatctttacccacaagacacatctttactccgcattccatggccgtggaacccgtcataaagaatgtgacataacccctttacccatcctagccatgacaaaagcaccgacccaacctcgcctacggccagaatcccgggataggtaggctaggattgaacccctagcagcagaacaccggccctgtgccatgacatctcgactaccgagccgcagcccgtgtagccttcatttgccctagagatgtccatcgagccccgatttcgtccatctctatccgtgtcctcttgccaggactagactgagcaccgagttaagccttacccattagacatgtggttagtacagtagtgctttgcaatagaggcccgaagactggtccttacggtggccgaggtgctcctaggaaaaccatgcacctcgagcccaacctaaaaccattttgggaggtttgaatagaggggggaggtgtgtgttcggagacctccggaatgacagaagctacgcgaagcacacaagcaaagctacaaccctgtaaagaagcaataacaatacataaaaagaaagcacatggttctttaggttataacaaacattaagagacttgaacgggtcgattcggagttcgtatggccaaggcatggtcatccgaagtttaatgctgttatatggagatttgcggattattataattaagctttgcaactataaaacatgtgtaagctctagcctggaaaagacaagaaggctgcgctgctgacatgcggaccccacatgtcaacctaagggaccacggtggaccgggtacacagagacagtccacgggtcgacgaaagcggacctcgtgtgttaaccgaggcaagtggccgacaaacggactctactaagacaccacagtgggcatgcacactgatggaatatctcatctgtcggtgtctatccgaaagacagagggcaccactaagcnaacgngtccaccacacgcacacacgaacgactaccgacaccggtacacgggtactggggtcgacaaccacacaacgggcacggggcaacaccgaaaggacgaggacggagcaacgagaggagggagtgggccgggaaggagaggagggaggggcggcccgggagaaggaagggagggggagggagctggtccgaggggagaggaggcccgagagagaagggaaaagggagggaggagagaaagactttgggctgaactcggcccaaaggaggaaggaggattatttttagttttctttttaataaactttcttaattgttgttgttgcttaataaatatttccggtgctctgaaaattcaagtaaaaatttgagggctccttttagaccaaggagaatttaacaaaaattctccgggccacattcgaatttttcttgtacgtattttagtgtttgccaatttcttttcgaattttaattaattctattattccttttagagaatgatttttatttcgggatgaatttatcaggacgtgacacctaatataagggattttgacattttgcttgcactgtttgatcactcgtcttattcaaaaaattttggaattattatttattttatttgtgatttactttattatccaaagtactttaagcacaacttttcgttttttatatttgcacaaatttttttgaagaagacgagtggtcaaacgttatatgaaaatagtgaatattccttatattagggggcggaggtagtacgtgcatccttgagtcctttttactggagattatatgcacctggaagttcatcgtaattcacttgctcagttacaatacatactaaattcagtgcattttgttgatgcctataagtatcacatgcattaagcccaacagaatttagttgagtgcattgctaggttaccaaaagatgcatatggtgcaaaataggatacattcacagtttaacttttcgtaagtaagggaatttgtgttctacctgtgctagaatttttgtttgagctatcaaagcaattgaagaacctctgttcgatcctcatgtactgacatgttatttctccagggacacattttctcgtccaccatgcacattgatacagccctctatgcaatctgttccacaagaacctccacctgtgcctgactttggtaagactttatgatacctttgctgagataaatgaattggtcaagtctaacgcctcctattgaattgccaggtcaaaatttttgtcctcaaatccatccatttgagaatcagcaattggaattcacgtcaggaattcctttattttccctctattgtcttcagctcactccttccccattacctccaaagtttgcttcaaaaactgtcatcacatgtgaacctcttatggtgtgtctccttaacattgagagtgaagtaatgctcaccctttttttctgcttaactaaacaccgcccatactttctcattcctaggtaaccctccaggagcaatcctgcttaagaattgcctcattcttggctgatggagttgtggccaaccgcagtgccatattgcctgattcttcaatcaacagtatgtcattttatattaaagaatttgatctctctattccattagatgctgaggaaatcacgaggtacagtggaactaagaatgtttgcccgcaatcatcatttatgggggcaagacttcatgtggaaaatctatacttctgcgagtcaccatcagaaaagtgtctgttgctaaaccttgacaaagatccagcttgcttccttctctgggggtaccaacctgttgatgcaagtcagaggaagtgggctactcgagcttctcatctaagcctctcacttgaaacctctagcacttcgaatgaacagagaacagttaggggctcctctccaagtttgtggaaatgtgttgagctggatgacatccggtttgaggcagctatggttacagctgatggtagccctttgttgattgtgccacccccagagggtgttgtgaggattggtgttgcttttcaacagtttacaaccaatacttcagtagagcagttgttttttgtgttaggtctctacacttattttggccaggttggagaacggatttcaaaggttagcaaaggtaactgctctgcgacaaagacatcagctgacaaacgtgagagaaaactgcctagtgacacagcagtgagcttaactatgaatagtctccaactcaatttcttggaatctttatcatcaaatgacttacaattgcccctggttcagtttggtggtgaggatctgtacctgaaagtttctcatcgcactcttggtggtgcctttgcagttacaactaacttgacatggaaaactgtctcagttaattgtttggaaggagaaagtgctatatttggtgagaatggcactgcagttactggtgaacctaatattttgttgcatgaaaatgggcatcccaatatgagagctgtgttttgggttgaccaccggaataagaaccagtctaaagaagctcgatttattgacatagacatcactcacgtaatgccttatgacatgcgggacatggagtgccatagcttgagtgtatcagctaaggtatctggtgttcgtcttggtggtggaatgagttatactgaatctttgctgcatcgatttggtatccttgggcctgatggtggtccaggggaaggtctcttgaggactctgaaagatttatcctctggtccacttgcgaaactattctcgccatctcacctcaccgacaaggaaggtagtgaattttctgtctttgccatttaatttgttaattcatgctggaaattttgttggtaagcatgcatgttgattgcttctgctcagttgcgagatatttttgctgtttttccttgtattattcatggattcttccccgttccccttgaattgcagatggaatgcccaattccaaagacaatgactacaattcgaagtttgacctggaggtgccagatgatcttgatgtgtcaattgagctacgaaactggctcttcgcccttgaaggcacagaagaagtaggagattggttatcgcctcatggcagtgatcatatcagtagagaagagaaatgttggcataccacattcacgaatctacatgtgtcaggcagaagtagtgatcggcctggatctgcggagaaggtgattcacaaaagggcccttccaatagaacgttttacggtatgtagtggattattttcatacttttgcatttctatgtggcacttttattttttatccagttcaattctgagacactatgctgcacttgcaggctggaattgaaggtttacaggcaataaaaccttgcctgagagatcaactaattggaaatgcaacatcaaataatcttcaaacaggcagtgtttttgataacacaagtagcattggtgaccaaggtgtcgatgttgaagcgaccatggtcatttgcgaagatgagattgaaggtcccaagtggacaatggataatgtcaagttttctgtaaaagaaccggtatgaacatcttctgaatatttgtccaaacctctcggaaattaacaactgcttcctgaactagttctgtttgtttgactcggcagattgaggcagttgcaacaaaagaagaattagagcatctcaccatgctttgtagatctgaagctgatgcaatggggaggatcactgctggaattctccgtctccttaagcttgataagtctcttggccaggggactatagaacaactcaggaacctaggtatgtgttccctacatgtaccctgatttattttcttgtagatgccatgctaccctgtgttttggacttttccccttcttttgctcctttttggtttgctatgaatttttactagtaatacactgctatcagctactccttctgtttcgtattataagtcgtttgactttttctatagtcaaactttgttaagtttgaccaaatttatagaaaaaattagtttcaaatatcaaattagtttcattaaatctaacattgaatatattttgataatatgtttgttttgtgttgaaaatactattatatttttctataaacttggtcaaacttaaagaagtttgactatgaaaaaagttaaacgatttataatatgaaatagagtgttctttatctaactcctttgttgggtcattaaatgctgcaaagaggagatctagttacggttttttatgcccaagtcgaaaaaacaatcctagataagacaaaactgtctccaaatttttcatcgggggtttttgccttggtgtatactgtcaacaaatgccacctgggagttattttgatctgatgctttgtgcttcagcaaattatgcagcaatcactattatttggttatatgccattgcttttctttcttgtttatgttactgtatttttatattccctcgtacaatttatgctgttaaaactgattcttttttggaaaatgcttacctacttcattttctcaaaacaattttagattatcttatgaaattgtgatgtcccaggaagcggaggaatcgacaatactttttcacctaggaagttgagcaggcagaacagttttggcagcataggtactcctaggactcctaatctgcactcaactacagatgcaggaacgaaagagttactggaatcaacagttgcttcattacaaatcgaaatcttagaatccaaggccaaatgtacagccctcgtttcccaggcgagcggtgtggaggatcagaaatgcgccgaagacatcaggcaattgaatgacaagctagagagcatgcaatccttggtgacaaaattgagaactttgatctaagttgcacatagttttttgtgtataggttcgtgcagtccaaaacttggaagtggctaatgctgtacttcctcttcattattctttttgtgtacatctttatgttccttggggtgtatacaggtggattctggaataatgagctgacacgcagcaaatataaaattttgtagctggaatgtcacatgtagcactgtgttcaaaacttcaagtgcagtcattaggaataacatttttgtcatctgtatgtgactcatgtagtatcatatgcaaagttttgctgttgtcacatacaccatctttctactggtggactgggtgttttgcgaccaaaatatgtatacataaataattttcaaaaagaacatatgtactaccaatatactctctgttttatattgttttatattataagtcgttttgatttttatcttagttaaacttatttaagtttaaccaaatttgtaggaaaaaaatatagtagcattttcaacaccaaacatactatcaaaatatactaaatgctagatttaataaaactaatttagtcttttatatattactaaattttcttaaaaattaaatcaaacttaaaaagtttgtaaaaaagtcaaaacgacttatagtatgaaaaagaggagcaagtttttcctctgatatctcacttagtactaatatcagcagtgaacctttatttttgtcatgtttcaattttttgtatggatttatcccgtgcaaaaattttagtaatgagaacaagatatgaggggataaatttgtaacaaaaatatttgaagtacaataaacctattggacctagatatatgtttgtatataggtgtattttatcggcatactcaatatacacgaaggcaaatgggtcattttcatgcccctccatattggcaatgtgacatgtcctacatatgctaaattggcaatatgtaaagatttactcttcaatgacattttttgtaatttcatccaaaaagagtggcatctcaatagtctagttgtaaaaatcgaactgaaccaagggtttaaccaaataaaccaaaaccaatgcctagtccgaagatataactgacttgagaaaaatcatttaaacccagatggtttactacataaccgaaggaaaattggggtggcgtagggattgaaccccccacggtcaaggcccatgggttctttcacaaccttacataacccttaaatattttcataccaaaaatgtataaaaaatgaacgcatcgtattttagacctaaccctcaaattttctaatcaaaatagttgggctcgttgctacctctatttgcatacatgcgtgcgcacctgactatttaggttagttgctataatggttttagaaaacgaaacaaatatatattttatgttgattattaaaccaaaattctctcaataaaatatataattttattattttattattgaaccgatggttgaaccggtgaatcggtggattcattcaccggttcgaacaccggtcgggtttagagaggcaatccgccgccgccgcctgcgccgatccccatccgccccgcgagcgagcagaggcggcgctgccgctcgtcctgctgcttccgccgcatccacatccttcgccgccgccgccgccgcctgcgccgatccccccatccatcccgcgagcgagcatcctgctgcttccgccgcatcctggttagcacatcctctttcccatctctccctctctctttttttttatcgaatttgcgttaaccctagcttctgttgcagaaatttggcttaaccttgatgtttgtttgttcccaaaaagtttgggggtgttgaactgaaccccccatgccccatgttagatccgcccatgaatggatcatgattcactccaaaacactatggagcatcctgttcctggagaggagcatgaggaggataacagcatgaaagtggatgtggcatttgatggagtgcacagcccgttccggtacaggcacaagaaaaggtccaaggtttgggaggagtacaagcccatctttctgaatgggaaggttcagtttgcggagtgtctctactgccataatcgcctcagctgcaaagattccaacggcacaagccatctatggcggcatcagaaaatctgccctggcaaggaggaagcggcgcagaggcgacagaaggattcctacttcccatgcggtataccattcttgcctattctgggttcattcattactcaatagtgtagataagttaacattggtgtggtttaggatcttgagatgtagatattcctttataaaggcgatttacctcaggaatataaataacgtttccatattttatatgcacagttttggtgaatgagaacgatccagtttcaccccacgatccggtcaatgatgttattacagagacgcttagtgatataaactcggtaacacccagcggtaacagattcacgtcaaaggtgtggaaggagtttacacctgtctatattgaggggaaactccaggctgcagattgcattcactgccagaagcgcctcagtgcgaataagttcggggggagaagccatctgagtcgacatcttataacctgtgcaggacgacgtggacgtgagggggccaaattcatcagaagggtttattttatccttctagcgtgcctagtttgaagtccagggtgcaagatgagctctcacctgccttgacaaatgggaaggttcagatcgcagaatactctagcaagcttctgagggcaagtagctctggtgactcgacccctaagcccattcgagtggtaccagcagagcattccgtgccgactccagattatacaagcctgatgaaacagaggacctcatttgtgaccactccagctggtcaggaaacatctgatccagacctagtcgggatgatagctttgcatggttatcctttgtcaattgtggagcacgaagaaatgatgagatttgtaaagaaactcaaccctgtggtcaatttagtctctcgcaatgctatggaagaacattgcttgacactatttcagaaggaaaaggaaaatataaagggtaaaattgcacatttttcccgacgtgtctctctgtcagcaagcatctggactcctgatggacctgagacaacagtaaattacctctgtttgacagcacattatattgatgaagactggaaagttcataggataataataaaatttggaatgttttggtccgcgcctgctgatttggaaaggatgatacattgtatggaagcctgtgtcccagagtctgagagcggatcatataatgtcatattggatgccattagagattggaatcttgatcagaagcttttaagcttgacttctgttggtgaagttaggggtgacaccaatacttcattgctaaaggaaatgcttatagagaagaagtgccttcctattggagggacgctattcaatgttgcctgtgtggactatgtccttaacagtattgttttcaaagtgcaagcagatatacttcgtcttgttggtgacatagtaatggattttttagtgtcattgacccagcagcagcttctggaagttatttcacagacgggtctaaagtgtccacaagaagatgctaagtggtggcacaaactttattttagacttgaagtgcttttgcatttcaagaagtcatttccttctgaagaaagggtgtccccagaagatacaaaaactgctgagtccgtttgcaagattttgaggacaatttatcgtgtcattgaagttatttccagccctagctctccgacagcaaatatatattttaacgagatatggaaagtcaggacagttttgcaagaagaagcattaaatgatcacagagaaatagctacagtggctatggtgatgcaggaagcattcaatgagtattggcaaaattcatatttgtggttggccatacctgttgtgctagaccctagattcaaattcagtttcattgagtttcgtctgaaacgagcttttggaacagattcggcaagctacctatctgtaatacgtgaaacagtccgggaactcttcaatgaatactgccattctttgaatcaggcaagtgatgttgtttcaaacagtgaagctttgtgtgcagatgataatgattcgttggaagattgggatcagcatctccatgaacaagcaagtcgtcagctatcttcggagcttgatgattaccttgaagatggtttagttcctagaaaggatgattttgatattttaaactggtggatgactcatagtactaagtacccaacacttgcaactattgcacgggacatcttagccatgccagcatctgctgttcaatctgaagcagcattcagtagcagtggaccagtaattccaaagcaccagagtacattaaacatcagaacaatcgaggcacttgtttgtactcgagattggatgagataaaactggtaagattctataaattgctactcagctccatcctatctttgtgattttggtagtgtgaacacactgtgatttagtccatgttttcttattaccagaatcttgtttccttgttttcctgtattggaagtttggaaccatactatatgatcagatgaatgtcagaaaccaaagcctacaatgttagtaactttatatggaagtacatattagaatcttacatgttcatgtgcaatcttagcagctacatcactttaggatgttttagatcatgcttgtaatttgtaattgaaacattttgatcccattggcaatcatgaatatcttgttctgtgattgcatgctttggatcacttaataagtttgtgcgttatagtttgtgtccatataatcatgatgatatctcattaggaacttgattcctcacatctttttgctatatgctcttacatgacaaaagaaggtcgctgttgaaatttcacttattaaatcaatgcagttctggtatatcctcatccaatctattcatgtgcaattgcttgaaaaatggtatgctgcagtgaactgttgagatgggttgcatgcagctttcgccggtggaagatttcaggcagtgtatgatggtgcttctgaccaaggataaccgctctgatgatcgagccccaacatggtgtatcaagcatttgggagctgttaaacttcatttcagtcgagatgtgtatgcatataaatgttactcccatcaccccatgcatttgcctggtgtagtgcagatgtatgccgttgtttagccaaagttcaggtcagcccagagccttaggtcaagtaggaactaggagttgtacgacgagaatgttgcaaatatcctctgttatgagcaattaatctgtgttatgtgcagccttgtttacctgcttatctgaattgtttgagggtacgtaggcaatgcgtgttgctgtctggtcctaatggaccgaatttaggatgtggcccactattcagcactatcccgtaaaggtaaatgttgtttaaaggcccaacagctgaacagcataaccctcatagtttattagagaataaaaattaatttataggtaaaatttgtatatatgtgtttttataacaacttaaaaactaatactgaaaaaaaattatgttgaacatatttaaaaatcaacttcaaaattaaatttgaaaattcaaacttgacttttcatttagcttgcgatgggctctagcctctggctagcatagcatgccatgtctgggagggggctggcccattggtcagacacaactgagccttctttttacatgggccggaattgtaggcccatgtacacagcccacaaggctattttctgggcctctatcctcctccacgccggggagccttccgtcgatgaggctccccgacgcgctcctccgccgcatcgccgtcaggaatggatagttccaaaaacccatcgatttaccacatgttccattaatgtaaataattctacatgctaatgctaaaatttaatttctactcccttcgtatcatttgaagtgcagccataattttccacactcaactttaatcattcttcttatttaattttttttaaaaaaattaaaaacataagttatgaataaagtattattcatgttttattatctcataaaaaaataattatcatattttttttcaaataagacgaaatattaaaattgagcatgaaaactcataattgtacttaaaatgggacggaggagtagctaagtagctagctaaattaagctagaagaagtcgatgccgcatcgcttctgctggaactccggcagcagctggccgtcgggcccgaccacgacgtcgcaggtggcgtgcaccgggtgccagtgcgacccccagaacgccacgcgcacccgtatcctcgaccggaccttcaccgtgaacgccacgccgccgccgccgccgcccgccgcggcggcggcagcgtccctcgccatcatgtccgtggcggcgccggccggcacggcgacgccctcgaacccgaccgccgacgtgcccctcggcggctcgtacagcggcccgccggtgaggtccttcccgtcgacgaccacctcgccgtcgccgcggtactgcaccgacatgtacacccggccgaagaagaaggcgaggtcgtggttcgggttgtggatcgtcagctggccggagagcgccaccgggccgccgccggactggacgccggcggcggtgaacgcggcgacgtggaaccgcggccggtgggggcggacgacgaggtagacgacgaagaggagcacgccggcgacgaggaggagggagaggaaccacgagcagagaagcttggtgcagcgcgtcaggtgcggccgctccctcggcagcgggcgccggatgcggccgccggcgatgaagcccgcggtggccgtcggcggctgcgacgacatggcggcgtattatatatacgtgtgcggcggccggcgagcttcgacgacgatgggatggagctcgttggtgcagcaaagcatgggcggcaaagcatcgccggagaagatggaattcgggagaggttaaggaggtgtgtacgcgtgtacatacgtagaggttgcatggcaagttggtttttgggtttcttttgttgcgcgtacatgggcgattctttgaggagatagcaaggaacaaaaggggtagcagtggccggttttcttcgtgttttggttctctaatctcctacttattttatttgaaaactagcatggtggcccacgcatattgcgcggctagcatcattatattttctgtcatataatagcatatatgttttctcaatgtattattcaaatatattaaaatgactacataattttaaattttgtactacctttacaaaactactaatgtataatattcatattgtattttatatatgtgttagttattaattatttttaatatcaaattttagttatttgtaaattatattcctatatggactctaggctcttctttcaatattatttatttttaattctgaacttttattatttataattgtatttctatgtggactttaaactcatcttttaatattctttaatttttaatttcgaatttcaggtacttctaaattgtaatcttatattaactttagactcttcttcccatatttttttaatttcaaattttagttatttgtaaattgtatttttatacgaactctaaactctacttttaattttattatgtttattccgaattttagttagttttaaattcctatatggactctatactctacttctaatattccatattttttaattcctaatttctattattttcttaattgtatttttatatggactctatactctacttctaatattccttatttttaattccgaatttctattatttcctaattgtatttctatatagactctatactgtacttctaatatttcttatttttaattacgaaattatattatttctatatggactctatgctctacttctattccttttttaattctgaatttcagttatttcctaattgtatttctgtatggactctagtctcctcttctaatattccttatttttttaattccgaatttcaactatttctaaattatatttctatatggactctagtctccacttctaatattccttattttttaattccgaatttcaactatttctaaattatatttctatatggactctgccttttctttttcttcgattaatgtgagaatttctaggccatgagagcgaacgtggaggcttccttttctatttctttaataatataatagatttcatattagtaaaatatttgtgtttgattacatggaagctagtggcacggctaatcagggtttgcaattttgaaacaggggcttttgccggtggggctaaagaaccgaaatcaccgaaatttcggtatttttaggccgatttttttttgaaaatttgatgtactttggatgaatttgaataaacttttaccaaattcacaaaaaaaagagaaaaaaactgaaaatttcaggagatatatgtgcttgctggtgggggcgaaattaccgaaatttccaaaaattcgtcccgaaattgcaatcattgcagctaatagtgttttcaaagatcaactagtttacaaacatcgatggtaattcgtagtgcagatggccgcccaacctgcccgagagttgcctccatcatttgggatctaagtgcgctcgcctaacatacgtggagagaaatagagcccgacagtaaaatatatcactcaatttctattaaatactggaggtgtgcaataaggagtgttaagatttcgggcaactaaatttttcaaaaatttaaagcgggtttctcacccttggatgatatatatttcaatggctctcatcaatcctctattatttatttaaaaatgactcttctttcatagataaaagtttaaacaacattttttctaacataaacatgaaataaatttgcaattaatattacaaaattaccggaaaaaatgttcaaacttggataagcataaatcaaaaccatttacaaaaaaaaaatgtagttcaaatgaacttaaattacacgtagcactataattttaggcttagcaatgtacaattttgggtgaaaattttcagacagttcaaatctagcaaatacatgtttctatttcaattaaggccagtaaattaatactactatacaggtagatgtaaaagttctgttgttactgcagatgttgatagtatggcgcaaggctggaaagtgatgaagaagcgagacttaagtttgagaagttgaccgagtagatatgccaccgtatgtacacaccatgtggagctagcttaatgacttggtatgcttcttcccccctggctagggtcactccatgaatatccacttcacaaagtaaacttttctgaccaaatggccagcgagcatatttcggcctcaagtttcttctgcagccgacatgacttcttgcttgtcgatactgctataatgcagaatcataattagcccaattcgttttttgatttctccatttcaatcagtaacacttaacacccaaaatcatacagttgctggatagcggtacattacatcacagtacttatcaaacatgtaacaccgaaggcattacgcaacattttatttccttgaatgaagcaaatagtttactttgattgtacatcataatacaaacaaaggcataacaaaacatatttcacaataattctacatataccaaggaatatcaaacagctaacacttcagacaaatgcagttcagcggttgtatatatatttgcagcctaattcacaaaggcacagtgcttcctgatctccccctgggcgccggtgagcacctgcatgttccccatcttcaccatggacgccgcgaagtcggcgaagaactccgccgggtagccggcgacgccggcctggcggaggatgtagcccctggtgaaagggtcgagcatgagcgtctcgtcggaggtgaagagcgccctgcccctggcgatgtgcctgtagtagctggtgtcgaacgtcctgaagctccccgggtccatctccaccagcgtcgtcttgtcgccgggctggcacttgctcttcagcctcggcacgtagtacttgtccagcgtcgggtcggccatcatcatgccgctgaagttgtacagccggctggcgaaggatgaacaatgggaggttccaagagtgtgcccacctgtgaacaatgtgtcacttctcaaattgcatatgcacatttgtgatgagttcttggtaattaaacaagtttggattgcaattttgccatggttttgaatctctggctatagctgtttgagaagagtcttagccactatagctccattaagttcgctatagctgtttgagaaggtcaatcgctaaatatcttaacccgctatttaaaaccatgaattttgcaagtgcacaaatgagtatggtgctgaacaggaaacgatgttttgaccactcgaataaagagctatgctgtgtttgaggataaagtggtcttggtctcctggcttggttctgtactgtgccatgtgattagaactaagaaccacatagttttgtacttcccattttgttgacttggtatgcgcatatgataccttcctttattaacaagttgtatagtaattaaataagtgatcacctttattggagaatgctactgggatatatcgggatcagcagagtgtttaaaaggagcacaggcaacagaaccgagagttgcaactttcagtaagtacagtataaatcatctagggagctagtctatgaagattaaacattgaagttagtgaagaatagtatatacctagcagaaccacctgatcctttgcgtcaaggccctttgggatgaagaattgatacaagttccgcgtggcatcgaagaaggggggagggaggttgttcacagcatcatccttcactgatcttgtcccatccctccgcccagttggaacttcccagtgaggccctttggtctgttgcacaagggaagaatagggacttttctcaactatagttctagttactgtaagcagcaagaaatccaatagccacgtagaatatggtgaaaatcaaactgtgtggttttccactattgtcggcctaaaacagccaattctcaccacttagccaaactatactaacttttctaactaaagaatgaactaagattaatgaacatggaagctagttcttaccaagaagacaacatctctggctaccagagcaaggatatcagcacaggacacaactccagggcaggcttgctccagcttagctttgacacggtctattgtgccaaaacctcgcagactgaggtttggtattgattccttctcagatggtgatcctggtgtgctatccagaagtatagagccatcgcaaccctgcaaaacacatagaggcacatagcttagtaggataaactcaattcaaaatcaaaacagctcagagcatggtaagcagtatgcatacattcacaaaacaatcatggaaatgcatgcgaagtagagggcctgcgagacttggaactcgggatatgatcttggtcatctcatcacgaacaatgacctctgcttttggacatgtgtattggtaaaagccaatgtttagccctggtggattggataatactaaggagaactgtaggacaagagaaaggacaaatccgaagaggagtctgtaaggcatgttgtgcatgactactgtggaaccactgcctatgatgaaagagttgccttctatgattgttgaggcaaattataacttgcagcctgctttatagctcagttgcttaggttgtactatagtaaacaagtgacataaaccatttcccacagcttcattttatttttcctaatgcaacaagcagatggtctaagacttggagatcgagattttacaagccctatgagttgtgtgcatgtacttcaattgaagaatacgcaagtcttggatcaggcatctagatagtattacctggtaatattgcataattagttggtggtggtcatccttcgtggcttgtgcacttgtgagtaatacaggctcttgtattgatgaataggtcacgacatgttgctaaaaggtaatactctctagctgttctaattttttattttaaatattatatgggttgaatttattctggtaaagaagttcagaaggattcaaagatatgagataatatatcagtttatccgttgtcgtttgttccagaggaaattgtgtatgttcatgcaaagtggaaaagaaagaaaaacaatccatttcctgttttgttagtatttaagggaaccagggaatataatatggttgcctcgctatgacattatcactgctagtttctcttgggattgcatctgaacactaaaggaactgcccataataatttcttaactggcaccagtcagttaaagtaaataatatcaaagcaacaacccattgtttgatgaaatcaatcttcttcctttgaaattaagttgagaaaaaaaaaggttgcatgacagttgtgctcgtgtcaatgaagcaaatcaagggagaaaagttagaagagaatcaacatgatcactgctagctaattattgaatgccaaacgggtgcagaagcatctcaggcaatgtgcagatacttcattttgaagcaaaatttaggtttgatcaagcatataaacactctaagaaagatgagaacatgatgtgcaagttatggaaaaagattctctatgtttgaataaaaaatgcaagagtttgtgtaagtaaaccttcagtgaatccctatcatactgagaaaatcggtccattggtcagatattagttgcagcctttaagttaataaataactgctgggctcaagataaccttccgctgagctctccagagaataataataaaaaaaaggtgaaaacaagtcaggagtagtgaacagaaccaatggtggacaccatagtgcgtgggggtacagatgcacccctaaaacttgaaaaaacaccaaatatataggattacatgtacgtatacaatgtgcacttagataagaatcccaaagtgttaaaaattttgtatgtaatacatgtcaaactttatttttctttatttttttagattccattggtctttatagggcatattttaatttgaaaacaaaaattcaagattaaacattggccattgatttctcagaattatattcttaatagctataaagccaatattttgtgaacgcactttgaaatatgaatctatgggcacaaatttcacattaaatatatattaattatattaatttgattaattgctggtcaaaatatacataatttgacattttgaaatttaaagatgccctataaaaaatcaatgcaggttttttttttctgtctgttgtaatggaatcatggaattttctctatcaatattccatactatctactagtgcatcattacatcttcacccctattgtcaaaatcctgcaccacaggagataacaatggtttaagtgttcactaccacatggcttgggcaatgtattcaattactcttggagtaactgaaaagtgatgtcttttggttgttcaagaattcaagtctaagacattcacagcaggtaaagaaatttttagttgacctagctcaaaatgtgtgcttcactcaaacagcaagggagtgcaggacagttttgaccatgaagttgttcaacaatggtggacattgacaagttcgaccttttccataggaattaaacagtactccaatttttacctcatgacttgttcatgcacataagaaaaaaaatgccaacccctttagtcatgttcagcagcaactcacagtctagttaatacttaataaatgttttctacgatattcttataggacatcaaaattgcttttaaaagagaagggttaatatcccataattattctgtctaatcaacgttatgtgacttgcaaaaacacatctacagtcctaaacaattatgggactaattaagatttaaagcacagtaacaattcagaaaattatttatcaaggaaagtaacccacagaagtcagatgaacaaaaaacttacactgaacgaacatgatggcaggtgaatttgtgataggtcaataggtcatgagctattcactgtttaactgaacaggcagaaattggttaactctggagtctgaactctgaagtgtgttgcggcttgtcaaagtggcccagaatttgaggttcatctgatgcatctatcagtggctaaaaactgtgatacaaatttcttgcagtggaaaagtttctgtcatattcagatgacactgaaaccaacttcctttccatctgttgtttcatctattacttctctcgtcctctgtgcatcctcccatagactacattctgcatacatgtttgcaagaacagcatagtttacagaactcccaggatctatactaaaaaggttcttggctgcagtttctccaagaagcatgtttccatgcaatttacaggctccaagcattgcacccagcattgatgagttgggttttaagtttgtcttctggacaagtttccatgcatcttctaactggcctccacgagcaagaaggtcaatagcagagctgtaatgctcagctcttggatcaataccatacctgctcatcatggaagtaaagtactccatccctttgtttgtcaaaccacaatgaccacatgcagatagaagagaaaggaatgtcacatcgtttggcctaacaccatcttccaccatcctattaaaaagagtcacagcatcttctccagaaccgtttcttccacaggcagtaataagtgacgtccaagaaatcacattccgatagggcatttcatcaaaagcacgcttggcatctgaaaattctcctgcctttgcatacatatcaaccagagcattgtccaatgcaatatcacccataggctgcttcttgcacatatatgcatgaatttgtgtcccaaatcttgcagaagcaacgcttgcacaaaggcaaagcactgagcttaatagaacaccatcaatccataaacccttccgatgaattttacagaagagctccattgcatcttcactgtagtttctatccatggtgtacccactgatcagtgcggttgatgacacgagatctggttcagagatggaatcatatatcactcttgcgctgctcatactccgacattttgcgtaagagttgataagtgatccgatgacaaccttttcatcccagtaacccaatttgatgatgcaactgtgaattagctcaacattgacagcaacaccgactattccacatgcttttagagcacttccaagcgtgtaatggtcaggaatcatcgctgtcaattattttgatgtaaaaaaaagaaagcactttcaattttagtgccaataccatcagcaaaaactaccttgcaatttcatgctaggacataataggcagcatgattacaggaaaaatgctcaagattgttaaagcaaaaggagggacggcataccttctttcagcattgaagagaataatccaagcgcatcaccgtcatgcccgcgttccacaaaccccctgatcagggcattccaggacaccacatccttcttccccatctccgcgaacagctgccgcgcatcctccacggacccgcacctcaggtgcatgtccatgagggcgctctgcacgaacatgtcgcccgcaaacctccccttggcagcgcacgcgtgcacctgctccccgctcctggcgcacccggcccccgcgcacgcgctggccgcgctcccgtacgtgaactggttcggccgcgcgcccgacgcgcgcatgagcgcgaacagctccagcgcctcccgcgggcgcccgttcctggcgtagccggagaccatggccgtccaggacacgacgctcctgtgcggcattccatcgaacaccttgcgggcggcggcgacgtcgccgaaccgcgcgtagaagatgacgagcttggtgctcaggtgcaggtccggaggagaggcggacgcggcggcgaccctgccgtggacggacttgccttgccggaatgcgcaggagctgatgcagcactggagcagggaggagtataatggggcggtgggtttcgcccccattaggagcgccattcgcgcgcgcttttctccctcctcggagcaattttgatctcccgagactcaacaattcatgaattcatgaatttatggcagggtttggcaatccaataatatgagcacgaaacacaccaggagcaaaaatctgaatatatttagattcagttctactaaccggcagtagaaatgagcagctgcaaatatatttttcatgcaaaagggctagaaaactgaactatacaaagttggcttcaatccataaatccaataaaggccttctgaagaatcaaattcagtcataccaccatcagttatccatctagcacatgaaaatcaaagtgtgaaaaaaaaggtgattggataaattaaacgtaccgttatgattcaatagcatagaagaaagattaaatggagaagaagaaaaaatggagatgaagaaaaaattatgtgcttttgcagattggaaagcagacaaaagggaatgaccaaattttttaggctgaagagaagaagcagaaagagataggacagaggggacgacaccaaaaacagttgaactgcagccgcgcagggacgctggtcgctggagccggcgaaggagctccttggcggcggccatggcgccgacggacgtgggtggcagcggcggctggagtaggacgcgatggttgggattggggaatggccgaatgggccctcaaccatttttgggcccaaaccaattttttttcaattttgctatatctcactcgaaagattttttcttatctctcactcgattttctcacttaaatttacagtgcattttcttgtaagttacagtgtaatttatgaaacttacattgtaacttttgtaagttacactgtaatttttgaatcttcgcatgtaaattttaaattttgtattggatttggtctttttcttttttattggatttggtctttttctcgaggatatggtaatttagtgtccattatggtgtttcttaattactttttactttttattatatctatcggattttaattcaaagattaaaaatctgtgtgatacgatcatcaaaatctgtgtgatacgatcatcaaaatctttcgaaagatgtataggtactcccattttttttaggcaccaaaccgcaccagcccaattgtgaaatcaaccaacaccattagaattccaagcatcagaagccgtaaagactgaaatgcgcatgaaatcaacaaacataccaggatagataaccaaaccaacatcgacaccccaattccaagcatcagaaaccgtcaagcgcaaacagattgatcaacaggcacgcgcaacagtggccggttacgaccatgtgagcaatgcacaaacagaatctcatctcggatcaaacatctcagaaacattaacagaagtagaatgataatatcatcgattggtaccgatgcacagtgaagcaaattgtactagtatggataatagtatcaacacaacttagggactctaaaccagaacacaacacaaccatgacacgatgatatgacagacgagcggcataggtataatgaagtccaatgctgcaccacagcacacgctcagagaccaccacggaggcgcaggacaaggtgcagggtggactccttctggatgttatagtcggcaagggtgcggccatcctcgagctgcttgccggcgaagatgaggcgctgctggtctggagggatgccctccttatcctggatcttggccttcacgttgtcgatggtgtcagaggactcaacctccagagtgatggtcttgccagtgagggtcttcacgaagatctgcatacctccacgaaggcgcaggacaaggtgcagggtggactccttctggatgttgtaatctgcaagggtgcgaccatcctcaagctgcttgccagcgaagatgaggcgctgctggtctggtggaataccctccttgtcctggatcttggccttcacattgtcgatcgtgtcagacgactcaacctccagggtgatggtcttgccggtgagggtcttcacgaagatctgcatacctccacgaaggcggaggaccaagtgcaaggtggactccttctggatgttatagtcagcaagggtgcggccgtcctcaagctgcttgccagcgaagatgagccgctgctggtctggtggaataccctccttgtcctggatcttggccttcacattgtcgatcgtgtcagaggactcaacctccaaggtgatcgtcttgccagtaagggtcttcacaaagatctgcataccgccccggaggcgcaggacaaggtgcagggtggattccttttggatgttgtagtctgcaagggtgcggccatcctcgagctgcttcccagcaaagatgagacgctgctggtctggtgggattccctccttgtcctggatcttggccttcacattatcgatcgtgtcggaggactcgacctccagggtaatggtcttgccggtgagggtcttcacgaatatttgcatgcctccacgaaggcggaggacaaggtgcaaggtggactccttctggatgttataatccgcgagagtacgcccatcctcaagctgcttgccagcgaagataaggcgttgctggtccggagggatgccctccttgtcctgaatcttagccttcacattgtcaatcgtatcggagaactcaacctccaaggtgatggtcttgccagtgagggtcttaacgaatatctgcatctggaagaggcaagaaaggattggaattaacataggtaaaaaaaagcagctggagaataagttggcaccagatcctacgatatcggtactgtcagctcaaaatagatgaacatatcaatcacatcatactacactacaattggacagcatcattaatcataagagcgctgctcacagctcacaccacatcaacaagcaacaaccaaaaatatcttcagataataacaaaactgacataagtaactacaggacaacagatctatgtaagaacacagaataaagccacctagttctagcatctgacagatttgatttgcacgagtaaagcaaataaaacgggtaaaaaaacacagtacaacatcagcactacagttcaactaggcaaagagccagatacaatacagattaaattgaccttagaacccaagctctacagttcaagtaggtgtacacgatacagatgtaattctctaacccagctccacacaattccaatccaaatccaggggaaaaaaactaagaacacaattccaatccaaatccagaggaaataaactatgtgtcgcctaactcaacctaaagattttaacctaacgagctattcatctattggaacaatatcagaacaatcccatccgaactaagcacaaataagtaaaactaaatctgatcacaaaactcaaactatgtggcaggatcaaaacataactgtgaactactcttattatccatcattagggtaatatatcgaaacaatccccatctgacacatcattagggtaatatatcgaaacaatccccatctgacacatcattagggtaatatatcgaaacaatccccatctgacagaacaatctcaaaaccaatccatctattagatcgatataaataacacagatccctacctcgattctcacgaaaccctaaatcaatgagagattaagaggattaccctaaaatcgcacgaaaccgtaactcgattaagaggtggatcaccctaaaatcgcacgaaaccctgagagattgagactaactcgcacgggatcctcctacgctttccaccacgagcatcaaaatcgcgagattagacgggcaccacgagagattcgaggattaggacgaggtgattgattagttaccttgacgaggcgattagagaacgcaaagcttcgctccccctccccttcggtcgattcgactcgctatgcgattaatggagagaaaacctctctatataaagcgtgggcaaggcggtgcgaggcagcatccggtgcggtcaccgccacgcgtacggcccaatggcagcaccacacgtgtccatgtagttggaggcgcgacacgtgtccggtcccggtacgaccatccagacggtgcccggaaccaactccgcgtcaggtcatgccgcctctctttgacgaagtcggcatgcctgatcaagaccgtacgtttccgatccaacgatcaggaaacatcgtacttgatctgctataagctgcgtgtgggccttaataatcctctggggaaatatttgtgggctgaaatgaacgggatattgggcctagacaaaccagggcccatgaattttacggcccaatagattgttgagacctaattggctaagcccaactcgcgcactctgaccaaccgatcggaagttcgcgtccacgccgccctgctcctccgtcgccgccggctcggcggctgacccccgcgccgccgcaccagctgcgcgcgcgcgcgcgcgcgcccccaccaccgcggcctctccctcccacgcgcagagggcacgggcagaggccgccgcggcgccgtactcgccggcgcttcgtcggcctcggcctcgggtcgaggccggtggcggggcctcgtcagatcgccccccttcctgtgcagtaagtatttcccacggacccaatatggattcgttgttctaatcgatagctgctatcagagatgggttcttctgcgtgatttacctgttcttcacatcctctgtcgatatggggttgggtggggttcgtttcttgcgctaatgcaagatttgaacttgcaggcgtgctctgctgtgtgtgcgtgtgtgtggcaatggcgttgatgcggcggagagtcgggggctacatttgctcggagctgtgtggctcggttatgaatcagaggctgtactcttcgagggtggactggaagcagcttcggcctatgatcctcaagaggataaagaaccgggcaaaggagtatccaatcaagcgcatgattccagtagcggaggaggtagtcaaggctagagagattgtcaccaaaggtgtctcgacgctgcttcaagttgttcccatacattcatgcaagtaagggcgagaaatgtggaatttttatgtatttgtctgtttgtcttaacacttggggaagatagtatggctaaacaagtgttttatttgtagtagatcaacttcaatttaggcatgcactaaaaatgttccagaacatccagaaatggggcaacattacaagattaccagtcttctatagattaccgttgttattgtgtaccttgattgcatatagccatgattgcttttcttgccatgccaagttaagagcagctctctctgatgtgcatgtttgatatcattttcttgattcctgtcctaaaatattattgaatctttctaacaccttgtgtttctattctcactgaaggttttgtcccgaagttcatattggagctgtagggcatgagatgcaatcctgtcatggtttcaagcgtatgatcaagaaccagccgcataaatggggtccaggatgcttgaatgacatccttatccctgttgaatccttccacctggaaaacacgttccaggatgagataaaacatgaccagaggtttgatttccctcgtgtcccagcggtactcgagctctgccatcaggcaggtgcagatatacctgatgaagtttggcataggagtggcacgtcatctgcaatagtcagagaaaatgatgaaaaacctgctgcttttttgccagaagagcttagattcataggtcagaggacaatagaagcatgggaaaggcttagattaggtgtgacaaaactcctattggtttacccatccaaagtgtgtgagcgttgctctgaagtgcatgttgggctgtcagggcacaaggccagaatgtgtggggtattcaagttcgagggctggcgtggtaaacacaagtggaagaaagccgatgtggatgacctagttcctccaaagattgtttggcaccagcgacctcatgatccaccggttctggtcgacgctgggagagactattatggtcatgcacctgcggtcattgagctttgtatgcaagtgggcgcaagagcacccccaaaataccattgcatgatgaaggcgcaaggcctagcaccgccaattaaatgaggccaggggatctaaggagttgattgccaaattagatcagcaccatgatgttatacaggaattgtacagatcagacatcaaaagaccaatgcagagaaactccaaggttgcaaatgttgtgattttgcccaagacattagttctttgaagactgcatgttatcagaattcaggaggtcagaactaacacaattatttatacccattgatctgagtgagagccctcagatgataacaagggaaaattgtttctgtggacaacttcgtgcatggtaatttatcgactatcagcattgttaagtattcagagcgattactttgctgccctttcatttgttcatcctccatcatttgccaagaatacgggtggaagggctttatgagcctgctgtttggtcttcttctcctctgcttgactactgtaacatcattggtttctgctgttttgtgtaaactttctcacattacctagacatccttataggcagttctgttataagttagccatgtagagacgccttgttgcaagctgcaacatatggtgtggaacatcacagaggaatgtaatatcacttgctgtattgtaagccctagtcaaaatccctccttgaagctgtaatctgtgtacagatttttacctggggctccttttgctgtgccaataattacagccacgttggctgattttttttttctggagataaatgaatggatggtgaagtttttgttctttgtatttgaagttgaacattacctcgagtacttgaccccatatgttgctgatgttttttcagttcaagtaatcttgtctctctatgaatgcatcattctggaaattaaagattacttggttggtatttgatgcgtctaacctgttattaaattttctctgcaaaacgtgtcactcaattgtacttcttccgtttcaagttataagggaactgttcactttgatgcaaaaaaaaccttaccaaaatttggatgccaaaattttggcaacttaccaaaattttggcaggattttttatatagttaccaaaatttagcagcaaactaaatgtagccatttttttttgtaactttaccaaaatttggtaaggttgaaaatgacatcaaattgaataggcccaagatgtttttgattttggtcaaagtcaaagtattttaagtttaaccaaatttatagaaaaaaatagtaatatttataacaacagcatagtaattgaataaattttcataatatatttttcttggattaaaaatattattatattttttctataaaattagtctaatttaaaatagtttgactcgtaacctgaaatgtatggagtaccatgtaaacactttttaccgtatgtggccgtaacctggaaggaaacattagcagaatttgcaaccgacatgatttccttggctaccaatcttccttctgcgcgtgcaattttggtacttccgtcagttccgtgtcgccgacgtacccggatagaaaccgtgagagccaagtttggcagcggcgtacgaggaggattctactcgcgacctgggtagtggggaccgtagatgcgccgtcggacggccgagatcacgccacgtctaacaacttatccgacgtggactccacgtacgacttggactcctcggcttgaacctttcgcgtcccctcataaatacacgcgaggaggcgccccctgattcgtgcaatgcaaaaaacgaacgcgaagaacacgaatcctccggcgatctcgagcgcaacgatccccagagccaagaaacccgccgctgccgccgtgtcgccgtcgtcgaagttggcgagcagcaacaaggtcaccaaggtgtcgccgccgccgccgcagttgtccgcgctgtgggccgccgcctcgtcgtccgacgaggaggaggaggccgtcgccgtcgccgtcgccgtcgtcccagcgccgccgccgccgcagccggcgagcaagaagggaaagtacgtcaagggccgcgcggcgtccaagaacaagtaccttgtcccccgccgcggcgaggaggatcaggcggcggagggcggcgggaacagcggcagcaagttgatgtccggggcgccggaggagttcggcctgccggcggggacgttcgacgcgttcgcggacgcggagggggaggacgccgccgcggccgcggcgccggcggcgactacgtgcacgtccgcgtgcagcagcgcaatgggcggaagacgctgaccaccgtgcaggggatcggcggcgagtacaactacgccaaggtgctccgcgacctcaagcgggagctctgctgcaacggcaacgtggtggaggacaaggagctcggcaagatcatccagctgcagggcgaccaccgcaacagcgtctccgacttcctcgccaaggccggcatggtccgcaaggacaacatcaaggtccacggattctaagtccagagagatcgtatatcacttgggttttagtataggttcttaattatcagttttgattagtataggttctggttcagtttagcagtgtgtcgtgtctgccgtaatggcttgcagtcgtcaggttgatcatgttaagcctcatacttcttttccgtattggtgtcaatggatgattttaagtatatcttgtttgcttactgttctctgaatacgtacttatccttgtgatgctctgcactttgcaacttgtgacacagatgatttttactggtgacaaaaaaaaattaaatactgaaaatatcgctctgaacaaatttgttggtgatacaaacaagtcaataatttcagagatcagcgtagtcgaagtcgtcgtcaaaatcttcgtcgtactctatctcacttacgtggctatgataatgtggtattgagctccacgggctgtcgtcgagcacgctccggaatcggctccgtaggaacgtgacggcctcccatgccgccatctgcttcgcctcctgcaccgacgacccgacctgcgtgaaacgcaagcaatcgcggttgagaacgttgacactcacggttacggcatggtagtcggcggcgccatcatcatcggcctccgtggtcgtcgtcgacgtcgtacgacggcggcggcggctagcgctgtaatagtaggttggctctttggttgctcccatgccgttgatgacctcccatagcagcagcgtggctccgaactccgtcaccggcggtggcaccatgctggcttcgacgcccaggtagcgctagctgcagcatgatgcactcccatggcgacgacggcttatggggtttttgctggtatctacggaagcagctggtccgcatgtcgtacgattgcaccgaccgcaatgcccaggaggagctgatcaccggaccatcaccggcggcgacggtgaccaccatgttcctctcgtcgtcgacgtaccaaatctgattctcggtgatcttgccgccggcgccggacgacgtgacatcgaacgcttggcaagaagcgtcgccgatgaagagcgcgtggccacgcagcctggggattctcgtcagccgcgtcttctttcgccaggatccccacgtctcgagtcgtgctcctcgaccacgtacaccttgaatctagatgtgtggtagcgcgccgcggcgcggccgccaccggtgtcggggacgcgggctctgccgaagtctctggaaactactagaaccttccccatcgtgtggcaggcaaccaggtagaactcggtgcggccaaacgccggcgcctgcttgtcgacatgcgtccaccgccactggtcgctgggcaagtgcgagtagtgctcgatgtccgcgtcgtcgaaggcgaagatctcctccgcttcggtgacggcgtacagcttcccttccaagaacacgatgtcttggatgtagaacaccctgctaatgtccgaccaagcattatcatcatcatcgggatgatgtttcttcttcttcctccccgggaggtggcagacgaagatcttgcctagccgcgccacgaacctcgatcgggtcggcgcgggcgatcgcagctaccgtgatgccgccgccgccgtcgccgtcggcggcggcgggggatgcggacatgacgaccttggtgatggtctctgggttggtccacatcggcagcttcacggtcgccatggtgaaagggttgaggaggaagggctggtagggaggaggcgacgacgtgggcaccatcgccagccagttgtcgaacgagccccggcagacgacgtcggtggcgccgccgtggaggctgcagacgcggtggatggcggcgtcgtggaggctgacgcagtggccaggggccacgagccacgggacggcggggcgcgggtagtgcgaacgctcggcggctcgccatgctcggcacacggcggcgaagcggaggcggtctcccagggcggggagcctctgcaggacgtcgcggagcaggtcgtcggggaggtcacaccacaactgtcacgccccgagctagtcccgaccggaactaacccgtgacgctccaaactaacctgttaatcgataccagtcccaggaaacagtgctggtatcacagggagacagaatatcacagcaacagaagtctctttattatagagtagaagtacagtcatgttgggctgcggacagatcccgagctcacaactgcattacaaaaggaaagcggaagccaggacttggaccaaacaatcacaggcgcgacttgggaactaggccgaaaccctaaaactcatcgtagccggcttgctcctggaagaactcctcatcagcaggatctgcttcatcttcttcagcaactggggggggatatttatatagagcaagggtgagtacgggggtactcagcaagccatgggaattaagtgtttaatgcaagcttcaaggaaaggctgtttgtttttgcgattggttttatttgaactcttttctaaaagcaactaagtgagtgcttctcaaacgacacggatgaggcagtgcgtctcgtccggtcggagtatgtgcaatgtatcagtctttagattttgaaacaaggttggcacccggccaaaagctttttaaacggccacccgggccaacacctttcaaacggccacccgggccaacaacttttaaacggccacccgggcctagctgatcccatcagctgcaggttttccaaacatagaacccagtttctcaacagcaatttcacaagcagtagtcaaacaaaactacgctaggaatcacctcacatccgcccatgaccgtgggcacggctgttcgaacagtttgttaacctctgcagagggggtacactttacccacatgacattactaacccggatcatccagcccgtggggatcagccacgtcgggagacctc

SEQ ID NO: 5191 - DNA, 2966 bp, Oryza sativa
  unsure (1)..(2966): unsure at all n locations
aagtttataatatcattcttcattttgctactaaattgaatcttgaatttgctgatctttgcttgctgaagatgttaattcgtatccaccatacagaaatatctgcagttaggaacactgattatattgcattacacatgatgttatcgacaatggtggccaacactcccattgacattcttcatcactgcatgtttcccacatctaaggttaaagctaaagctatacagttgcttttgggagcaaatcctatgcacatgcgcctttttggaaaattgctcacggatattctgaaaaaagacacttctgttatgcaagtcgtgggttccgattctaatgcttcatggactcatgaggatagttttatacttttgttgcctgctgccttatcatacatagagcatcatagtgggggcaatagacagtgtgttgacttccttgagccagttccagtcttctatcgtgaaattcttttgagtgataatggctttccatgttggaaaagttttgttactagaagtatttttgaggaagattttagtgactttagacacacatcagttgaagatataatgaattatttcggtgacactctcttggggaagtcaataactatgctatgctattatttctattcgaaagagatacctcggaagcaacgattaaagataattgcttcaatttgcccacaatcatctgagctcttagattctgacatcagttttgttactcctgtttcatgcaacggtattatgaagcttactaatgagttatttgcaaagatatcactgattaggatgttgttatctcctcctagaggatcgttgaacaatgaaatagccccagagaaggagtccaagcgagtcaacaatgcaaagctgagttttataagcatattggtcagaacgttggataaaatattcaggaatttccctcatagtgatggcatcttactttcctctcctgaggaacaaaatgtcgtcagttgtttggagtatgcaatcctcaagaacattgttgagttgtcttcggaggttcagtcacatctgaaccagttgaagccaatacctttcctcaaccaattgatcagatcatccctcttacatagattcagtgatcctgttgtaataaaagcaatccgatgcataattgttgtattatctgaagggaagtttcctgctgatgaaattcttgaactcatactgggtcactcccattttgtgtcgacaataacctgcagtggagtttccgagtgcccatctgcttgtaatcccactgggggcctgcttcagccagcaccaagtattttaaaatcaggtgattctgcttttgcaaaagaaaacaagttccaagactgcattccagaaaagaagaaagtagaaatcatcaggttactcagggtactgtatgatattaagagtaggcaacataacagtagcctattggatgaatcaagggagcttggtttcttgcttttatctgtttatggtgcaactcttagtgaaacagatctagagatactttaccttatgaatgagatagagtcatctgaatgcaaagccattactgatgtggatcatctttggggaaaggcagctgtgaaatttagaaaaactgaagctaaattttcagcatttttttgggaaaattaacccggccctanctaaaaaaatagtggaaaaaagaatagncngngnaananaatattaaaaggtgataggcgaaggtcgctattccgcgagaacatacccattgattctaagctctgtgtcatgactgtcttacaattttgctataggagatcttcaagagcttctattttttcactggaacagcttcagcaagataattttggcgatattttcaaggtaatttgtgtcaattgaagttttgactccatttttgttctagattttttttttctttcagaataacactcctttatcttcctggtatatttgtctcccttgtgctcttaaaccacacttgtattggttgacaggcaacatctcaaagcatggatgcggttcggatttatgatcctgtgtttatcttgcacttctcaatccatactcttctgatgggctatattgaacctgttgaattttcccgactagggctacttgcaataacattagttagcatatcatctcccgatgaagacttaaggaagctgggttatgaatctctaggaacattcaaaaaatcattggaggtactgaacagctgctatttattgaatattgatatgatattttgtcatactggtttattgaattcaaatgccactggttattgcctactctggcagtggcagccctactttgatttcttgttgttgtgttatattgctacactgccagctaaacatgtctttgtaatgctaacacattgaatgttctcttaactttctaggcacatatgtaatgtcatgggctcatggttttgatatttatttgtctcaaaccactgtgaaaagataatttgtattgacattctgggagcagtttgatttctggtagatgtgggactaaaattctgtagaaatagactgataatgatggtttgaaggaaaaactggagggtggtgagtagagtcgagaggaaccagactagagagaggaacttgaggggctaattcatttcttccttaactcaaaagagatgaggagttgaggaccctccttaactgatccaactaatacatatgataagcctgacaaataacttaacaagcctgaaaagggataacaaggaaatctgggttaactctttagtcatatcccatgcagaatgaataaagaatggtttcattacagtagatctgagtacagagtggttatcttctatagtagtcactaggtgtaagtgtgtaaagcttgtatgaataaagaatgttttcattacaataatctgtaattttcttgaagaatcactgcttctatataatacaggcttctcagaaa

SEQ ID NO: 5192 - DNA, 1972 bp, Oryza sativa
  unsure (1)..(1972): unsure at all n locations
catgagctccttgttcttaaattgcttgaagaaattagctcccatatgacgcatgcaccacctactctgtacatcttcccaaacaccggggtatcctcgttccatactcccaaactgcaactctcctatcgctcgcagaatgccagcgtgcctatcatgtatcaggcatacatttggcctcataccaacaacttttgttttaaccaatttcaggaaccagtaccagctgtcggtattctcactctcaacaaaagcaaatgccaagggcaatacctgattgttcccatctacccctattgctgttagtatctggccccgatactttcctgcaagaatgtcccatcaatgcagagaacaggacgacagttcacgaatgccatcttgcatgcatgtagagctaagaacgccctttacagcacactcttgccaggatgttcaattgaggggaatttcttcacttcgtaagagctcccagggtttctttcctcgataacatcaagcaggcgtggcaaattgtcatatgaggctttgtaagttccaaatctcatctctattattttctgtttggccctccaggccttggcatagctaatagtatacttgtatgtctcttcaatgtatcggattattgaccttggttcatatgtgagattatcgatgacatgcgcatacatctcagatgcaacccatgcacatgtaatgctcctgtggtatttctgaacaccaggtagaaaacatgtatgcttggtaacaactgacactgtccaataattcttccatttccccttatacgcgtgcactctccatggacaacgatctttttccttaacacaccgaacttcatattgcgaccggttcgactaggcaacccaaaactctctatgaagagacactgcaaaatgttttaccagctccttcatatcttctnctctactataaatcgctccctgaataacctcattttctttgtactcccatctcacactatcctcttcagagacgatcagcccagaaaaatcctcactagcccattctgctggattaatatccgtctcatcatctgacgaatcaccttcctctacacgctcgttgtcagaatcctccctctccatttcatccacaatggcaccgacagtctccccctcgtcggccactccacctggttgaatgcccactggagctactacgcccccgtcctctcgtgcgttgacctcctccacagaagtctcgtttacttcagcacttggtccctcgccatcatccatgttcgtctgcacacctggatccttcgggtgaacaaacggaaccaaagctagaggccacccgcgttgcaatgcattttccaaataccatctccacactcgagagttttgaactgtcattagttcccaataaaaaccctcagttgcccgacttactaaaacattgattgttatgtcacttgtctgtggatcaactctcaagcccctcattaaccatccttttatagaaggtacactcctctcagccggtctatcaattcccctttctgatacaatgaaatctgacagatctaccccagttggcccgtaacggacgtttcctggtccatggtaaacttggaatatttgtttgttcgacatatctgtcaacgaaataactagatcatattactctttcatgcaataaacatctacaacgtaatatcttcttgtgtaagccaatgcaacggtaatgtattaattccaaactagcagatctacgtagttaccgatatctacaatacgcacttcttgattagtacaactaaaaccctaaaaatataatgcatttattcaaacaaatttttaaagaatacacactatttaactcaatagtcacatataggatataggatctatgaatattacctgaaatcggcgtctgaatccggcagggcttcgccccttcttctcttctcctcccctctcctctttttttttttcactggaat
